United States Patent Application Publication US 2007/0214517 A1 - sequence listing, part 59

SEQ ID NO: 78174 - DNA, 1233 bp, Arabidopsis thaliana
  misc_feature (1)..(1233): Ceres Seq. ID no. 12639634
  misc_feature: MA Experiment ID: 20000173 Result: Up-regulated in Transcription
  misc_feature: MA Experiment 20000173 PARAMETER Experiment Name: At_42deg_Heat_P Parameter: Age (day) Value: 14
  misc_feature: MA Experiment 20000173 PARAMETER Experiment Name: At_42deg_Heat_P Parameter: Organism Value: A. thaliana
  misc_feature: MA Experiment 20000173 PARAMETER Experiment Name: At_42deg_Heat_P Parameter: Plant Line Value: WS
  misc_feature: MA Experiment 20000173 PARAMETER Experiment Name: At_42deg_Heat_P Parameter: Temperature (deg C) Value: 42 vs. 22
  misc_feature: MA Experiment 20000173 PARAMETER Experiment Name: At_42deg_Heat_P Parameter: Timepoint (hr) Value: 6
  misc_feature: MA Experiment 20000173 PARAMETER Experiment Name: At_42deg_Heat_P Parameter: Tissue Value: Aerial
atggagagcttgacgatgctccttatcatgggacacttcatacaactgggagtttcagttattccagtttctaccatttatagtcctgacggcgatttgattgattgtatctaccggacggatcaacgagccttcgaccacccactcttacgaaaccatattattcaggaatatcctaccaacatgccacaaatagaaaaaagcgtacaagaaaattggcaaatttggcacgacaccggagaaaagtgtccggcagagacgattcctatgcgtcgggaattgaatccagtttctcaccaaaagcagcatgtacatgttccaaaagagtatgaggtcgccaacagagcaacttcagggcacaagtatgcaattgcatacatgattaaccggacaaatgtgtacggaacaagggcaacgtttaatgtctggacaccaaaggtagaatcggcttacgattttagcctcgctcagatttggctggcatctgggtcatacgagactgcggatctcaatactgttgaagccggttggcaggtttctcggtcgaggtataatgacagccaggccagattgtttacatattggacggcggatggatataacaagaccgggtgttatggcctcgaccttcctggatttgtgcagactagcagtaccatcgccatcggagctgccattggtcgcacctcgacatatggaggcacccagtttgacatgacacttcagatctggaaggatctgttttcaggacattggtggctggctctgggcccaaatttagtgcccattggatactggccggccgtaattttcacgaccttatccgattatgcgacggcagttgaatggggaggcgaagtattataccgaaacctgtcgagcgtgaatacggtggctcaaatgggttcaggagaatatgccgacaaaggctatgggaaagcggcatatttctgcaatctgaaggtggcagagaacaaccacacccttctcccggttcaagatttcggcgttcaagccgattatccagaatattataccgttaagaagtcatctaaccggaactgcggaaaccatttttatttcggcggaccaggacctcaacgttcagaagcagttcggggaacaacggttttaatacatgtctatatccatgtacatacgtgcccagttgacatgatcattatcaatactatatgtttagttatttttttcaaaatcgatcaatacgaatag

SEQ ID NO: 78175 - protein, 410 aa, Arabidopsis thaliana
  peptide (1)..(410): Ceres Seq. ID no. 12639635
  misc_feature (133)..(329): Pfam Name: Arabidopsis proteins of unknown function Pfam Description: Arabidopsis proteins of unknown function
  misc_feature (195)..(377): Homolog of NCBI NO: 15239661 NR Description: putative protein; protein id: At5g19170.1
  misc_feature (1)..(178): Homolog of NCBI NO: 15239661 NR Description: putative protein; protein id: At5g19170.1
  misc_feature (19)..(365): Homolog of NCBI NO: 7487383 NR Description: hypothetical protein T24C20.110 - Arabidopsis >gi|5541729|emb|CAB51070.1| putative protein [Arabidopsis
  misc_feature (19)..(365): Homolog of NCBI NO: 30693008 NR Description: expressed protein [Arabidopsis thaliana] unknown protein [Arabidopsis thaliana]
  misc_feature (66)..(365): Homolog of NCBI NO: 34393554 NR Description: putative carboxyl-terminal proteinase [Oryza
  misc_feature (22)..(92): Homolog of NCBI NO: 34393554 NR Description: putative carboxyl-terminal proteinase [Oryza
  misc_feature (67)..(365): Homolog of NCBI NO: 18406483 NR Description: expressed protein; protein id: At2g44210.1, by cDNA: 39057., supported by cDNA: gi_15081718 [Arabidopsis
  misc_feature (23)..(92): Homolog of NCBI NO: 18406483 NR Description: expressed protein; protein id: At2g44210.1, by cDNA: 39057., supported by cDNA: gi_15081718 [Arabidopsis
  misc_feature (23)..(365): Homolog of NCBI NO: 25345697 NR Description: unknown protein F5A18.27 [imported] - Arabidopsis
  misc_feature (23)..(365): Homolog of NCBI NO: 30698726 NR Description: expressed protein [Arabidopsis thaliana]
MESLTMLLIMGHFIQLGVSVIPVSTIYSPDGDLIDCIYRTDQRAFDHPLLRNHIIQEYPTNMPQIEKSVQENWQIWHDTGEKCPAETIPMRRELNPVSHQKQHVHVPKEYEVANRATSGHKYAIAYMINRTNVYGTRATFNVWTPKVESAYDFSLAQIWLASGSYETADLNTVEAGWQVSRSRYNDSQARLFTYWTADGYNKTGCYGLDLPGFVQTSSTIAIGAAIGRTSTYGGTQFDMTLQIWKDLFSGHWWLALGPNLVPIGYWPAVIFTTLSDYATAVEWGGEVLYRNLSSVNTVAQMGSGEYADKGYGKAAYFCNLKVAENNHTLLPVQDFGVQADYPEYYTVKKSSNRNCGNHFYFGGPGPQRSEAVRGTTVLIHVYIHVHTCPVDMIIINTICLVIFFKIDQYE

SEQ ID NO: 78176 - protein, 405 aa, Arabidopsis thaliana
  peptide (1)..(405): Ceres Seq. ID no. 12639636
  misc_feature (128)..(324): Pfam Name: Arabidopsis proteins of unknown function Pfam Description: Arabidopsis proteins of unknown function
  misc_feature (190)..(372): Homolog of NCBI NO: 15239661 NR Description: putative protein; protein id: At5g19170.1
  misc_feature (1)..(173): Homolog of NCBI NO: 15239661 NR Description: putative protein; protein id: At5g19170.1
  misc_feature (14)..(360): Homolog of NCBI NO: 7487383 NR Description: hypothetical protein T24C20.110 - Arabidopsis >gi|5541729|emb|CAB51070.1| putative protein [Arabidopsis
  misc_feature (14)..(360): Homolog of NCBI NO: 30693008 NR Description: expressed protein [Arabidopsis thaliana] unknown protein [Arabidopsis thaliana]
  misc_feature (61)..(360): Homolog of NCBI NO: 34393554 NR Description: putative carboxyl-terminal proteinase [Oryza
  misc_feature (17)..(87): Homolog of NCBI NO: 34393554 NR Description: putative carboxyl-terminal proteinase [Oryza
  misc_feature (62)..(360): Homolog of NCBI NO: 18406483 NR Description: expressed protein; protein id: At2g44210.1, by cDNA: 39057., supported by cDNA: gi_15081718 [Arabidopsis
  misc_feature (18)..(87): Homolog of NCBI NO: 18406483 NR Description: expressed protein; protein id: At2g44210.1, by cDNA: 39057., supported by cDNA: gi_15081718 [Arabidopsis
  misc_feature (18)..(360): Homolog of NCBI NO: 25345697 NR Description: unknown protein F5A18.27 [imported] - Arabidopsis
  misc_feature (18)..(360): Homolog of NCBI NO: 30698726 NR Description: expressed protein [Arabidopsis thaliana]
MLLIMGHFIQLGVSVIPVSTIYSPDGDLIDCIYRTDQRAFDHPLLRNHIIQEYPTNMPQIEKSVQENWQIWHDTGEKCPAETIPMRRELNPVSHQKQHVHVPKEYEVANRATSGHKYAIAYMINRTNVYGTRATFNVWTPKVESAYDFSLAQIWLASGSYETADLNTVEAGWQVSRSRYNDSQARLFTYWTADGYNKTGCYGLDLPGFVQTSSTIAIGAAIGRTSTYGGTQFDMTLQIWKDLFSGHWWLALGPNLVPIGYWPAVIFTTLSDYATAVEWGGEVLYRNLSSVNTVAQMGSGEYADKGYGKAAYFCNLKVAENNHTLLPVQDFGVQADYPEYYTVKKSSNRNCGNHFYFGGPGPQRSEAVRGTTVLIHVYIHVHTCPVDMIIINTICLVIFFKIDQYE

SEQ ID NO: 78177 - protein, 401 aa, Arabidopsis thaliana
  peptide (1)..(401): Ceres Seq. ID no. 12639637
  misc_feature (124)..(320): Pfam Name: Arabidopsis proteins of unknown function Pfam Description: Arabidopsis proteins of unknown function
  misc_feature (186)..(368): Homolog of NCBI NO: 15239661 NR Description: putative protein; protein id: At5g19170.1
  misc_feature (1)..(169): Homolog of NCBI NO: 15239661 NR Description: putative protein; protein id: At5g19170.1
  misc_feature (10)..(356): Homolog of NCBI NO: 7487383 NR Description: hypothetical protein T24C20.110 - Arabidopsis >gi|5541729|emb|CAB51070.1| putative protein [Arabidopsis
  misc_feature (10)..(356): Homolog of NCBI NO: 30693008 NR Description: expressed protein [Arabidopsis thaliana] unknown protein [Arabidopsis thaliana]
  misc_feature (57)..(356): Homolog of NCBI NO: 34393554 NR Description: putative carboxyl-terminal proteinase [Oryza
  misc_feature (13)..(83): Homolog of NCBI NO: 34393554 NR Description: putative carboxyl-terminal proteinase [Oryza
  misc_feature (58)..(356): Homolog of NCBI NO: 18406483 NR Description: expressed protein; protein id: At2g44210.1, by cDNA: 39057., supported by cDNA: gi_15081718 [Arabidopsis
  misc_feature (14)..(83): Homolog of NCBI NO: 18406483 NR Description: expressed protein; protein id: At2g44210.1, by cDNA: 39057., supported by cDNA: gi_15081718 [Arabidopsis
  misc_feature (14)..(356): Homolog of NCBI NO: 25345697 NR Description: unknown protein F5A18.27 [imported] - Arabidopsis
  misc_feature (14)..(356): Homolog of NCBI NO: 30698726 NR Description: expressed protein [Arabidopsis thaliana]
MGHFIQLGVSVIPVSTIYSPDGDLIDCIYRTDQRAFDHPLLRNHIIQEYPTNMPQIEKSVQENWQIWHDTGEKCPAETIPMRRELNPVSHQKQHVHVPKEYEVANRATSGHKYAIAYMINRTNVYGTRATFNVWTPKVESAYDFSLAQIWLASGSYETADLNTVEAGWQVSRSRYNDSQARLFTYWTADGYNKTGCYGLDLPGFVQTSSTIAIGAAIGRTSTYGGTQFDMTLQIWKDLFSGHWWLALGPNLVPIGYWPAVIFTTLSDYATAVEWGGEVLYRNLSSVNTVAQMGSGEYADKGYGKAAYFCNLKVAENNHTLLPVQDFGVQADYPEYYTVKKSSNRNCGNHFYFGGPGPQRSEAVRGTTVLIHVYIHVHTCPVDMIIINTICLVIFFKIDQYE

SEQ ID NO: 78178 - DNA, 1257 bp, Arabidopsis thaliana
  misc_feature (1)..(1257): Ceres Seq. ID no. 12639672
  misc_feature: MA Experiment ID: 20000307 Result: Up-regulated in Transcription
  misc_feature: MA Experiment 20000307 PARAMETER Experiment Name: At_Germinating_Seeds_Sub_P Parameter: Age (hr) Value: 24 vs. 0
  misc_feature: MA Experiment 20000307 PARAMETER Experiment Name: At_Germinating_Seeds_Sub_P Parameter: Organism Value: A. thaliana
  misc_feature: MA Experiment 20000307 PARAMETER Experiment Name: At_Germinating_Seeds_Sub_P Parameter: Plant Line Value: WS
  misc_feature: MA Experiment 20000307 PARAMETER Experiment Name: At_Germinating_Seeds_Sub_P Parameter: Tissue Value: Germinating Seeds
  misc_feature: MA Experiment ID: 20000440 Result: Down-regulated in Transcription
  misc_feature: MA Experiment 20000440 PARAMETER Experiment Name: At_Closed-Flower__Sub_P Parameter: Tissue Value: Closed Flower vs. Whole Plant
atggggaaagagtgctactacttgtcatggatactcaagtttcatcttctacttgttttgattcagcttgttgattcaggatctaccatcagatttcttcctggtttccaaggccctcttcctttcgagctcgagaccgggtacattggtgtgggtgaggcagagaaagatcaaatgttctactacttcatcaaatctgagagtaatccagagaaagaccctcttcttctctggttaagtggaggtcctttctgttcttcgttcactgctcttatttatgagaatgggccaattgctttcaaggctgaggaatacaatggaagtatcccctctttggtctctaccacatatgcatggactaaggtggcgagcattctctatttggatcagcctgttgggactggcttctcctactccagaaatccacttgctgatataccaagtgacacaggggtagctaagccggtcaacgagtttcttcataagtggctagacaaacatcctgagttcttatccaatccgctctatgtcgccggaaattcttattccggtattgtcattccgaccatcgttcaagaaatctcaaatggaaaccatttagacagcaaacctcaaataaatcttcagggctttgtactcggaaacccggcaacagacactgatattgatcttaactctcgcattccatttgctcatggaaaggcactgatctctgatgaacactatgagtctctaaagagaagttgtcaagggaattatattagcgtgaatcctcgtaacacaaaatgcttgaaactccttgaagactttaaaaagtgtgtttctggaataagtgaagaatatattctaaaacctgactgcatgtggctttattcttgtatggcaaatctgcattcgctatctgaatattgggcaaatgagaaaagcgtgcgcaaagctcttctagtgaacgagggtaccgtaagaaaatggatacgatgtaatacggaaatcgcatacaataaggacattaggagtagtgtgccatatcataagtatattagcattgaagggtatcgatctctcgtcttcagtggtgatcacgacatgttagtacctttccttggaactcaagcatggataagatctctcaactattccattgttgacgattggagaccatggatggttcagaatcaagttgctggatacacaaggacttatgcgaataagatgacatttgccactgtcaaagcaaggaggcgggcacacgagtga

SEQ ID NO: 78179 - protein, 418 aa, Arabidopsis thaliana
  peptide (1)..(418): Ceres Seq. ID no. 12639673
  misc_feature (34)..(411): Pfam Name: Serine carboxypeptidase Pfam Description: Serine carboxypeptidase
  misc_feature (1)..(411): Homolog of NCBI NO: 15230430 NR Description: serine carboxypeptidase, putative; protein id: [Arabidopsis thaliana] >gi|12322038|gb|AAG51061.1|AC069472_1
  misc_feature (96)..(411): Homolog of NCBI NO: 15795141 NR Description: serine carboxypeptidase [Arabidopsis thaliana]
  misc_feature (1)..(47): Homolog of NCBI NO: 15795141 NR Description: serine carboxypeptidase [Arabidopsis thaliana]
  misc_feature (9)..(411): Homolog of NCBI NO: 15230438 NR Description: serine carboxypeptidase, putative; protein id: [Arabidopsis thaliana] >gi|12322055|gb|AAG51078.1|AC069472_18
  misc_feature (9)..(411): Homolog of NCBI NO: 15795144 NR Description: serine carboxypeptidase [Arabidopsis thaliana]
  misc_feature (9)..(411): Homolog of NCBI NO: 15230440 NR Description: serine carboxypeptidase, putative; protein id: [Arabidopsis thaliana] >gi|12322053|gb|AAG51076.1|AC069472_16
  misc_feature (9)..(411): Homolog of NCBI NO: 15795145 NR Description: serine carboxypeptidase [Arabidopsis thaliana]
  misc_feature (7)..(411): Homolog of NCBI NO: 15228300 NR Description: putative glucose acyltransferase; protein id: [Arabidopsis thaliana] >gi|8567775|gb|AAF76347.1| glucose putative [Arabidopsis thaliana]
  misc_feature (16)..(411): Homolog of NCBI NO: 15227765 NR Description: putative serine carboxypeptidase I; protein id: [Arabidopsis thaliana] >gi|25289780|pir||E84618 probable serine
  misc_feature (8)..(412): Homolog of NCBI NO: 24417488 NR Description: unknown [Arabidopsis thaliana]
MGKECYYLSWILKFHLLLVLIQLVDSGSTIRFLPGFQGPLPFELETGYIGVGEAEKDQMFYYFIKSESNPEKDPLLLWLSGGPFCSSFTALIYENGPIAFKAEEYNGSIPSLVSTTYAWTKVASILYLDQPVGTGFSYSRNPLADIPSDTGVAKPVNEFLHKWLDKHPEFLSNPLYVAGNSYSGIVIPTIVQEISNGNHLDSKPQINLQGFVLGNPATDTDIDLNSRIPFAHGKALISDEHYESLKRSCQGNYISVNPRNTKCLKLLEDFKKCVSGISEEYILKPDCMWLYSCMANLHSLSEYWANEKSVRKALLVNEGTVRKWIRCNTEIAYNKDIRSSVPYHKYISIEGYRSLVFSGDHDMLVPFLGTQAWIRSLNYSIVDDWRPWMVQNQVAGYTRTYANKMTFATVKARRRAHE

SEQ ID NO: 78180 - protein, 360 aa, Arabidopsis thaliana
  peptide (1)..(360): Ceres Seq. ID no. 12639674
  misc_feature (1)..(353): Pfam Name: Serine carboxypeptidase Pfam Description: Serine carboxypeptidase
  misc_feature (1)..(353): Homolog of NCBI NO: 15230430 NR Description: serine carboxypeptidase, putative; protein id: [Arabidopsis thaliana] >gi|12322038|gb|AAG51061.1|AC069472_1
  misc_feature (38)..(353): Homolog of NCBI NO: 15795141 NR Description: serine carboxypeptidase [Arabidopsis thaliana]
  misc_feature (1)..(353): Homolog of NCBI NO: 15230438 NR Description: serine carboxypeptidase, putative; protein id: [Arabidopsis thaliana] >gi|12322055|gb|AAG51078.1|AC069472_18
  misc_feature (1)..(353): Homolog of NCBI NO: 15795144 NR Description: serine carboxypeptidase [Arabidopsis thaliana]
  misc_feature (1)..(353): Homolog of NCBI NO: 15230440 NR Description: serine carboxypeptidase, putative; protein id: [Arabidopsis thaliana] >gi|12322053|gb|AAG51076.1|AC069472_16
  misc_feature (1)..(353): Homolog of NCBI NO: 15795145 NR Description: serine carboxypeptidase [Arabidopsis thaliana]
  misc_feature (1)..(353): Homolog of NCBI NO: 15228300 NR Description: putative glucose acyltransferase; protein id: [Arabidopsis thaliana] >gi|8567775|gb|AAF76347.1| glucose putative [Arabidopsis thaliana]
  misc_feature (1)..(353): Homolog of NCBI NO: 15227765 NR Description: putative serine carboxypeptidase I; protein id: [Arabidopsis thaliana] >gi|25289780|pir||E84618 probable serine
  misc_feature (1)..(354): Homolog of NCBI NO: 24417488 NR Description: unknown [Arabidopsis thaliana]
  misc_feature (1)..(353): Homolog of NCBI NO: 8777303 NR Description: serine carboxypeptidase [Arabidopsis thaliana]
MFYYFIKSESNPEKDPLLLWLSGGPFCSSFTALIYENGPIAFKAEEYNGSIPSLVSTTYAWTKVASILYLDQPVGTGFSYSRNPLADIPSDTGVAKPVNEFLHKWLDKHPEFLSNPLYVAGNSYSGIVIPTIVQEISNGNHLDSKPQINLQGFVLGNPATDTDIDLNSRIPFAHGKALISDEHYESLKRSCQGNYISVNPRNTKCLKLLEDFKKCVSGISEEYILKPDCMWLYSCMANLHSLSEYWANEKSVRKALLVNEGTVRKWIRCNTEIAYNKDIRSSVPYHKYISIEGYRSLVFSGDHDMLVPFLGTQAWIRSLNYSIVDDWRPWMVQNQVAGYTRTYANKMTFATVKARRRAHE

SEQ ID NO: 78181 - DNA, 1437 bp, Arabidopsis thaliana
  misc_feature (1)..(1437): Ceres Seq. ID no. 12639686
  misc_feature: MA Experiment ID: 20000180 Result: Down-regulated in Transcription
  misc_feature: MA Experiment 20000180 PARAMETER Experiment Name: At_Germinating_Seeds_P Parameter: Age (hr) Value: 24 vs. 0
  misc_feature: MA Experiment 20000180 PARAMETER Experiment Name: At_Germinating_Seeds_P Parameter: Tissue Value: Germinating Seeds
  misc_feature: MA Experiment ID: 20000495 Result: Down-regulated in Transcription
  misc_feature: MA Experiment 20000495 PARAMETER Experiment Name: At_Guard_Cells_P Parameter: Harvest Date Value: 8/2/2002
  misc_feature: MA Experiment 20000495 PARAMETER Experiment Name: At_Guard_Cells_P Parameter: Organism Value: A. thaliana
  misc_feature: MA Experiment 20000495 PARAMETER Experiment Name: At_Guard_Cells_P Parameter: Tissue Value: Guard Cells vs. Leaves
  misc_feature: MA Experiment ID: 20001458 Result: Up-regulated in Transcription
  misc_feature: MA Experiment 20001458 PARAMETER Experiment Name: At_50mM_NH4NO3_L-to-H_P Parameter: Age (day) Value: Undefined
  misc_feature: MA Experiment 20001458 PARAMETER Experiment Name: At_50mM_NH4NO3_L-to-H_P Parameter: Organism Value: Undefined
  misc_feature: MA Experiment 20001458 PARAMETER Experiment Name: At_50mM_NH4NO3_L-to-H_P Parameter: Plant Line Value: Undefined
  misc_feature: MA Experiment 20001458 PARAMETER Experiment Name: At_50mM_NH4NO3_L-to-H_P Parameter: Timepoint (hr) Value: 2
  misc_feature: MA Experiment 20001458 PARAMETER Experiment Name: At_50mM_NH4NO3_L-to-H_P Parameter: Tissue Value: Siliques
  misc_feature: MA Experiment 20001458 PARAMETER Experiment Name: At_50mM_NH4NO3_L-to-H_P Parameter: Treatment Value: 50mM NH4NO3 vs. 100mM Manitol
  misc_feature: MA Experiment ID: 20001557 Result: Up-regulated in Transcription
  misc_feature: MA Experiment 20001557 PARAMETER Experiment Name: At_Drought_Soil_Dry_P Parameter: Age (day) Value: 27
  misc_feature: MA Experiment 20001557 PARAMETER Experiment Name: At_Drought_Soil_Dry_P Parameter: Organism Value: A. thaliana
  misc_feature: MA Experiment 20001557 PARAMETER Experiment Name: At_Drought_Soil_Dry_P Parameter: Plant Line Value: WS
  misc_feature: MA Experiment 20001557 PARAMETER Experiment Name: At_Drought_Soil_Dry_P Parameter: Post Timepoint (hr) Value: 3
  misc_feature: MA Experiment 20001557 PARAMETER Experiment Name: At_Drought_Soil_Dry_P Parameter: Post-Treatment Value: Re-Water vs. No Drought
  misc_feature: MA Experiment 20001557 PARAMETER Experiment Name: At_Drought_Soil_Dry_P Parameter: Timepoint (day) Value: 13
  misc_feature: MA Experiment 20001557 PARAMETER Experiment Name: At_Drought_Soil_Dry_P Parameter: Treatment Value: Drought vs. No Drought
  misc_feature: MA Experiment ID: 20001558 Result: Up-regulated in Transcription
  misc_feature: MA Experiment 20001558 PARAMETER Experiment Name: At_Drought_Soil_Dry_P Parameter: Age (day) Value: 27
  misc_feature: MA Experiment 20001558 PARAMETER Experiment Name: At_Drought_Soil_Dry_P Parameter: Organism Value: A. thaliana
  misc_feature: MA Experiment 20001558 PARAMETER Experiment Name: At_Drought_Soil_Dry_P Parameter: Plant Line Value: WS
  misc_feature: MA Experiment 20001558 PARAMETER Experiment Name: At_Drought_Soil_Dry_P Parameter: Post Timepoint (hr) Value: 6
  misc_feature: MA Experiment 20001558 PARAMETER Experiment Name: At_Drought_Soil_Dry_P Parameter: Post-Treatment Value: Re-Water vs. No Drought
  misc_feature: MA Experiment 20001558 PARAMETER Experiment Name: At_Drought_Soil_Dry_P Parameter: Timepoint (day) Value: 13
  misc_feature: MA Experiment 20001558 PARAMETER Experiment Name: At_Drought_Soil_Dry_P Parameter: Treatment Value: Drought vs. No Drought
  misc_feature: MA Experiment ID: 20001757 Result: Up-regulated in Transcription
  misc_feature: MA Experiment 20001757 PARAMETER Experiment Name: At_50mM_NH4NO3_L-to-H_P Parameter: Timepoint (hr) Value: 6
  misc_feature: MA Experiment 20001757 PARAMETER Experiment Name: At_50mM_NH4NO3_L-to-H_P Parameter: Tissue Value: Leaf
  misc_feature: MA Experiment 20001757 PARAMETER Experiment Name: At_50mM_NH4NO3_L-to-H_P Parameter: Treatment Value: 50mM NH4NO3 vs 100mM Mannitol
atgctcgatttctactcttcttttaagctcatcaactatattcgctcacaggaggattcacttttgtactcgtttgcagatgatgaggaagatgaagaagtcacgtttgacagagaggaagtgatggaggaattgcagaagcttggggatttaagcattgatgtcgaggctttaggggaaagctcaatgtcgaacagtgataaatgcaatataaatggaagtaaggatgtaacttcgctctcaaactgcaatggcctaaagcaaagttctgcggatgatttgatagtcaatgggaaagatgcagaaccaaaggtttgtgatggaaggctagttaataggaacatcagaaaggtgaatgagaactattttggatcttatagttcgtttggcattcacagggagatgctaagtgataaggttagaacagaagcataccgagatgcacttttgaagaatcctactctcttgaatggctctgttgtaatggatgttggttgtggaactgggatattgagtctttttgctgctaaagctggggcttcaagggtagttgcagttgaagctagtgagaagatggccaaagttgcaactaagattgcgaaggataacaaagtattcaatgataacgagcataatggggtacttgaagttgcacactcaatggtagaagagctagataaatcgatacagattcagcctcatagtgttgatgtgttagtcagcgaatggatgggatactgccttttatatgagtcaatgctcagttctgtgctctatgcaagagatcggtggttgaaacctggaggtgcaatcctccctgacacggccactatgtttgttgcgggatttggaaaaggtgcaacaagtcttcctttctgggaagatgtctatggctttgacatgtcttcaattgggaaggagatacatgacgacactactcgacttcccattgttgacgttatagcggagcgtgatttagtgacacagcctacccttcttcagacatttgacctggctaccatgaaaccggatgaagtagatttcacagcaacggcaacgctggagcccactgagtcagaagcaaaaactaggttgtgccatggtgttgtgttgtggtttgacacaggtttcaccagtaggttctgtaaggaaaacccaaccgtactatccacatcaccctacactcccccaacacactgggctcagacaatcttaacttttcaagaaccaatctcagtggcaccggcctcggttctgtctggtaatgacagaagagaagccatcggaaccgaagagtgtcccgcctcaagcattcatctgcgtgtgagtgttgcacgagcacatgagcatcgcagcatagacatctcgttagaggctactgggctgagctcaaagggtcagaagcgtcactggccggttcagatatttaatctatga

SEQ ID NO: 78182 - protein, 478 aa, Arabidopsis thaliana
  peptide (1)..(478): Ceres Seq. ID no. 12639687
  misc_feature (17)..(478): Homolog of NCBI NO: 15795148 NR Description: protein arginine N-methyltransferase 3-like
  misc_feature (17)..(478): Homolog of NCBI NO: 15230446 NR Description: arginine N-methyltransferase 3, putative; protein At3g12270.1 [Arabidopsis thaliana]
  misc_feature (17)..(478): Homolog of NCBI NO: 27261101 NR Description: putative arginine N-methyltransferase 3 [Oryza
  misc_feature (122)..(378): Homolog of NCBI NO: 30685597 NR Description: protein arginine N-methyltransferase family
  misc_feature (345)..(445): Homolog of NCBI NO: 30685597 NR Description: protein arginine N-methyltransferase family
  misc_feature (122)..(422): Homolog of NCBI NO: 38344195 NR Description: OSJNBa0064G10.11 [Oryza sativa (japonica
  misc_feature (2)..(421): Homolog of NCBI NO: 29747742 NR Description: Similar to protein arginine N-methyltransferase
  misc_feature (122)..(422): Homolog of NCBI NO: 39595919 NR Description: Hypothetical protein CBG12910 [Caenorhabditis
  misc_feature (122)..(422): Homolog of NCBI NO: 40539106 NR Description: putative arginine methyltransferase (alternative
  misc_feature (63)..(395): Homolog of NCBI NO: 27530887 NR Description: protein arginine methyltransferase 1 [Xenopus
MLDFYSSFKLINYIRSQEDSLLYSFADDEEDEEVTFDREEVMEELQKLGDLSIDVEALGESSMSNSDKCNINGSKDVTSLSNCNGLKQSSADDLIVNGKDAEPKVCDGRLVNRNIRKVNENYFGSYSSFGIHREMLSDKVRTEAYRDALLKNPTLLNGSVVMDVGCGTGILSLFAAKAGASRVVAVEASEKMAKVATKIAKDNKVFNDNEHNGVLEVAHSMVEELDKSIQIQPHSVDVLVSEWMGYCLLYESMLSSVLYARDRWLKPGGAILPDTATMFVAGFGKGATSLPFWEDVYGFDMSSIGKEIHDDTTRLPIVDVIAERDLVTQPTLLQTFDLATMKPDEVDFTATATLEPTESEAKTRLCHGVVLWFDTGFTSRFCKENPTVLSTSPYTPPTHWAQTILTFQEPISVAPASVLSGNDRREAIGTEECPASSIHLRVSVARAHEHRSIDISLEATGLSSKGQKRHWPVQIFNL

SEQ ID NO: 78183 - protein, 437 aa, Arabidopsis thaliana
  peptide (1)..(437): Ceres Seq. ID no. 12639688
  misc_feature (1)..(437): Homolog of NCBI NO: 15795148 NR Description: protein arginine N-methyltransferase 3-like
  misc_feature (1)..(437): Homolog of NCBI NO: 15230446 NR Description: arginine N-methyltransferase 3, putative; protein At3g12270.1 [Arabidopsis thaliana]
  misc_feature (1)..(437): Homolog of NCBI NO: 27261101 NR Description: putative arginine N-methyltransferase 3 [Oryza
  misc_feature (81)..(337): Homolog of NCBI NO: 30685597 NR Description: protein arginine N-methyltransferase family
  misc_feature (304)..(404): Homolog of NCBI NO: 30685597 NR Description: protein arginine N-methyltransferase family
  misc_feature (81)..(381): Homolog of NCBI NO: 38344195 NR Description: OSJNBa0064G10.11 [Oryza sativa (japonica
  misc_feature (1)..(380): Homolog of NCBI NO: 29747742 NR Description: Similar to protein arginine N-methyltransferase
  misc_feature (81)..(381): Homolog of NCBI NO: 39595919 NR Description: Hypothetical protein CBG12910 [Caenorhabditis
  misc_feature (81)..(381): Homolog of NCBI NO: 40539106 NR Description: putative arginine methyltransferase (alternative
  misc_feature (22)..(354): Homolog of NCBI NO: 27530887 NR Description: protein arginine methyltransferase 1 [Xenopus
MEELQKLGDLSIDVEALGESSMSNSDKCNINGSKDVTSLSNCNGLKQSSADDLIVNGKDAEPKVCDGRLVNRNIRKVNENYFGSYSSFGIHREMLSDKVRTEAYRDALLKNPTLLNGSVVMDVGCGTGILSLFAAKAGASRVVAVEASEKMAKVATKIAKDNKVFNDNEHNGVLEVAHSMVEELDKSIQIQPHSVDVLVSEWMGYCLLYESMLSSVLYARDRWLKPGGAILPDTATMFVAGFGKGATSLPFWEDVYGFDMSSIGKEIHDDTTRLPIVDVIAERDLVTQPTLLQTFDLATMKPDEVDFTATATLEPTESEAKTRLCHGVVLWFDTGFTSRFCKENPTVLSTSPYTPPTHWAQTILTFQEPISVAPASVLSGNDRREAIGTEECPASSIHLRVSVARAHEHRSIDISLEATGLSSKGQKRHWPVQIFNL

SEQ ID NO: 78184 - protein, 416 aa, Arabidopsis thaliana
  peptide (1)..(416): Ceres Seq. ID no. 12639689
  misc_feature (1)..(416): Homolog of NCBI NO: 15795148 NR Description: protein arginine N-methyltransferase 3-like
  misc_feature (1)..(416): Homolog of NCBI NO: 15230446 NR Description: arginine N-methyltransferase 3, putative; protein At3g12270.1 [Arabidopsis thaliana]
  misc_feature (1)..(416): Homolog of NCBI NO: 27261101 NR Description: putative arginine N-methyltransferase 3 [Oryza
  misc_feature (60)..(316): Homolog of NCBI NO: 30685597 NR Description: protein arginine N-methyltransferase family
  misc_feature (283)..(383): Homolog of NCBI NO: 30685597 NR Description: protein arginine N-methyltransferase family
  misc_feature (60)..(360): Homolog of NCBI NO: 38344195 NR Description: OSJNBa0064G10.11 [Oryza sativa (japonica
  misc_feature (1)..(359): Homolog of NCBI NO: 29747742 NR Description: Similar to protein arginine N-methyltransferase
  misc_feature (60)..(360): Homolog of NCBI NO: 39595919 NR Description: Hypothetical protein CBG12910 [Caenorhabditis
  misc_feature (60)..(360): Homolog of NCBI NO: 40539106 NR Description: putative arginine methyltransferase (alternative
  misc_feature (1)..(333): Homolog of NCBI NO: 27530887 NR Description: protein arginine methyltransferase 1 [Xenopus
MSNSDKCNINGSKDVTSLSNCNGLKQSSADDLIVNGKDAEPKVCDGRLVNRNIRKVNENYFGSYSSFGIHREMLSDKVRTEAYRDALLKNPTLLNGSVVMDVGCGTGILSLFAAKAGASRVVAVEASEKMAKVATKIAKDNKVFNDNEHNGVLEVAHSMVEELDKSIQIQPHSVDVLVSEWMGYCLLYESMLSSVLYARDRWLKPGGAILPDTATMFVAGFGKGATSLPFWEDVYGFDMSSIGKEIHDDTTRLPIVDVIAERDLVTQPTLLQTFDLATMKPDEVDFTATATLEPTESEAKTRLCHGVVLWFDTGFTSRFCKENPTVLSTSPYTPPTHWAQTILTFQEPISVAPASVLSGNDRREAIGTEECPASSIHLRVSVARAHEHRSIDISLEATGLSSKGQKRHWPVQIFNL

SEQ ID NO: 78185 - DNA, 2040 bp, Arabidopsis thaliana
  misc_feature (1)..(2040): Ceres Seq. ID no. 12639706
  misc_feature: MA Experiment ID: 20000184 Result: Down-regulated in Transcription
  misc_feature: MA Experiment 20000184 PARAMETER Experiment Name: At_Shoots__P Parameter: Age (day) Value: 7
  misc_feature: MA Experiment 20000184 PARAMETER Experiment Name: At_Shoots__P Parameter: Tissue Value: Shoots vs. Whole Plant
  misc_feature: MA Experiment ID: 20000234 Result: Down-regulated in Transcription
  misc_feature: MA Experiment 20000234 PARAMETER Experiment Name: At_Siliques_P Parameter: Age (day) Value: 21
  misc_feature: MA Experiment 20000234 PARAMETER Experiment Name: At_Siliques_P Parameter: Organism Value: A. thaliana
  misc_feature: MA Experiment 20000234 PARAMETER Experiment Name: At_Siliques_P Parameter: Plant Line Value: WS
  misc_feature: MA Experiment 20000234 PARAMETER Experiment Name: At_Siliques_P Parameter: Tissue Value: Less Than 5mm Siliques vs. Whole Plant
  misc_feature: MA Experiment ID: 20000235 Result: Down-regulated in Transcription
  misc_feature: MA Experiment 20000235 PARAMETER Experiment Name: At_Siliques_P Parameter: Age (day) Value: 21
  misc_feature: MA Experiment 20000235 PARAMETER Experiment Name: At_Siliques_P Parameter: Organism Value: A. thaliana
  misc_feature: MA Experiment 20000235 PARAMETER Experiment Name: At_Siliques_P Parameter: Plant Line Value: WS
  misc_feature: MA Experiment 20000235 PARAMETER Experiment Name: At_Siliques_P Parameter: Tissue Value: 5-10mm Siliques vs. Whole Plant
  misc_feature: MA Experiment ID: 20000265 Result: Down-regulated in Transcription
  misc_feature: MA Experiment 20000265 PARAMETER Experiment Name: At_Open_Flower_P Parameter: Age (day) Value: 21
  misc_feature: MA Experiment 20000265 PARAMETER Experiment Name: At_Open_Flower_P Parameter: Plant Line Value: WS
  misc_feature: MA Experiment 20000265 PARAMETER Experiment Name: At_Open_Flower_P Parameter: Tissue Value: Closed Flower vs. Whole Plant
  misc_feature: MA Experiment ID: 20000286 Result: Down-regulated in Transcription
  misc_feature: MA Experiment 20000286 PARAMETER Experiment Name: At_Open_Flower_P Parameter: Age (day) Value: 21
  misc_feature: MA Experiment 20000286 PARAMETER Experiment Name: At_Open_Flower_P Parameter: Plant Line Value: WS
  misc_feature: MA Experiment 20000286 PARAMETER Experiment Name: At_Open_Flower_P Parameter: Tissue Value: Half Open vs. Whole Plant
aaattacatctcaaatacacaatccagcaacacctttctctctctaacagcttcgagcttctacactcatggctgcttcatcctatgtagacggagaaagagatatggagaaaggaggaatgatattactacagtcaagtgagaatcaaaatcctatgatagatccttcaccaacaccttcaccatctgcaactgctactgccccagctttggttttgtctaattcaggcaagagaatggatcaagctggcaagaaaaagtatgttaagcaagtcacgggtcgccacaacgacaccgagcttcacttagcggcccaacgaggtgatttggctgctgtgcagcagattctcaaggatattaactctcagatggaagggattctgagtggggaagagtttgatgctgaagttgcggagattcgagcatcgattgtgaatgaggtgaatgagttaggggagacggcgctcttcactgctgcggataaaggacatcttgatgttgtcaaagagctgttgaagtattcgagtagagagagtattgctaagaagaatcgttctggatatgatccacttcatattgctgccatacagggtcatcatgctattgttgaggtcttgctagatcatgatgcgacgcttagccagacatttggcccatcgaatgcaactccgcttgtgtctgcagctatgagaggccatacagaagttgtgaaccagctcttatccaaagctgggaatttgctagaaatttctcggtctaacaataaaaatgccttgcatctagctgcaaggcaaggacatgtggaggtcataaaagctcttctctccaaggatcctcagctagcgagacggattgacaagaaaggacaaactgcacttcacatggctgttaaaggccagagttctgaagtagtgaaattgcttcttgatgcagatcctgctattgttatgcaaccggacaagtcttgtaacacagcgttacatgttgccaccaggaaaaaacgagcagagattgtagaactattgttgtcactgcctgataccaacgccaatactttaacccgcgatcacaagacagcgcttgacatagcagaaggacttcccctctcagaagaatcttcatacataaaagagtgtcttgctcgtagcggggctcttagggcgaatgagctgaaccagccaagggacgagctgagaagcactgtcacccaaatcaagaacgatgtacacatccagctggaacagacgaaaaggacgaacaaaaacgtgcacaacatttcaaaagaactcaggaaactccacagagaagggatcaacaatgcaaccaattctgtaactgttgtggctgtattgtttgcaactgtagcttttgctgctatattcacagtgccgggaggagacaacaatgacgggtctgcagtggtggtgggccgagcatcattcaagatcttcttcatcttcaacgcactcgcgttgtttacgtctctggcggttgtggttgtccagatcacattggtgagaggagagacaaaagctgagaagagggtagtggaagtgatcaacaaactcatgtggttggcatcgatgtgtacatctgtggcatttttggcatcttcatacatagtggttgggcgtaagaacgagtgggcggctgagctggtgaccgtggttgggggtgtgataatggctggtgttcttggaaccatgacttattacgtggtaaaatcgaagaggacaaggtcgatgaggaagaaggtgaagagtgctcgcaggagtggttccaactcgtggcatcattcagatttctctaactcggaagttgatcctattttcgcaatctaagatgcgtaaaagaatcgtgtatatatattgttgtatttggtgaagagagctagactatttagtgtataaagccccctgaccatcaaaaggcaaacactattgtcaaccattaaaggtttacactgctcaactcatctgtaaaacagttaacaattgtcttcttcggaaagcaaagaaaagcaaaggttcctttgttagg

SEQ ID NO: 78186 - protein, 590 aa, Arabidopsis thaliana
  peptide (1)..(590): Ceres Seq. ID no. 12639707
  misc_feature (299)..(334): Pfam Name: Ankyrin repeat Pfam Description: Ankyrin repeat
  misc_feature (1)..(590): Homolog of NCBI NO: 15230470 NR Description: ankyrin-like protein; protein id: At3g12360.1
  misc_feature (57)..(590): Homolog of NCBI NO: 21553618 NR Description: ankyrin-like protein [Arabidopsis thaliana]
  misc_feature (40)..(590): Homolog of NCBI NO: 34908074 NR Description: P0506B12.26 [Oryza sativa (japonica
  misc_feature (159)..(590): Homolog of NCBI NO: 15232714 NR Description: putative ankyrin; protein id: At3g09550.1 thaliana] >gi|6682234|gb|AAF23286.1|AC016661_11 putative ankyrin
  misc_feature (1)..(320): Homolog of NCBI NO: 15795155 NR Description: ankyrin-like protein [Arabidopsis thaliana]
  misc_feature (118)..(590): Homolog of NCBI NO: 15795155 NR Description: ankyrin-like protein [Arabidopsis thaliana]
  misc_feature (314)..(590): Homolog of NCBI NO: 24796795 NR Description: hypothetical protein, 5'-partial [Oryza sativa
  misc_feature (121)..(583): Homolog of NCBI NO: 15225141 NR Description: ankyrin-like protein; protein id: At2g31820.1
  misc_feature (55)..(113): Homolog of NCBI NO: 15225141 NR Description: ankyrin-like protein; protein id: At2g31820.1
  misc_feature (62)..(583): Homolog of NCBI NO: 24796797 NR Description: putative ankyrin repeat containing protein [Oryza
MAASSYVDGERDMEKGGMILLQSSENQNPMIDPSPTPSPSATATAPALVLSNSGKRMDQAGKKKYVKQVTGRHNDTELHLAAQRGDLAAVQQILKDINSQMEGILSGEEFDAEVAEIRASIVNEVNELGETALFTAADKGHLDVVKELLKYSSRESIAKKNRSGYDPLHIAAIQGHHAIVEVLLDHDATLSQTFGPSNATPLVSAAMRGHTEVVNQLLSKAGNLLEISRSNNKNALHLAARQGHVEVIKALLSKDPQLARRIDKKGQTALHMAVKGQSSEVVKLLLDADPAIVMQPDKSCNTALHVATRKKRAEIVELLLSLPDTNANTLTRDHKTALDIAEGLPLSEESSYIKECLARSGALRANELNQPRDELRSTVTQIKNDVHIQLEQTKRTNKNVHNISKELRKLHREGINNATNSVTVVAVLFATVAFAAIFTVPGGDNNDGSAVVVGRASFKIFFIFNALALFTSLAVVVVQITLVRGETKAEKRVVEVINKLMWLASMCTSVAFLASSYIVVGRKNEWAAELVTVVGGVIMAGVLGTMTYYVVKSKRTRSMRKKVKSARRSGSNSWHHSDFSNSEVDPIFAI

SEQ ID NO: 78187 - protein, 578 aa, Arabidopsis thaliana
  peptide (1)..(578): Ceres Seq. ID no. 12639708
  misc_feature (287)..(322): Pfam Name: Ankyrin repeat Pfam Description: Ankyrin repeat
  misc_feature (1)..(578): Homolog of NCBI NO: 15230470 NR Description: ankyrin-like protein; protein id: At3g12360.1
  misc_feature (45)..(578): Homolog of NCBI NO: 21553618 NR Description: ankyrin-like protein [Arabidopsis thaliana]
  misc_feature (28)..(578): Homolog of NCBI NO: 34908074 NR Description: P0506B12.26 [Oryza sativa (japonica
  misc_feature (147)..(578): Homolog of NCBI NO: 15232714 NR Description: putative ankyrin; protein id: At3g09550.1 thaliana] >gi|6682234|gb|AAF23286.1|AC016661_11 putative ankyrin
  misc_feature (1)..(308): Homolog of NCBI NO: 15795155 NR Description: ankyrin-like protein [Arabidopsis thaliana]
  misc_feature (106)..(578): Homolog of NCBI NO: 15795155 NR Description: ankyrin-like protein [Arabidopsis thaliana]
  misc_feature (302)..(578): Homolog of NCBI NO: 24796795 NR Description: hypothetical protein, 5'-partial [Oryza sativa
  misc_feature (109)..(571): Homolog of NCBI NO: 15225141 NR Description: ankyrin-like protein; protein id: At2g31820.1
  misc_feature (43)..(101): Homolog of NCBI NO: 15225141 NR Description: ankyrin-like protein; protein id: At2g31820.1
  misc_feature (50)..(571): Homolog of NCBI NO: 24796797 NR Description: putative ankyrin repeat containing protein [Oryza
MEKGGMILLQSSENQNPMIDPSPTPSPSATATAPALVLSNSGKRMDQAGKKKYVKQVTGRHNDTELHLAAQRGDLAAVQQILKDINSQMEGILSGEEFDAEVAEIRASIVNEVNELGETALFTAADKGHLDVVKELLKYSSRESIAKKNRSGYDPLHIAAIQGHHAIVEVLLDHDATLSQTFGPSNATPLVSAAMRGHTEVVNQLLSKAGNLLEISRSNNKNALHLAARQGHVEVIKALLSKDPQLARRIDKKGQTALHMAVKGQSSEVVKLLLDADPAIVMQPDKSCNTALHVATRKKRAEIVELLLSLPDTNANTLTRDHKTALDIAEGLPLSEESSYIKECLARSGALRANELNQPRDELRSTVTQIKNDVHIQLEQTKRTNKNVHNISKELRKLHREGINNATNSVTVVAVLFATVAFAAIFTVPGGDNNDGSAVVVGRASFKIFFIFNALALFTSLAVVVVQITLVRGETKAEKRVVEVINKLMWLASMCTSVAFLASSYIVVGRKNEWAAELVTVVGGVIMAGVLGTMTYYVVKSKRTRSMRKKVKSARRSGSNSWHHSDFSNSEVDPIFAI

SEQ ID NO: 78188 - protein, 573 aa, Arabidopsis thaliana
  peptide (1)..(573): Ceres Seq. ID no. 12639709
  misc_feature (282)..(317): Pfam Name: Ankyrin repeat Pfam Description: Ankyrin repeat
  misc_feature (1)..(573): Homolog of NCBI NO: 15230470 NR Description: ankyrin-like protein; protein id: At3g12360.1
  misc_feature (40)..(573): Homolog of NCBI NO: 21553618 NR Description: ankyrin-like protein [Arabidopsis thaliana]
  misc_feature (23)..(573): Homolog of NCBI NO: 34908074 NR Description: P0506B12.26 [Oryza sativa (japonica
  misc_feature (142)..(573): Homolog of NCBI NO: 15232714 NR Description: putative ankyrin; protein id: At3g09550.1 thaliana] >gi|6682234|gb|AAF23286.1|AC016661_11 putative ankyrin
  misc_feature (1)..(303): Homolog of NCBI NO: 15795155 NR Description: ankyrin-like protein [Arabidopsis thaliana]
  misc_feature (101)..(573): Homolog of NCBI NO: 15795155 NR Description: ankyrin-like protein [Arabidopsis thaliana]
  misc_feature (297)..(573): Homolog of NCBI NO: 24796795 NR Description: hypothetical protein, 5'-partial [Oryza sativa
  misc_feature (104)..(566): Homolog of NCBI NO: 15225141 NR Description: ankyrin-like protein; protein id: At2g31820.1
  misc_feature (38)..(96): Homolog of NCBI NO: 15225141 NR Description: ankyrin-like protein; protein id: At2g31820.1
  misc_feature (45)..(566): Homolog of NCBI NO: 24796797 NR Description: putative ankyrin repeat containing protein [Oryza
MILLQSSENQNPMIDPSPTPSPSATATAPALVLSNSGKRMDQAGKKKYVKQVTGRHNDTELHLAAQRGDLAAVQQILKDINSQMEGILSGEEFDAEVAEIRASIVNEVNELGETALFTAADKGHLDVVKELLKYSSRESIAKKNRSGYDPLHIAAIQGHHAIVEVLLDHDATLSQTFGPSNATPLVSAAMRGHTEVVNQLLSKAGNLLEISRSNNKNALHLAARQGHVEVIKALLSKDPQLARRIDKKGQTALHMAVKGQSSEVVKLLLDADPAIVMQPDKSCNTALHVATRKKRAEIVELLLSLPDTNANTLTRDHKTALDIAEGLPLSEESSYIKECLARSGALRANELNQPRDELRSTVTQIKNDVHIQLEQTKRTNKNVHNISKELRKLHREGINNATNSVTVVAVLFATVAFAAIFTVPGGDNNDGSAVVVGRASFKIFFIFNALALFTSLAVVVVQITLVRGETKAEKRVVEVINKLMWLASMCTSVAFLASSYIVVGRKNEWAAELVTVVGGVIMAGVLGTMTYYVVKSKRTRSMRKKVKSARRSGSNSWHHSDFSNSEVDPIFAI

SEQ ID NO: 78189 - DNA, 1644 bp, Arabidopsis thaliana
  misc_feature (1)..(1644): Ceres Seq. ID no. 12639766
  misc_feature: MA Experiment ID: 108435 Result: Down-regulated in Transcription
  misc_feature: MA Experiment 108435 PARAMETER Experiment Name: At_stm_Mutants_cDNA_P Parameter: Plant Line Value: wt Landsburg vs stm
  misc_feature: MA Experiment 108435 PARAMETER Experiment Name: At_stm_Mutants_cDNA_P Parameter: Tissue Value: Shoot Apical Meristem Region
  misc_feature: MA Experiment ID: 108461 Result: Up-regulated in Transcription
  misc_feature: MA Experiment 108461 PARAMETER Experiment Name: At_Germinating_Seeds_cDNA_P Parameter: Age (day) Value: 1 vs. 0
  misc_feature: MA Experiment 108461 PARAMETER Experiment Name: At_Germinating_Seeds_cDNA_P Parameter: Tissue Value: Germinating Seeds
  misc_feature: MA Experiment ID: 108462 Result: Up-regulated in Transcription
  misc_feature: MA Experiment 108462 PARAMETER Experiment Name: At_Germinating_Seeds_cDNA_P Parameter: Age (day) Value: 2 vs. 0
  misc_feature: MA Experiment 108462 PARAMETER Experiment Name: At_Germinating_Seeds_cDNA_P Parameter: Tissue Value: Germinating Seeds
  misc_feature: MA Experiment ID: 108463 Result: Up-regulated in Transcription
  misc_feature: MA Experiment 108463 PARAMETER Experiment Name: At_Germinating_Seeds_cDNA_P Parameter: Age (day) Value: 3 vs. 0
  misc_feature: MA Experiment 108463 PARAMETER Experiment Name: At_Germinating_Seeds_cDNA_P Parameter: Tissue Value: Germinating Seeds
  misc_feature: MA Experiment ID: 108464 Result: Up-regulated in Transcription
  misc_feature: MA Experiment 108464 PARAMETER Experiment Name: At_Germinating_Seeds_cDNA_P Parameter: Age (day) Value: 4 vs. 0
  misc_feature: MA Experiment 108464 PARAMETER Experiment Name: At_Germinating_Seeds_cDNA_P Parameter: Tissue Value: Germinating Seeds
  misc_feature: MA Experiment ID: 108488 Result: Up-regulated in Transcription
  misc_feature: MA Experiment ID: 108595 Result: Down-regulated in Transcription
  misc_feature: MA Experiment 108595 PARAMETER Experiment Name: At_Ler-pi_Ovule_cDNA_P Parameter: Plant Line Value: null
  misc_feature: MA Experiment ID: 20000069 Result: Down-regulated in Transcription
  misc_feature: MA Experiment 20000069 PARAMETER Experiment Name: At_100uM_ABA_Mutants_cDNA_P Parameter: Plant Line Value: CS23
  misc_feature: MA Experiment 20000069 PARAMETER Experiment Name: At_100uM_ABA_Mutants_cDNA_P Parameter: Timepoint (hr) Value: 6
  misc_feature: MA Experiment 20000069 PARAMETER Experiment Name: At_100uM_ABA_Mutants_cDNA_P Parameter: Tissue Value: Aerial
  misc_feature: MA Experiment 20000069 PARAMETER Experiment Name: At_100uM_ABA_Mutants_cDNA_P Parameter: Treatment Value: 100uM ABA vs. No Treatment
  misc_feature: MA Experiment ID: 20000070 Result: Down-regulated in Transcription
  misc_feature: MA Experiment 20000070 PARAMETER Experiment Name: At_100uM_ABA_Mutants_cDNA_P Parameter: Plant Line Value: CS24
  misc_feature: MA Experiment 20000070 PARAMETER Experiment Name: At_100uM_ABA_Mutants_cDNA_P Parameter: Timepoint (hr) Value: 6
  misc_feature: MA Experiment 20000070 PARAMETER Experiment Name: At_100uM_ABA_Mutants_cDNA_P Parameter: Tissue Value: Aerial
  misc_feature: MA Experiment 20000070 PARAMETER Experiment Name: At_100uM_ABA_Mutants_cDNA_P Parameter: Treatment Value: 100uM ABA vs. No Treatment
  misc_feature: MA Experiment ID: 20000071 Result: Down-regulated in Transcription
  misc_feature: MA Experiment 20000071 PARAMETER Experiment Name: At_100uM_ABA_Mutants_cDNA_P Parameter: Plant Line Value: CS8104
  misc_feature: MA Experiment 20000071 PARAMETER Experiment Name: At_100uM_ABA_Mutants_cDNA_P Parameter: Timepoint (hr) Value: 6
  misc_feature: MA Experiment 20000071 PARAMETER Experiment Name: At_100uM_ABA_Mutants_cDNA_P Parameter: Tissue Value: Aerial
  misc_feature: MA Experiment 20000071 PARAMETER Experiment Name: At_100uM_ABA_Mutants_cDNA_P Parameter: Treatment Value: 100uM ABA vs. No Treatment
  misc_feature: MA Experiment ID: 20000087 Result: Down-regulated in Transcription
  misc_feature: MA Experiment 20000087 PARAMETER Experiment Name: At_100uM_ABA_Mutants_cDNA_P Parameter: Plant Line Value: WS
  misc_feature: MA Experiment 20000087 PARAMETER Experiment Name: At_100uM_ABA_Mutants_cDNA_P Parameter: Timepoint (hr) Value: 6
  misc_feature: MA Experiment 20000087 PARAMETER Experiment Name: At_100uM_ABA_Mutants_cDNA_P Parameter: Tissue Value: Aerial
  misc_feature: MA Experiment 20000087 PARAMETER Experiment Name: At_100uM_ABA_Mutants_cDNA_P Parameter: Treatment Value: 100uM ABA vs. No Treatment
  misc_feature: MA Experiment ID: 20000117 Result: Down-regulated in Transcription
  misc_feature: MA Experiment 20000117 PARAMETER Experiment Name: At_100uM_ABA_Mutants_cDNA_P Parameter: Plant Line Value: Columbia
  misc_feature: MA Experiment 20000117 PARAMETER Experiment Name: At_100uM_ABA_Mutants_cDNA_P Parameter: Timepoint (hr) Value: 6
  misc_feature: MA Experiment 20000117 PARAMETER Experiment Name: At_100uM_ABA_Mutants_cDNA_P Parameter: Tissue Value: Aerial
  misc_feature: MA Experiment 20000117 PARAMETER Experiment Name: At_100uM_ABA_Mutants_cDNA_P Parameter: Treatment Value: 100uM ABA vs. No Treatment
  misc_feature: MA Experiment ID: 20000179 Result: Up-regulated in Transcription
  misc_feature: MA Experiment 20000179 PARAMETER Experiment Name: At_Germinating_Seeds_P Parameter: Age (hr) Value: 6 vs. 0
  misc_feature: MA Experiment 20000179 PARAMETER Experiment Name: At_Germinating_Seeds_P Parameter: Tissue Value: Germinating Seeds
  misc_feature: MA Experiment ID: 20000180 Result: Up-regulated in Transcription
  misc_feature: MA Experiment 20000180 PARAMETER Experiment Name: At_Germinating_Seeds_P Parameter: Age (hr) Value: 24 vs. 0
  misc_feature: MA Experiment 20000180 PARAMETER Experiment Name: At_Germinating_Seeds_P Parameter: Tissue Value: Germinating Seeds
  misc_feature: MA Experiment ID: 20000184 Result: Up-regulated in Transcription
  misc_feature: MA Experiment 20000184 PARAMETER Experiment Name: At_Shoots__P Parameter: Age (day) Value: 7
  misc_feature: MA Experiment 20000184 PARAMETER Experiment Name: At_Shoots__P Parameter: Tissue Value: Shoots vs. Whole Plant
  misc_feature: MA Experiment ID: 20000185 Result: Down-regulated in Transcription
  misc_feature: MA Experiment 20000185 PARAMETER Experiment Name: At_Roots__P Parameter: Age (day) Value: 7 vs. 21
  misc_feature: MA Experiment 20000185 PARAMETER Experiment Name: At_Roots__P Parameter: Organism Value: A. thaliana
  misc_feature: MA Experiment 20000185 PARAMETER Experiment Name: At_Roots__P Parameter: Tissue Value: Roots vs. Whole Plant
  misc_feature: MA Experiment ID: 20000227 Result: Up-regulated in Transcription
  misc_feature: MA Experiment 20000227 PARAMETER Experiment Name: At_Root-Tips-vs-Tops_P Parameter: Tissue Value: Root Tips vs. Root Tops
  misc_feature: MA Experiment ID: 20000234 Result: Up-regulated in Transcription
  misc_feature: MA Experiment 20000234 PARAMETER Experiment Name: At_Siliques_P Parameter: Age (day) Value: 21
  misc_feature: MA Experiment 20000234 PARAMETER Experiment Name: At_Siliques_P Parameter: Organism Value: A. thaliana
  misc_feature: MA Experiment 20000234 PARAMETER Experiment Name: At_Siliques_P Parameter: Plant Line Value: WS
  misc_feature: MA Experiment 20000234 PARAMETER Experiment Name: At_Siliques_P Parameter: Tissue Value: Less Than 5mm Siliques vs. Whole Plant
  misc_feature: MA Experiment ID: 20000437 Result: Down-regulated in Transcription
  misc_feature: MA Experiment 20000437 PARAMETER Experiment Name: At_Drought_P Parameter: Age (day) Value: 8
  misc_feature: MA Experiment 20000437 PARAMETER Experiment Name: At_Drought_P Parameter: Organism Value: A. thaliana
  misc_feature: MA Experiment 20000437 PARAMETER Experiment Name: At_Drought_P Parameter: Plant Line Value: WS
  misc_feature: MA Experiment 20000437 PARAMETER Experiment Name: At_Drought_P Parameter: Timepoint (hr) Value: 24
  misc_feature: MA Experiment 20000437 PARAMETER Experiment Name: At_Drought_P Parameter: Tissue Value: Whole Plant
  misc_feature: MA Experiment 20000437 PARAMETER Experiment Name: At_Drought_P Parameter: Treatment Value: Drought vs. No Drought
  misc_feature: MA Experiment ID: 20000439 Result: Down-regulated in Transcription
  misc_feature: MA Experiment 20000439 PARAMETER Experiment Name: At_Roots__P Parameter: Age (day) Value: 14 vs. 21
  misc_feature: MA Experiment 20000439 PARAMETER Experiment Name: At_Roots__P Parameter: Organism Value: A. thaliana
  misc_feature: MA Experiment 20000439 PARAMETER Experiment Name: At_Roots__P Parameter: Tissue Value: Roots vs. Whole Plant
  misc_feature: MA Experiment ID: 20000451 Result: Up-regulated in Transcription
  misc_feature: MA Experiment 20000451 PARAMETER Experiment Name: At_CS6879_Shoots-Roots_P Parameter: Age (day) Value: 14
  misc_feature: MA Experiment 20000451 PARAMETER Experiment Name: At_CS6879_Shoots-Roots_P Parameter: Organism Value: A. thaliana
  misc_feature: MA Experiment 20000451 PARAMETER Experiment Name: At_CS6879_Shoots-Roots_P Parameter: Plant Line Value: CS6879 vs. WS
  misc_feature: MA Experiment 20000451 PARAMETER Experiment Name: At_CS6879_Shoots-Roots_P Parameter: Tissue Value: Roots
  misc_feature: MA Experiment ID: 20000452 Result: Up-regulated in Transcription
  misc_feature: MA Experiment 20000452 PARAMETER Experiment Name: At_CS6879_Shoots-Roots_P Parameter: Age (day) Value: 14
  misc_feature: MA Experiment 20000452 PARAMETER Experiment Name: At_CS6879_Shoots-Roots_P Parameter: Organism Value: A. thaliana
  misc_feature: MA Experiment 20000452 PARAMETER Experiment Name: At_CS6879_Shoots-Roots_P Parameter: Plant Line Value: CS6879 vs. WS
  misc_feature: MA Experiment 20000452 PARAMETER Experiment Name: At_CS6879_Shoots-Roots_P Parameter: Tissue Value: Shoots
  misc_feature: MA Experiment ID: 20000527 Result: Up-regulated in Transcription
  misc_feature: MA Experiment 20000527 PARAMETER Experiment Name: At_10percent_PEG_P Parameter: Age (day) Value: 20
  misc_feature: MA Experiment 20000527 PARAMETER Experiment Name: At_10percent_PEG_P Parameter: Organism Value: A. thaliana
  misc_feature: MA Experiment 20000527 PARAMETER Experiment Name: At_10percent_PEG_P Parameter: Plant Line Value: WS
  misc_feature: MA Experiment 20000527 PARAMETER Experiment Name: At_10percent_PEG_P Parameter: Timepoint (day) Value: 20
  misc_feature: MA Experiment 20000527 PARAMETER Experiment Name: At_10percent_PEG_P Parameter: Tissue Value: Whole Plant
  misc_feature: MA Experiment 20000527 PARAMETER Experiment Name: At_10percent_PEG_P Parameter: Treatment Value: 10percent PEG vs. No Treatment
  misc_feature: MA Experiment ID: 20001450 Result: Down-regulated in Transcription
  misc_feature: MA Experiment 20001450 PARAMETER Experiment Name: At_Far-red-induction_P Parameter: Age (day) Value: 7
  misc_feature: MA Experiment 20001450 PARAMETER Experiment Name: At_Far-red-induction_P Parameter: Light Value: Far-red vs. White
  misc_feature: MA Experiment 20001450 PARAMETER Experiment Name: At_Far-red-induction_P Parameter: Organism Value: A. thaliana
  misc_feature: MA Experiment 20001450 PARAMETER Experiment Name: At_Far-red-induction_P Parameter: Plant Line Value: Columbia
  misc_feature: MA Experiment 20001450 PARAMETER Experiment Name: At_Far-red-induction_P Parameter: Timepoint (hr) Value: 8
  misc_feature: MA Experiment 20001450 PARAMETER Experiment Name: At_Far-red-induction_P Parameter: Tissue Value: Whole Plant
  misc_feature: MA Experiment ID: 20001757 Result: Up-regulated in Transcription
  misc_feature: MA Experiment 20001757 PARAMETER Experiment Name: At_50mM_NH4NO3_L-to-H_P Parameter: Timepoint (hr) Value: 6
  misc_feature: MA Experiment 20001757 PARAMETER Experiment Name: At_50mM_NH4NO3_L-to-H_P Parameter: Tissue Value: Leaf
  misc_feature: MA Experiment 20001757 PARAMETER Experiment Name: At_50mM_NH4NO3_L-to-H_P Parameter: Treatment Value: 50mM NH4NO3 vs 100mM Mannitol
  misc_feature: MA Experiment ID: 20001905 Result: Down-regulated in Transcription
  misc_feature: MA Experiment 20001905 PARAMETER Experiment Name: At_Drought_Reproduction_P Parameter: Age (day) Value: 40
  misc_feature: MA Experiment 20001905 PARAMETER Experiment Name: At_Drought_Reproduction_P Parameter: Organism Value: A. thaliana
  misc_feature: MA Experiment 20001905 PARAMETER Experiment Name: At_Drought_Reproduction_P Parameter: Plant Line Value: WS
  misc_feature: MA Experiment 20001905 PARAMETER Experiment Name: At_Drought_Reproduction_P Parameter: Timepoint (day) Value: 10
  misc_feature: MA Experiment 20001905 PARAMETER Experiment Name: At_Drought_Reproduction_P Parameter: Tissue Value: Rosettes
  misc_feature: MA Experiment 20001905 PARAMETER Experiment Name: At_Drought_Reproduction_P Parameter: Treatment Value: Drought vs. No Drought
tttctcatctcctcatctttttatcttctttgattgatccacatggcttccgctgccgcaagttccgccttttcactccttaagtccaccggcgctgttgcttcctccgccggaactcgcgcacgtgcctcccttctgccaattccctctacctctgtttccgcgcgtcctctaggcttctccgccactctagattcccgtcgtttctctctccacgttgcttccaaagttgaatcggtgcgtgggaagggaagcagaggagtggtttctatggcgaagaagagcgtcggagatctgacctcagctgatttgaaggggaagaaggttttcgtgagagctgatctcaatgtacctctcgatgataatcagactatcactgacgataccagaatccgtgccgccattccaacgatcaagtatttgattgaaaatggtgctaaagttatcctctccactcatctgggaaggccaaagggagtcaccccaaagtttagtttggctcctcttgtccctaggctctccgagcttcttggtattgaggtcacgaaagctgatgattgtattggcccagaagtggaaagcttggtggcttctctacctgaaggtggagttttgcttcttgagaacgtcaggttttacaaggaggaagagaagaacgatcctgagtttgctaagaagcttgcttctctagctgacctttatgtcaatgatgctttcggaactgctcacagagctcatgcttctaccgaaggagtcactaagttcttgaagccttcagttgctggtttccttttgcaaaaggaactggactacctagttggtgctgtttcaaacccaaagagaccatttgcagccatagtgggtggttccaaagtctcatccaagattggagttattgaatcgcttctggagaagtgtgatattcttcttcttggtggtggaatgatcttcacattctacaaggcacagggtctttcagttggttcgtcccttgttgaagaagacaagcttgaattggctacagaactccttgccaaagctaaggccaaaggagtctctcttttgttgccaacagatgttgtagttgctgacaagtttgctcctgatgccaacagcaagattgtgcctgcatcaggcattgaggacggatggatgggactggacattggtccagactctatcaaaactttcaacgaagctctggacacaacacaaacagtcatttggaatggacctatgggagttttcgagatggaaaagtttgcggctggaacagaggcgatagcgaataaactagcagagctaagtgaaaaaggagtgacaacgataataggaggaggagactcagtggctgcagtggagaaagtaggagtagcaggagtcatgagtcacatctccactggtggtggagccagcttggagctgttggaaggaaaagtacttcccggtgtgatcgcccttgatgaagcaatcccagtcactgtttagaaactcttaccatctataaggcaaacgctgtatacttaaaagagtttctttcgctttaaatctacctatgcaaaactttactatgtatcagagtctcattccccggaaaagaaaactcacatattaaaattctgaaaaaaaatatcaagagataag

SEQ ID NO: 78190 - protein, 481 aa, Arabidopsis thaliana; identical to SEQ ID NO: 35239
  peptide (1)..(481): Ceres Seq. ID no. 12639767
  misc_feature (78)..(477): Pfam Name: Phosphoglycerate kinase Pfam Description: Phosphoglycerate kinase
  misc_feature (1)..(481): Homolog of NCBI NO: 15230595 NR Description: phosphoglycerate kinase, putative; protein id: supported by cDNA: 21955., supported by cDNA: gi_13430643, by cDNA: gi_15010643, supported by cDNA: gi_16226507,
  misc_feature (1)..(481): Homolog of NCBI NO: 12644295 NR Description: PHOSPHOGLYCERATE KINASE, CHLOROPLAST PRECURSOR
  misc_feature (1)..(481): Homolog of NCBI NO: 15223484 NR Description: phosphoglycerate kinase, putative; protein id: supported by cDNA: gi_15810504, supported by cDNA: gi_20466263 thaliana] >gi|25288114|pir||D96603 probable
  misc_feature (83)..(481): Homolog of NCBI NO: 2129669 NR Description: phosphoglycerate kinase (EC 2.7.2.3) OBP44 - thaliana (fragment) >gi|1022805|gb|AAB60303.1| phosphoglycerate
  misc_feature (1)..(481): Homolog of NCBI NO: 3738261 NR Description: chloroplast phosphoglycerate kinase [Populus
  misc_feature (1)..(481): Homolog of NCBI NO: 2499497 NR Description: Phosphoglycerate kinase, chloroplast precursor
  misc_feature (1)..(481): Homolog of NCBI NO: 7434544 NR Description: phosphoglycerate kinase (EC 2.7.2.3) precursor,
  misc_feature (55)..(481): Homolog of NCBI NO: 1346698 NR Description: Phosphoglycerate kinase, chloroplast precursor
  misc_feature (1)..(477): Homolog of NCBI NO: 129915 NR Description: Phosphoglycerate kinase, chloroplast precursor
  misc_feature (55)..(465): Homolog of NCBI NO: 282833 NR Description: phosphoglycerate kinase (EC 2.7.2.3) - spinach

SEQ ID NO: 78191 - protein, 405 aa, Arabidopsis thaliana; identical to SEQ ID NO: 35240
  peptide (1)..(405): Ceres Seq. ID no. 12639768
  misc_feature (2)..(401): Pfam Name: Phosphoglycerate kinase Pfam Description: Phosphoglycerate kinase
  misc_feature (1)..(405): Homolog of NCBI NO: 15230595 NR Description: phosphoglycerate kinase, putative; protein id: supported by cDNA: 21955., supported by cDNA: gi_13430643, by cDNA: gi_15010643, supported by cDNA: gi_16226507,
  misc_feature (1)..(405): Homolog of NCBI NO: 12644295 NR Description: PHOSPHOGLYCERATE KINASE, CHLOROPLAST PRECURSOR
  misc_feature (1)..(405): Homolog of NCBI NO: 15223484 NR Description: phosphoglycerate kinase, putative; protein id: supported by cDNA: gi_15810504, supported by cDNA: gi_20466263 thaliana] >gi|25288114|pir||D96603 probable
  misc_feature (7)..(405): Homolog of NCBI NO: 2129669 NR Description: phosphoglycerate kinase (EC 2.7.2.3) OBP44 - thaliana (fragment) >gi|1022805|gb|AAB60303.1| phosphoglycerate
  misc_feature (1)..(405): Homolog of NCBI NO: 3738261 NR Description: chloroplast phosphoglycerate kinase [Populus
  misc_feature (1)..(405): Homolog of NCBI NO: 2499497 NR Description: Phosphoglycerate kinase, chloroplast precursor
  misc_feature (1)..(405): Homolog of NCBI NO: 7434544 NR Description: phosphoglycerate kinase (EC 2.7.2.3) precursor,
  misc_feature (1)..(405): Homolog of NCBI NO: 1346698 NR Description: Phosphoglycerate kinase, chloroplast precursor
  misc_feature (1)..(401): Homolog of NCBI NO: 129915 NR Description: Phosphoglycerate kinase, chloroplast precursor
  misc_feature (1)..(389): Homolog of NCBI NO: 282833 NR Description: phosphoglycerate kinase (EC 2.7.2.3) - spinach

SEQ ID NO: 78192 - DNA, 1091 bp, Arabidopsis thaliana
  misc_feature (1)..(1091): Ceres Seq. ID no. 12639769
  misc_feature: MA Experiment ID: 108434 Result: Down-regulated in Transcription
  misc_feature: MA Experiment 108434 PARAMETER Experiment Name: At_Root_Tips_cDNA_P Parameter: Tissue Value: Root Tips
  misc_feature: MA Experiment ID: 20000069 Result: Up-regulated in Transcription
  misc_feature: MA Experiment 20000069 PARAMETER Experiment Name: At_100uM_ABA_Mutants_cDNA_P Parameter: Plant Line Value: CS23
  misc_feature: MA Experiment 20000069 PARAMETER Experiment Name: At_100uM_ABA_Mutants_cDNA_P Parameter: Timepoint (hr) Value: 6
  misc_feature: MA Experiment 20000069 PARAMETER Experiment Name: At_100uM_ABA_Mutants_cDNA_P Parameter: Tissue Value: Aerial
  misc_feature: MA Experiment 20000069 PARAMETER Experiment Name: At_100uM_ABA_Mutants_cDNA_P Parameter: Treatment Value: 100uM ABA vs. No Treatment
  misc_feature: MA Experiment ID: 20000072 Result: Up-regulated in Transcription
  misc_feature: MA Experiment 20000072 PARAMETER Experiment Name: At_100uM_ABA_Mutants_cDNA_P Parameter: Plant Line Value: CS8105
  misc_feature: MA Experiment 20000072 PARAMETER Experiment Name: At_100uM_ABA_Mutants_cDNA_P Parameter: Timepoint (hr) Value: 6
  misc_feature: MA Experiment 20000072 PARAMETER Experiment Name: At_100uM_ABA_Mutants_cDNA_P Parameter: Tissue Value: Aerial
  misc_feature: MA Experiment 20000072 PARAMETER Experiment Name: At_100uM_ABA_Mutants_cDNA_P Parameter: Treatment Value: 100uM ABA vs. No Treatment
  misc_feature: MA Experiment ID: 20000088 Result: Up-regulated in Transcription
  misc_feature: MA Experiment 20000088 PARAMETER Experiment Name: At_100uM_ABA_Mutants_cDNA_P Parameter: Plant Line Value: Landsberg
  misc_feature: MA Experiment 20000088 PARAMETER Experiment Name: At_100uM_ABA_Mutants_cDNA_P Parameter: Timepoint (hr) Value: 6
  misc_feature: MA Experiment 20000088 PARAMETER Experiment Name: At_100uM_ABA_Mutants_cDNA_P Parameter: Tissue Value: Aerial
  misc_feature: MA Experiment 20000088 PARAMETER Experiment Name: At_100uM_ABA_Mutants_cDNA_P Parameter: Treatment Value: 100uM ABA vs. No Treatment
  misc_feature: MA Experiment ID: 20000451 Result: Up-regulated in Transcription
  misc_feature: MA Experiment 20000451 PARAMETER Experiment Name: At_CS6879_Shoots-Roots_P Parameter: Age (day) Value: 14
  misc_feature: MA Experiment 20000451 PARAMETER Experiment Name: At_CS6879_Shoots-Roots_P Parameter: Organism Value: A. thaliana
  misc_feature: MA Experiment 20000451 PARAMETER Experiment Name: At_CS6879_Shoots-Roots_P Parameter: Plant Line Value: CS6879 vs. WS
  misc_feature: MA Experiment 20000451 PARAMETER Experiment Name: At_CS6879_Shoots-Roots_P Parameter: Tissue Value: Roots
  misc_feature: MA Experiment ID: 20000794 Result: Up-regulated in Transcription
  misc_feature: MA Experiment 20000794 PARAMETER Experiment Name: At_Petals_P Parameter: Age (day) Value: 23-25 days
  misc_feature: MA Experiment 20000794 PARAMETER Experiment Name: At_Petals_P Parameter: Plant Line Value: WS
  misc_feature: MA Experiment 20000794 PARAMETER Experiment Name: At_Petals_P Parameter: Tissue Value: Petals vs. Whole plant
attttattttgtcttaaagcttttggcgagtttgcttgtgtgtgagtgtgtggttatggactctccgttcaaacctgatgtcgtcagaggtcaagtggctctcatcaccggtggtggatccggtatcggttttgagatctcttctcagtttggcaaacatggagcttctatcgctatcatgggacgacgaaaacaagtcctcgatgacgccgtctctgctcttcgatctcttggaatccaggctattggattggaaggtgatgttcgtaagcaagaagatgcgagaagagttgtggaagcaacttttcagcattttggtaaacttgatattcttgttaacgccgctgctggcaattttctggctgctgctgaggatttgtctcctaatggcttcagaacagtcttagacattgatgcggtaggaacattcaacatgtgtcacgcagctctcaagtatcttaagaaaggagcgcctggaagagactcatcaagcggtggaggttcgattattaacattagcgcgactttgcactacacggcttcttggtaccaaatacatgtctctgcagccaaggctgcagttgatgctaccacaagaaacttggcattggagtggggaactgactatgatattagagtgaacgggattgctccaggtcctattggaggtacacctggaatgagtaaacttgtacctgaggagattgaaaacaaaaccagagagtacatgcctctttataaagttggagagaagtgggatatcgctatggctgcactctacctcagctgtgattctgggaaatatgtgagcggactaacaatggtggtagatggaggactgtggcttagcaaacctcgccacttgcctaaagaagcggtgaagcaactctctcgtgcggtggagaagaggtctagggccaagcctgttggtctcccaaccagcaagctgtagatcatttgaatttcagatatcaaataagtgcacattgaaaaaatgttttggtttattgaattacattggagactgagaaaatggtattaagattatgtagatcaaactatcttatgcacaataaagtagctttctttgc

SEQ ID NO: 78193 - protein, 316 aa, Arabidopsis thaliana; identical to SEQ ID NO: 25763
  peptide (1)..(316): Ceres Seq. ID no. 12639770
  misc_feature (19)..(316): Homolog of NCBI NO: 30682333 NR Description: expressed protein [Arabidopsis thaliana]
  misc_feature (17)..(316): Homolog of NCBI NO: 38347363 NR Description: OSJNBa0070C17.24 [Oryza sativa (japonica
  misc_feature (145)..(291): Homolog of NCBI NO: 15226036 NR Description: unknown protein; protein id: At2g07640.1
  misc_feature (23)..(288): Homolog of NCBI NO: 39795780 NR Description: Unknown (protein for IMAGE:5307739) [Silurana
  misc_feature (23)..(285): Homolog of NCBI NO: 6753622 NR Description: 2-4-dienoyl-Coenzyme A reductase 2, peroxisomal
  misc_feature (179)..(307): Homolog of NCBI NO: 25518735 NR Description: hypothetical protein F28J9.2 - Arabidopsis >gi|6272372|gb|AAF06078.1|AC007918_2 Contains PF|00678 Short
  misc_feature (23)..(288): Homolog of NCBI NO: 25282441 NR Description: 2-4-dienoyl-Coenzyme A reductase 2, peroxisomal;
  misc_feature (23)..(285): Homolog of NCBI NO: 10190704 NR Description: peroxisomal 2,4-dienoyl-CoA reductase [Homo >gi|8218052|emb|CAB92744.1| c359F1.1 (novel protein (ortholog of
  misc_feature (23)..(279): Homolog of NCBI NO: 15805153 NR Description: oxidoreductase, short-chain
  misc_feature (30)..(298): Homolog of NCBI NO: 23026255 NR Description: hypothetical protein [Microbulbifer degradans

SEQ ID NO: 78194 - protein, 298 aa, Arabidopsis thaliana; identical to SEQ ID NO: 25764
  peptide (1)..(298): Ceres Seq. ID no. 12639771
  misc_feature (1)..(298): Homolog of NCBI NO: 30682333 NR Description: expressed protein [Arabidopsis thaliana]
  misc_feature (1)..(298): Homolog of NCBI NO: 38347363 NR Description: OSJNBa0070C17.24 [Oryza sativa (japonica
  misc_feature (127)..(273): Homolog of NCBI NO: 15226036 NR Description: unknown protein; protein id: At2g07640.1
  misc_feature (5)..(270): Homolog of NCBI NO: 39795780 NR Description: Unknown (protein for IMAGE:5307739) [Silurana
  misc_feature (5)..(267): Homolog of NCBI NO: 6753622 NR Description: 2-4-dienoyl-Coenzyme A reductase 2, peroxisomal
  misc_feature (161)..(289): Homolog of NCBI NO: 25518735 NR Description: hypothetical protein F28J9.2 - Arabidopsis >gi|6272372|gb|AAF06078.1|AC007918_2 Contains PF|00678 Short
  misc_feature (5)..(270): Homolog of NCBI NO: 25282441 NR Description: 2-4-dienoyl-Coenzyme A reductase 2, peroxisomal;
  misc_feature (5)..(267): Homolog of NCBI NO: 10190704 NR Description: peroxisomal 2,4-dienoyl-CoA reductase [Homo >gi|8218052|emb|CAB92744.1| c359F1.1 (novel protein (ortholog of
  misc_feature (5)..(261): Homolog of NCBI NO: 15805153 NR Description: oxidoreductase, short-chain
  misc_feature (12)..(280): Homolog of NCBI NO: 23026255 NR Description: hypothetical protein [Microbulbifer degradans

SEQ ID NO: 78195 - protein, 257 aa, Arabidopsis thaliana; identical to SEQ ID NO: 25765
  peptide (1)..(257): Ceres Seq. ID no. 12639772
  misc_feature (1)..(257): Homolog of NCBI NO: 30682333 NR Description: expressed protein [Arabidopsis thaliana]
  misc_feature (1)..(257): Homolog of NCBI NO: 38347363 NR Description: OSJNBa0070C17.24 [Oryza sativa (japonica
  misc_feature (86)..(232): Homolog of NCBI NO: 15226036 NR Description: unknown protein; protein id: At2g07640.1
  misc_feature (1)..(229): Homolog of NCBI NO: 39795780 NR Description: Unknown (protein for IMAGE:5307739) [Silurana
  misc_feature (1)..(226): Homolog of NCBI NO: 6753622 NR Description: 2-4-dienoyl-Coenzyme A reductase 2, peroxisomal
  misc_feature (120)..(248): Homolog of NCBI NO: 25518735 NR Description: hypothetical protein F28J9.2 - Arabidopsis >gi|6272372|gb|AAF06078.1|AC007918_2 Contains PF|00678 Short
  misc_feature (1)..(229): Homolog of NCBI NO: 25282441 NR Description: 2-4-dienoyl-Coenzyme A reductase 2, peroxisomal;
  misc_feature (1)..(226): Homolog of NCBI NO: 10190704 NR Description: peroxisomal 2,4-dienoyl-CoA reductase [Homo >gi|8218052|emb|CAB92744.1| c359F1.1 (novel protein (ortholog of
  misc_feature (1)..(220): Homolog of NCBI NO: 15805153 NR Description: oxidoreductase, short-chain
  misc_feature (1)..(239): Homolog of NCBI NO: 23026255 NR Description: hypothetical protein [Microbulbifer degradans

SEQ ID NO: 78196 - DNA, 720 bp, Arabidopsis thaliana
  misc_feature (1)..(720): Ceres Seq. ID no. 12639773
  misc_feature: MA Experiment ID: 20000227 Result: Down-regulated in Transcription
  misc_feature: MA Experiment 20000227 PARAMETER Experiment Name: At_Root-Tips-vs-Tops_P Parameter: Tissue Value: Root Tips vs. Root Tops
  misc_feature: MA Experiment ID: 20000436 Result: Down-regulated in Transcription
  misc_feature: MA Experiment 20000436 PARAMETER Experiment Name: At_Drought_P Parameter: Age (day) Value: 7
  misc_feature: MA Experiment 20000436 PARAMETER Experiment Name: At_Drought_P Parameter: Organism Value: A. thaliana
  misc_feature: MA Experiment 20000436 PARAMETER Experiment Name: At_Drought_P Parameter: Plant Line Value: WS
  misc_feature: MA Experiment 20000436 PARAMETER Experiment Name: At_Drought_P Parameter: Timepoint (hr) Value: 12
  misc_feature: MA Experiment 20000436 PARAMETER Experiment Name: At_Drought_P Parameter: Tissue Value: Whole Plant
  misc_feature: MA Experiment 20000436 PARAMETER Experiment Name: At_Drought_P Parameter: Treatment Value: Drought vs. No Drought
  misc_feature: MA Experiment ID: 20000437 Result: Down-regulated in Transcription
  misc_feature: MA Experiment 20000437 PARAMETER Experiment Name: At_Drought_P Parameter: Age (day) Value: 8
  misc_feature: MA Experiment 20000437 PARAMETER Experiment Name: At_Drought_P Parameter: Organism Value: A. thaliana
  misc_feature: MA Experiment 20000437 PARAMETER Experiment Name: At_Drought_P Parameter: Plant Line Value: WS
  misc_feature: MA Experiment 20000437 PARAMETER Experiment Name: At_Drought_P Parameter: Timepoint (hr) Value: 24
  misc_feature: MA Experiment 20000437 PARAMETER Experiment Name: At_Drought_P Parameter: Tissue Value: Whole Plant
  misc_feature: MA Experiment 20000437 PARAMETER Experiment Name: At_Drought_P Parameter: Treatment Value: Drought vs. No Drought
  misc_feature: MA Experiment ID: 20000439 Result: Up-regulated in Transcription
  misc_feature: MA Experiment 20000439 PARAMETER Experiment Name: At_Roots__P Parameter: Age (day) Value: 14 vs. 21
  misc_feature: MA Experiment 20000439 PARAMETER Experiment Name: At_Roots__P Parameter: Organism Value: A. thaliana
  misc_feature: MA Experiment 20000439 PARAMETER Experiment Name: At_Roots__P Parameter: Tissue Value: Roots vs. Whole Plant
  misc_feature: MA Experiment ID: 20000441 Result: Down-regulated in Transcription
  misc_feature: MA Experiment 20000441 PARAMETER Experiment Name: At_1uM_BR-BRZ__P Parameter: Tissue Value: Shoot Apices
  misc_feature: MA Experiment 20000441 PARAMETER Experiment Name: At_1uM_BR-BRZ__P Parameter: Treatment Value: 1uM BR vs. No Treatment
  misc_feature: MA Experiment ID: 20000443 Result: Down-regulated in Transcription
  misc_feature: MA Experiment 20000443 PARAMETER Experiment Name: At_1uM_BR-BRZ__P Parameter: Tissue Value: Shoot Apices
  misc_feature: MA Experiment 20000443 PARAMETER Experiment Name: At_1uM_BR-BRZ__P Parameter: Treatment Value: 1uM BRZ vs. No Treatment
  misc_feature: MA Experiment ID: 20000460 Result: Down-regulated in Transcription
  misc_feature: MA Experiment 20000460 PARAMETER Experiment Name: At_10percent_PEG_P Parameter: Age (day) Value: 12
  misc_feature: MA Experiment 20000460 PARAMETER Experiment Name: At_10percent_PEG_P Parameter: Organism Value: A. thaliana
  misc_feature: MA Experiment 20000460 PARAMETER Experiment Name: At_10percent_PEG_P Parameter: Plant Line Value: WS
  misc_feature: MA Experiment 20000460 PARAMETER Experiment Name: At_10percent_PEG_P Parameter: Timepoint (day) Value: 12
  misc_feature: MA Experiment 20000460 PARAMETER Experiment Name: At_10percent_PEG_P Parameter: Tissue Value: Whole Plant
  misc_feature: MA Experiment 20000460 PARAMETER Experiment Name: At_10percent_PEG_P Parameter: Treatment Value: 10percent PEG vs. No Treatment
  misc_feature: MA Experiment ID: 20000573 Result: Down-regulated in Transcription
  misc_feature: MA Experiment 20000573 PARAMETER Experiment Name: At_100uM_ABA_Mutants__P Parameter: Organism Value: A. thaliana
  misc_feature: MA Experiment 20000573 PARAMETER Experiment Name: At_100uM_ABA_Mutants__P Parameter: Plant Line Value: CS22 vs. Ler wt
  misc_feature: MA Experiment 20000573 PARAMETER Experiment Name: At_100uM_ABA_Mutants__P Parameter: Timepoint (hr) Value: N/A
  misc_feature: MA Experiment 20000573 PARAMETER Experiment Name: At_100uM_ABA_Mutants__P Parameter: Tissue Value: Whole Plant
  misc_feature: MA Experiment 20000573 PARAMETER Experiment Name: At_100uM_ABA_Mutants__P Parameter: Treatment Value: None
  misc_feature: MA Experiment ID: 20001248 Result: Up-regulated in Transcription
  misc_feature: MA Experiment 20001248 PARAMETER Experiment Name: At_Far-red-induction_P Parameter: Age (day) Value: 7
  misc_feature: MA Experiment 20001248 PARAMETER Experiment Name: At_Far-red-induction_P Parameter: Light Value: Far-red vs. White
  misc_feature: MA Experiment 20001248 PARAMETER Experiment Name: At_Far-red-induction_P Parameter: Organism Value: A. thaliana
  misc_feature: MA Experiment 20001248 PARAMETER Experiment Name: At_Far-red-induction_P Parameter: Plant Line Value: Columbia
  misc_feature: MA Experiment 20001248 PARAMETER Experiment Name: At_Far-red-induction_P Parameter: Timepoint (hr) Value: 4
  misc_feature: MA Experiment 20001248 PARAMETER Experiment Name: At_Far-red-induction_P Parameter: Tissue Value: Whole Plant
  misc_feature: MA Experiment ID: 20001450 Result: Up-regulated in Transcription
  misc_feature: MA Experiment 20001450 PARAMETER Experiment Name: At_Far-red-induction_P Parameter: Age (day) Value: 7
  misc_feature: MA Experiment 20001450 PARAMETER Experiment Name: At_Far-red-induction_P Parameter: Light Value: Far-red vs. White
  misc_feature: MA Experiment 20001450 PARAMETER Experiment Name: At_Far-red-induction_P Parameter: Organism Value: A. thaliana
  misc_feature: MA Experiment 20001450 PARAMETER Experiment Name: At_Far-red-induction_P Parameter: Plant Line Value: Columbia
  misc_feature: MA Experiment 20001450 PARAMETER Experiment Name: At_Far-red-induction_P Parameter: Timepoint (hr) Value: 8
  misc_feature: MA Experiment 20001450 PARAMETER Experiment Name: At_Far-red-induction_P Parameter: Tissue Value: Whole Plant
atggggaatagaagagcaccatgctgtgacaaaagccaagtgaagagagggccatggagtgatgaagaaagtgaaagactcagatcttttatcctcaaaaatggtcatcaaaattggcgatctcttcccaaactcgctggattgatgagatgcggaaagagttgtcgtctaagatggataaactatctgagaccaggtctcaaacgaggcaacttcaccaaggaggaggaagataccattatccaccttcaccaagcttatggaaacaagtggtctaagatcgcatccaacttcccgggaaggacagacaacgagatcaagaatgtatggaacactcatctcaagaagcggttggtgaagaggagcatttcatcatcatcatccgatgttaccaatcattcagtgtcttctacctcttcttcctcttcctcaatctcgtcagtcttgcaggacgttattattaagagtgagaggcctaaccaggaagaggagtttggggaaatcttggtggagcaaatggcatgtggatttgaggtggatgcaccacaatcactagaatgtctctttgacgatagccaggttcctcctcctatatctaaaccagactcactacaaacccatgggaagtcatcagatcacgaattttggagccgactgattgaaccagggttcgatgattacaatgagtggctcattttcttggataaccaaacttgctag

SEQ ID NO: 78197 - protein, 239 aa, Arabidopsis thaliana
  peptide (1)..(239): Ceres Seq. ID no. 12639774
  misc_feature (16)..(63): Pfam Name: Myb-like DNA-binding domain Pfam Description: Myb-like DNA-binding domain
  misc_feature (1)..(239): Homolog of NCBI NO: 15230600 NR Description: myb family transcription factor; protein id:
  misc_feature (71)..(239): Homolog of NCBI NO: 11358526 NR Description: myb-related transcription factor MYB10 [imported] Arabidopsis thaliana (fragment) >gi|3941416|gb|AAC83584.1|
  misc_feature (1)..(205): Homolog of NCBI NO: 15219259 NR Description: myb family transcription factor; protein id: supported by cDNA: 152630. [Arabidopsis thaliana]
  misc_feature (1)..(205): Homolog of NCBI NO: 21553594 NR Description: putative myb-related transcription factor
  misc_feature (1)..(152): Homolog of NCBI NO: 15223463 NR Description: myb family transcription factor; protein id:
  misc_feature (1)..(219): Homolog of NCBI NO: 15219313 NR Description: myb family transcription factor; protein id:
  misc_feature (44)..(219): Homolog of NCBI NO: 7438354 NR Description: myb-related protein YUP8H12R.21 - Arabidopsis
  misc_feature (1)..(48): Homolog of NCBI NO: 7438354 NR Description: myb-related protein YUP8H12R.21 - Arabidopsis
  misc_feature (5)..(217): Homolog of NCBI NO: 6552359 NR Description: myb-related transcription factor LBM1 [Nicotiana
  misc_feature (5)..(228): Homolog of NCBI NO: 6552389 NR Description: myb-related transcription factor LBM4 [Nicotiana
MGNRRAPCCDKSQVKRGPWSDEESERLRSFILKNGHQNWRSLPKLAGLMRCGKSCRLRWINYLRPGLKRGNFTKEEEDTIIHLHQAYGNKWSKIASNFPGRTDNEIKNVWNTHLKKRLVKRSISSSSSDVTNHSVSSTSSSSSSISSVLQDVIIKSERPNQEEEFGEILVEQMACGFEVDAPQSLECLFDDSQVPPPISKPDSLQTHGKSSDHEFWSRLIEPGFDDYNEWLIFLDNQTC

SEQ ID NO: 78198 - protein, 191 aa, Arabidopsis thaliana
  peptide (1)..(191): Ceres Seq. ID no. 12639775
  misc_feature (1)..(191): Homolog of NCBI NO: 15230600 NR Description: myb family transcription factor; protein id:
  misc_feature (23)..(191): Homolog of NCBI NO: 11358526 NR Description: myb-related transcription factor MYB10 [imported] Arabidopsis thaliana (fragment) >gi|3941416|gb|AAC83584.1|
  misc_feature (1)..(157): Homolog of NCBI NO: 15219259 NR Description: myb family transcription factor; protein id: supported by cDNA: 152630. [Arabidopsis thaliana]
  misc_feature (1)..(157): Homolog of NCBI NO: 21553594 NR Description: putative myb-related transcription factor
  misc_feature (1)..(104): Homolog of NCBI NO: 15223463 NR Description: myb family transcription factor; protein id:
  misc_feature (1)..(171): Homolog of NCBI NO: 15219313 NR Description: myb family transcription factor; protein id:
  misc_feature (1)..(171): Homolog of NCBI NO: 7438354 NR Description: myb-related protein YUP8H12R.21 - Arabidopsis
  misc_feature (1)..(169): Homolog of NCBI NO: 6552359 NR Description: myb-related transcription factor LBM1 [Nicotiana
  misc_feature (1)..(180): Homolog of NCBI NO: 6552389 NR Description: myb-related transcription factor LBM4 [Nicotiana
  misc_feature (1)..(180): Homolog of NCBI NO: 2832404 NR Description: R2R3-MYB transcription factor [Arabidopsis
MRCGKSCRLRWINYLRPGLKRGNFTKEEEDTIIHLHQAYGNKWSKIASNFPGRTDNEIKNVWNTHLKKRLVKRSISSSSSDVTNHSVSSTSSSSSSISSVLQDVIIKSERPNQEEEFGEILVEQMACGFEVDAPQSLECLFDDSQVPPPISKPDSLQTHGKSSDHEFWSRLIEPGFDDYNEWLIFLDNQTC

SEQ ID NO: 78199 - DNA, 1824 bp, Arabidopsis thaliana
  misc_feature (1)..(1824): Ceres Seq. ID no. 12639807
  misc_feature: MA Experiment ID: 20000264 Result: Up-regulated in Transcription
  misc_feature: MA Experiment 20000264 PARAMETER Experiment Name: At_Open_Flower_P Parameter: Age (day) Value: 21
  misc_feature: MA Experiment 20000264 PARAMETER Experiment Name: At_Open_Flower_P Parameter: Plant Line Value: WS
  misc_feature: MA Experiment 20000264 PARAMETER Experiment Name: At_Open_Flower_P Parameter: Tissue Value: Open Flower vs. Whole Plant
  misc_feature: MA Experiment ID: 20000286 Result: Up-regulated in Transcription
  misc_feature: MA Experiment 20000286 PARAMETER Experiment Name: At_Open_Flower_P Parameter: Age (day) Value: 21
  misc_feature: MA Experiment 20000286 PARAMETER Experiment Name: At_Open_Flower_P Parameter: Plant Line Value: WS
  misc_feature: MA Experiment 20000286 PARAMETER Experiment Name: At_Open_Flower_P Parameter: Tissue Value: Half Open vs. Whole Plant
  misc_feature: MA Experiment ID: 20000437 Result: Up-regulated in Transcription
  misc_feature: MA Experiment 20000437 PARAMETER Experiment Name: At_Drought_P Parameter: Age (day) Value: 8
  misc_feature: MA Experiment 20000437 PARAMETER Experiment Name: At_Drought_P Parameter: Organism Value: A. thaliana
  misc_feature: MA Experiment 20000437 PARAMETER Experiment Name: At_Drought_P Parameter: Plant Line Value: WS
  misc_feature: MA Experiment 20000437 PARAMETER Experiment Name: At_Drought_P Parameter: Timepoint (hr) Value: 24
  misc_feature: MA Experiment 20000437 PARAMETER Experiment Name: At_Drought_P Parameter: Tissue Value: Whole Plant
  misc_feature: MA Experiment 20000437 PARAMETER Experiment Name: At_Drought_P Parameter: Treatment Value: Drought vs. No Drought
  misc_feature: MA Experiment ID: 20000794 Result: Up-regulated in Transcription
  misc_feature: MA Experiment 20000794 PARAMETER Experiment Name: At_Petals_P Parameter: Age (day) Value: 23-25 days
  misc_feature: MA Experiment 20000794 PARAMETER Experiment Name: At_Petals_P Parameter: Plant Line Value: WS
  misc_feature: MA Experiment 20000794 PARAMETER Experiment Name: At_Petals_P Parameter: Tissue Value: Petals vs. Whole plant
  misc_feature: MA Experiment ID: 20001247 Result: Up-regulated in Transcription
  misc_feature: MA Experiment 20001247 PARAMETER Experiment Name: At_Far-red-induction_P Parameter: Age (day) Value: 7
  misc_feature: MA Experiment 20001247 PARAMETER Experiment Name: At_Far-red-induction_P Parameter: Light Value: Far-red vs. White
  misc_feature: MA Experiment 20001247 PARAMETER Experiment Name: At_Far-red-induction_P Parameter: Organism Value: A. thaliana
  misc_feature: MA Experiment 20001247 PARAMETER Experiment Name: At_Far-red-induction_P Parameter: Plant Line Value: Columbia
  misc_feature: MA Experiment 20001247 PARAMETER Experiment Name: At_Far-red-induction_P Parameter: Timepoint (hr) Value: 1
  misc_feature: MA Experiment 20001247 PARAMETER Experiment Name: At_Far-red-induction_P Parameter: Tissue Value: Whole Plant
  misc_feature: MA Experiment ID: 20001450 Result: Up-regulated in Transcription
  misc_feature: MA Experiment 20001450 PARAMETER Experiment Name: At_Far-red-induction_P Parameter: Age (day) Value: 7
  misc_feature: MA Experiment 20001450 PARAMETER Experiment Name: At_Far-red-induction_P Parameter: Light Value: Far-red vs. White
  misc_feature: MA Experiment 20001450 PARAMETER Experiment Name: At_Far-red-induction_P Parameter: Organism Value: A. thaliana
  misc_feature: MA Experiment 20001450 PARAMETER Experiment Name: At_Far-red-induction_P Parameter: Plant Line Value: Columbia
  misc_feature: MA Experiment 20001450 PARAMETER Experiment Name: At_Far-red-induction_P Parameter: Timepoint (hr) Value: 8
  misc_feature: MA Experiment 20001450 PARAMETER Experiment Name: At_Far-red-induction_P Parameter: Tissue Value: Whole Plant
  misc_feature: MA Experiment ID: 20001451 Result: Up-regulated in Transcription
  misc_feature: MA Experiment 20001451 PARAMETER Experiment Name: At_Far-red-induction_P Parameter: Age (day) Value: 7
  misc_feature: MA Experiment 20001451 PARAMETER Experiment Name: At_Far-red-induction_P Parameter: Light Value: Far-red vs. White
  misc_feature: MA Experiment 20001451 PARAMETER Experiment Name: At_Far-red-induction_P Parameter: Organism Value: A. thaliana
  misc_feature: MA Experiment 20001451 PARAMETER Experiment Name: At_Far-red-induction_P Parameter: Plant Line Value: Columbia
  misc_feature: MA Experiment 20001451 PARAMETER Experiment Name: At_Far-red-induction_P Parameter: Timepoint (hr) Value: 24
  misc_feature: MA Experiment 20001451 PARAMETER Experiment Name: At_Far-red-induction_P Parameter: Tissue Value: Whole Plant
  misc_feature: MA Experiment ID: 20001557 Result: Down-regulated in Transcription
  misc_feature: MA Experiment 20001557 PARAMETER Experiment Name: At_Drought_Soil_Dry_P Parameter: Age (day) Value: 27
  misc_feature: MA Experiment 20001557 PARAMETER Experiment Name: At_Drought_Soil_Dry_P Parameter: Organism Value: A. thaliana
  misc_feature: MA Experiment 20001557 PARAMETER Experiment Name: At_Drought_Soil_Dry_P Parameter: Plant Line Value: WS
  misc_feature: MA Experiment 20001557 PARAMETER Experiment Name: At_Drought_Soil_Dry_P Parameter: Post Timepoint (hr) Value: 3
  misc_feature: MA Experiment 20001557 PARAMETER Experiment Name: At_Drought_Soil_Dry_P Parameter: Post-Treatment Value: Re-Water vs. No Drought
  misc_feature: MA Experiment 20001557 PARAMETER Experiment Name: At_Drought_Soil_Dry_P Parameter: Timepoint (day) Value: 13
  misc_feature: MA Experiment 20001557 PARAMETER Experiment Name: At_Drought_Soil_Dry_P Parameter: Treatment Value: Drought vs. No Drought
  misc_feature: MA Experiment ID: 20001558 Result: Down-regulated in Transcription
  misc_feature: MA Experiment 20001558 PARAMETER Experiment Name: At_Drought_Soil_Dry_P Parameter: Age (day) Value: 27
  misc_feature: MA Experiment 20001558 PARAMETER Experiment Name: At_Drought_Soil_Dry_P Parameter: Organism Value: A. thaliana
  misc_feature: MA Experiment 20001558 PARAMETER Experiment Name: At_Drought_Soil_Dry_P Parameter: Plant Line Value: WS
  misc_feature: MA Experiment 20001558 PARAMETER Experiment Name: At_Drought_Soil_Dry_P Parameter: Post Timepoint (hr) Value: 6
  misc_feature: MA Experiment 20001558 PARAMETER Experiment Name: At_Drought_Soil_Dry_P Parameter: Post-Treatment Value: Re-Water vs. No Drought
  misc_feature: MA Experiment 20001558 PARAMETER Experiment Name: At_Drought_Soil_Dry_P Parameter: Timepoint (day) Value: 13
  misc_feature: MA Experiment 20001558 PARAMETER Experiment Name: At_Drought_Soil_Dry_P Parameter: Treatment Value: Drought vs. No Drought
  misc_feature: MA Experiment ID: 20001910 Result: Up-regulated in Transcription
  misc_feature: MA Experiment 20001910 PARAMETER Experiment Name: At_Drought_Reproduction_P Parameter: Age (day) Value: 37
  misc_feature: MA Experiment 20001910 PARAMETER Experiment Name: At_Drought_Reproduction_P Parameter: Organism Value: A. thaliana
  misc_feature: MA Experiment 20001910 PARAMETER Experiment Name: At_Drought_Reproduction_P Parameter: Plant Line Value: WS
  misc_feature: MA Experiment 20001910 PARAMETER Experiment Name: At_Drought_Reproduction_P Parameter: Timepoint (day) Value: 7
  misc_feature: MA Experiment 20001910 PARAMETER Experiment Name: At_Drought_Reproduction_P Parameter: Tissue Value: Flowers
  misc_feature: MA Experiment 20001910 PARAMETER Experiment Name: At_Drought_Reproduction_P Parameter: Treatment Value: Drought vs. No Drought
atgggaccaaatctgcagcggatcgtacttgtcttcattgcatgtttcggaatcttcacctccgttgttcttgcaaaaaccgatagccaagacggttaccagcttggaaacttgaaatcgctcacttaccttgatgtaagcaagaacaatcttaacggaaacttaccctaccagcttcctgacaagcttacttatctagatggctctgagaatgacttcaacggtaatgtgccatattcggtgtctctcatgaacgacctcagttaccttgatctttcttccaatcaactcacgggaaaactaccgcagagttttgccaatctaacaggtcttaaaacactgcatttgcaagaaaaccaattcaaaggctctataaatgctctcagggacctccctcagattgatgatgtaaacgtagcaaacaatcaatttactggttggatcccaaacgagttgaagaatattggaaaccttgaaactggaggaaacaagtggtcaagcggtagagctccttcaccacctccgggaacccgtcacatagacagaaactcatcaggaggcggtggaggaagcagcaaggctctgacactaggagttataatagcggtgtcttctataggtggactcattttatttgcagggttgattgcattgatttctcgaagaaagaactctaatgattcttctcactttttcgacgacgagaaaggaaccaaccgaagcaagccactcttcacaccacaatcctctcagatgcttcaattcgataatatggaagaattcaaaaaccagaagacagttgattctaatacttcacttgaaacaaagccttctgttaaaagaacttcttctgtcagtttcaagaactctcctacttttcatctcataccttctacccaagtggctgctacccctgaccgttcctccacctcccaagactctcctgatacacgcggtgtgaaagcgttttcactagcggatttgcagaataccgcgtcttgtttctcgccgaatcgccttcttggtgaaggaaccattggacgtgtttataaagctaaatttcaggatggaaggaaatttgcagtcaaagagattgattcttctctgttaggaaaaggcaatccggaagagttttcacacatagtgtcgagtatctcgagtattcaccacaagaatatggcagaactcgtgggttattgttcagaacaaggaagaaatatgcttgtttatgagtatttcacaagtggatcacttcacagatttcttcacctgtctgatgatttcagcaaaccattgacgtggaacaccagaatccgaatcgctctcggaactgctaaagctatagagtaccttcatgaaacatgttcgcctccgctagttcacaagaacatcaagtcatcaaacattttacttgataatgagctaaatccccgcctctcagactatggcttggcaaactttcaccaccgcacaagtcagaatcttggagttggatacaatgccccagaatgcacagatccctccgcttacacacaaaagagcgacgtgtacagctttggtgtggtgatgcttgagctgctaactggtcgaaagccttatgacagtgggaggccaaaagcagaacagtctttagttcgttgggcaaagccgcagcttaaagacatggatactctggatgaaatggtggatcccgcgttgtgcggactctacgctccagaatctgtatcatcattcgcggatatagtttccatctgcgtaatgacggagcctggacttaggcctccagtgtcaaatgtggtggaggcattgaagaggctagtgtag

SEQ ID NO: 78200 - protein, 607 aa, Arabidopsis thaliana
  peptide (1)..(607): Ceres Seq. ID no. 12639808
  misc_feature (33)..(607): Homolog of NCBI NO: 18399852 NR Description: leucine-rich repeat transmembrane protein kinase,
  misc_feature (32)..(607): Homolog of NCBI NO: 15219262 NR Description: leucine-rich repeat transmembrane protein kinase,
  misc_feature (13)..(402): Homolog of NCBI NO: 37533916 NR Description: putative leucine-rich repeat transmembrane
  misc_feature (361)..(607): Homolog of NCBI NO: 37533916 NR Description: putative leucine-rich repeat transmembrane
  misc_feature (33)..(607): Homolog of NCBI NO: 29367551 NR Description: putative leucine-rich repeat transmembrane
  misc_feature (33)..(607): Homolog of NCBI NO: 7489783 NR Description: leucine-rich repeat transmembrane protein kinase
  misc_feature (17)..(607): Homolog of NCBI NO: 15217283 NR Description: Putative leucine-rich repeat transmembrane
  misc_feature (33)..(607): Homolog of NCBI NO: 7489784 NR Description: leucine-rich repeat transmembrane protein kinase
  misc_feature (40)..(607): Homolog of NCBI NO: 15220928 NR Description: leucine-rich repeat transmembrane protein kinase
  misc_feature (33)..(607): Homolog of NCBI NO: 30683104 NR Description: leucine-rich repeat transmembrane protein kinase, [Arabidopsis thaliana] >gi|9279582|dbj|BAB01040.1|
MGPNLQRIVLVFIACFGIFTSVVLAKTDSQDGYQLGNLKSLTYLDVSKNNLNGNLPYQLPDKLTYLDGSENDFNGNVPYSVSLMNDLSYLDLSSNQLTGKLPQSFANLTGLKTLHLQENQFKGSINALRDLPQIDDVNVANNQFTGWIPNELKNIGNLETGGNKWSSGRAPSPPPGTRHIDRNSSGGGGGSSKALTLGVIIAVSSIGGLILFAGLIALISRRKNSNDSSHFFDDEKGTNRSKPLFTPQSSQMLQFDNMEEFKNQKTVDSNTSLETKPSVKRTSSVSFKNSPTFHLIPSTQVAATPDRSSTSQDSPDTRGVKAFSLADLQNTASCFSPNRLLGEGTIGRVYKAKFQDGRKFAVKEIDSSLLGKGNPEEFSHIVSSISSIHHKNMAELVGYCSEQGRNMLVYEYFTSGSLHRFLHLSDDFSKPLTWNTRIRIALGTAKAIEYLHETCSPPLVHKNIKSSNILLDNELNPRLSDYGLANFHHRTSQNLGVGYNAPECTDPSAYTQKSDVYSFGVVMLELLTGRKPYDSGRPKAEQSLVRWAKPQLKDMDTLDEMVDPALCGLYAPESVSSFADIVSICVMTEPGLRPPVSNVVEALKRLV

SEQ ID NO: 78201 - protein, 524 aa, Arabidopsis thaliana
  peptide (1)..(524): Ceres Seq. ID no. 12639809
  misc_feature (1)..(524): Homolog of NCBI NO: 18399852 NR Description: leucine-rich repeat transmembrane protein kinase,
  misc_feature (1)..(524): Homolog of NCBI NO: 15219262 NR Description: leucine-rich repeat transmembrane protein kinase,
  misc_feature (1)..(319): Homolog of NCBI NO: 37533916 NR Description: putative leucine-rich repeat transmembrane
  misc_feature (278)..(524): Homolog of NCBI NO: 37533916 NR Description: putative leucine-rich repeat transmembrane
  misc_feature (1)..(524): Homolog of NCBI NO: 29367551 NR Description: putative leucine-rich repeat transmembrane
  misc_feature (1)..(524): Homolog of NCBI NO: 7489783 NR Description: leucine-rich repeat transmembrane protein kinase
  misc_feature (1)..(524): Homolog of NCBI NO: 15217283 NR Description: Putative leucine-rich repeat transmembrane
  misc_feature (1)..(524): Homolog of NCBI NO: 7489784 NR Description: leucine-rich repeat transmembrane protein kinase
  misc_feature (1)..(524): Homolog of NCBI NO: 15220928 NR Description: leucine-rich repeat transmembrane protein kinase
  misc_feature (1)..(524): Homolog of NCBI NO: 30683104 NR Description: leucine-rich repeat transmembrane protein kinase, [Arabidopsis thaliana] >gi|9279582|dbj|BAB01040.1|
MNDLSYLDLSSNQLTGKLPQSFANLTGLKTLHLQENQFKGSINALRDLPQIDDVNVANNQFTGWIPNELKNIGNLETGGNKWSSGRAPSPPPGTRHIDRNSSGGGGGSSKALTLGVIIAVSSIGGLILFAGLIALISRRKNSNDSSHFFDDEKGTNRSKPLFTPQSSQMLQFDNMEEFKNQKTVDSNTSLETKPSVKRTSSVSFKNSPTFHLIPSTQVAATPDRSSTSQDSPDTRGVKAFSLADLQNTASCFSPNRLLGEGTIGRVYKAKFQDGRKFAVKEIDSSLLGKGNPEEFSHIVSSISSIHHKNMAELVGYCSEQGRNMLVYEYFTSGSLHRFLHLSDDFSKPLTWNTRIRIALGTAKAIEYLHETCSPPLVHKNIKSSNILLDNELNPRLSDYGLANFHHRTSQNLGVGYNAPECTDPSAYTQKSDVYSFGVVMLELLTGRKPYDSGRPKAEQSLVRWAKPQLKDMDTLDEMVDPALCGLYAPESVSSFADIVSICVMTEPGLRPPVSNVVEALKRLV

SEQ ID NO: 78202 - protein, 356 aa, Arabidopsis thaliana
  peptide (1)..(356): Ceres Seq. ID no. 12639810
  misc_feature (1)..(356): Homolog of NCBI NO: 18399852 NR Description: leucine-rich repeat transmembrane protein kinase,
  misc_feature (1)..(356): Homolog of NCBI NO: 15219262 NR Description: leucine-rich repeat transmembrane protein kinase,
  misc_feature (1)..(151): Homolog of NCBI NO: 37533916 NR Description: putative leucine-rich repeat transmembrane
  misc_feature (110)..(356): Homolog of NCBI NO: 37533916 NR Description: putative leucine-rich repeat transmembrane
  misc_feature (1)..(356): Homolog of NCBI NO: 29367551 NR Description: putative leucine-rich repeat transmembrane
  misc_feature (1)..(356): Homolog of NCBI NO: 7489783 NR Description: leucine-rich repeat transmembrane protein kinase
  misc_feature (1)..(356): Homolog of NCBI NO: 15217283 NR Description: Putative leucine-rich repeat transmembrane
  misc_feature (1)..(356): Homolog of NCBI NO: 7489784 NR Description: leucine-rich repeat transmembrane protein kinase
  misc_feature (1)..(356): Homolog of NCBI NO: 15220928 NR Description: leucine-rich repeat transmembrane protein kinase
  misc_feature (1)..(356): Homolog of NCBI NO: 30683104 NR Description: leucine-rich repeat transmembrane protein kinase, [Arabidopsis thaliana] >gi|9279582|dbj|BAB01040.1|
MLQFDNMEEFKNQKTVDSNTSLETKPSVKRTSSVSFKNSPTFHLIPSTQVAATPDRSSTSQDSPDTRGVKAFSLADLQNTASCFSPNRLLGEGTIGRVYKAKFQDGRKFAVKEIDSSLLGKGNPEEFSHIVSSISSIHHKNMAELVGYCSEQGRNMLVYEYFTSGSLHRFLHLSDDFSKPLTWNTRIRIALGTAKAIEYLHETCSPPLVHKNIKSSNILLDNELNPRLSDYGLANFHHRTSQNLGVGYNAPECTDPSAYTQKSDVYSFGVVMLELLTGRKPYDSGRPKAEQSLVRWAKPQLKDMDTLDEMVDPALCGLYAPESVSSFADIVSICVMTEPGLRPPVSNVVEALKRLV

SEQ ID NO: 78203 - DNA, 969 bp, Arabidopsis thaliana
  misc_feature (1)..(969): Ceres Seq. ID no. 12639815
  misc_feature: MA Experiment ID: 20000184 Result: Up-regulated in Transcription
  misc_feature: MA Experiment 20000184 PARAMETER Experiment Name: At_Shoots__P Parameter: Age (day) Value: 7
  misc_feature: MA Experiment 20000184 PARAMETER Experiment Name: At_Shoots__P Parameter: Tissue Value: Shoots vs. Whole Plant
  misc_feature: MA Experiment ID: 20000227 Result: Up-regulated in Transcription
  misc_feature: MA Experiment 20000227 PARAMETER Experiment Name: At_Root-Tips-vs-Tops_P Parameter: Tissue Value: Root Tips vs. Root Tops
atggattacactgtcgatatgagctgtgtgatgaaagtgaacagaggttgccagctttgtcggcaaaaagtgtcagaagtcatgcattgtgtctacggagtttactctgtggatttcaccggagacgacaactcaatgaaactcaaggccagagttaaccctaatgtattgttggctgttgctgaacggtacggtgaacatggaaagatcactaatctccgtttcgacggagaagttatgactcctcgcggcggcggtggttattacggtcaatcaggctattacattcctaccacctcccgtggtaactatgcatatccttcgttgtatcaatatcctcctccgccacatgtttatggcggaaactatgctcatccgccgtcaaatcccccgcggcactcggaggcaccacgaagaaacctcatccttcgaacgttaagaggaagaagaataagagaaatcgattcgtggttttgggaaaattcaatggcggtttctactgtatcgtcgtttctattgccatctttcggcattccaagctcttcgccttcttctaccagactcaaagtctctctgctgccttcatcttctacccatggcggccttagttcctgcgtccttacgaaaccatccgtctcgcttacgaaggtcttcgctgttcccgataccctagatccaactccagaaattctcgatgaacccgcctctgaggttccgagctcttcatccatcagtgtagacgcggataagatggcgccaaagcaaaagattaggatcaagcttagatcatactgggtgcctcttattgaggactcatgcaaatacttgatgctgcgagaaacaccaatgcaaagacgatgggtcctgttccattgccaaccaagaagcgtatctactgtgttctcaagtctcctcacgttcacaaggatgctaggttccattttgaaatccggacacaccagcgcatga

SEQ ID NO: 78204 - protein, 322 aa, Arabidopsis thaliana
  peptide (1)..(322): Ceres Seq. ID no. 12639816
  misc_feature (10)..(70): Pfam Name: Heavy-metal-associated domain Pfam Description: Heavy-metal-associated domain
  misc_feature (163)..(277): Homolog of NCBI NO: 15231154 NR Description: 30S ribosomal protein S10, putative; protein id: supported by cDNA: 23372., supported by cDNA: gi_14326494, by cDNA: gi_16226586, supported by cDNA: gi_19548032 similarity
  misc_feature (1)..(139): Homolog of NCBI NO: 15231158 NR Description: hypothetical protein; protein id: At3g13140.1 thaliana] >gi|10172601|dbj|BAB01405.1|
  misc_feature (163)..(277): Homolog of NCBI NO: 7578929 NR Description: plastid ribosomal protein S10 precursor
MDYTVDMSCVMKVNRGCQLCRQKVSEVMHCVYGVYSVDFTGDDNSMKLKARVNPNVLLAVAERYGEHGKITNLRFDGEVMTPRGGGGYYGQSGYYIPTTSRGNYAYPSLYQYPPPPHVYGGNYAHPPSNPPRHSEAPRRNLILRTLRGRRIREIDSWFWENSMAVSTVSSFLLPSFGIPSSSPSSTRLKVSLLPSSSTHGGLSSCVLTKPSVSLTKVFAVPDTLDPTPEILDEPASEVPSSSSISVDADKMAPKQKIRIKLRSYWVPLIEDSCKYLMLRETPMQRRWVLFHCQPRSVSTVFSSLLTFTRMLGSILKSGHTSA

SEQ ID NO: 78205 - protein, 316 aa, Arabidopsis thaliana
  peptide (1)..(316): Ceres Seq. ID no. 12639817
  misc_feature (4)..(64): Pfam Name: Heavy-metal-associated domain Pfam Description: Heavy-metal-associated domain
  misc_feature (157)..(271): Homolog of NCBI NO: 15231154 NR Description: 30S ribosomal protein S10, putative; protein id: supported by cDNA: 23372., supported by cDNA: gi_14326494, by cDNA: gi_16226586, supported by cDNA: gi_19548032 similarity
  misc_feature (1)..(133): Homolog of NCBI NO: 15231158 NR Description: hypothetical protein; protein id: At3g13140.1 thaliana] >gi|10172601|dbj|BAB01405.1|
  misc_feature (157)..(271): Homolog of NCBI NO: 7578929 NR Description: plastid ribosomal protein S10 precursor
MSCVMKVNRGCQLCRQKVSEVMHCVYGVYSVDFTGDDNSMKLKARVNPNVLLAVAERYGEHGKITNLRFDGEVMTPRGGGGYYGQSGYYIPTTSRGNYAYPSLYQYPPPPHVYGGNYAHPPSNPPRHSEAPRRNLILRTLRGRRIREIDSWFWENSMAVSTVSSFLLPSFGIPSSSPSSTRLKVSLLPSSSTHGGLSSCVLTKPSVSLTKVFAVPDTLDPTPEILDEPASEVPSSSSISVDADKMAPKQKIRIKLRSYWVPLIEDSCKYLMLRETPMQRRWVLFHCQPRSVSTVFSSLLTFTRMLGSILKSGHTSA

SEQ ID NO: 78206 - protein, 312 aa, Arabidopsis thaliana
  peptide (1)..(312): Ceres Seq. ID no. 12639818
  misc_feature (1)..(60): Pfam Name: Heavy-metal-associated domain Pfam Description: Heavy-metal-associated domain
  misc_feature (153)..(267): Homolog of NCBI NO: 15231154 NR Description: 30S ribosomal protein S10, putative; protein id: supported by cDNA: 23372., supported by cDNA: gi_14326494, by cDNA: gi_16226586, supported by cDNA: gi_19548032 similarity
  misc_feature (1)..(129): Homolog of NCBI NO: 15231158 NR Description: hypothetical protein; protein id: At3g13140.1 thaliana] >gi|10172601|dbj|BAB01405.1|
  misc_feature (153)..(267): Homolog of NCBI NO: 7578929 NR Description: plastid ribosomal protein S10 precursor
MKVNRGCQLCRQKVSEVMHCVYGVYSVDFTGDDNSMKLKARVNPNVLLAVAERYGEHGKITNLRFDGEVMTPRGGGGYYGQSGYYIPTTSRGNYAYPSLYQYPPPPHVYGGNYAHPPSNPPRHSEAPRRNLILRTLRGRRIREIDSWFWENSMAVSTVSSFLLPSFGIPSSSPSSTRLKVSLLPSSSTHGGLSSCVLTKPSVSLTKVFAVPDTLDPTPEILDEPASEVPSSSSISVDADKMAPKQKIRIKLRSYWVPLIEDSCKYLMLRETPMQRRWVLFHCQPRSVSTVFSSLLTFTRMLGSILKSGHTSA

SEQ ID NO: 78207 - DNA, 2316 bp, Arabidopsis thaliana
  misc_feature (1)..(2316): Ceres Seq. ID no. 12639831
  misc_feature: MA Experiment ID: 20000180 Result: Down-regulated in Transcription
  misc_feature: MA Experiment 20000180 PARAMETER Experiment Name: At_Germinating_Seeds_P Parameter: Age (hr) Value: 24 vs. 0
  misc_feature: MA Experiment 20000180 PARAMETER Experiment Name: At_Germinating_Seeds_P Parameter: Tissue Value: Germinating Seeds
  misc_feature: MA Experiment ID: 20000184 Result: Down-regulated in Transcription
  misc_feature: MA Experiment 20000184 PARAMETER Experiment Name: At_Shoots__P Parameter: Age (day) Value: 7
  misc_feature: MA Experiment 20000184 PARAMETER Experiment Name: At_Shoots__P Parameter: Tissue Value: Shoots vs. Whole Plant
  misc_feature: MA Experiment ID: 20000439 Result: Up-regulated in Transcription
  misc_feature: MA Experiment 20000439 PARAMETER Experiment Name: At_Roots__P Parameter: Age (day) Value: 14 vs. 21
  misc_feature: MA Experiment 20000439 PARAMETER Experiment Name: At_Roots__P Parameter: Organism Value: A. thaliana
  misc_feature: MA Experiment 20000439 PARAMETER Experiment Name: At_Roots__P Parameter: Tissue Value: Roots vs. Whole Plant
  misc_feature: MA Experiment ID: 20000495 Result: Up-regulated in Transcription
  misc_feature: MA Experiment 20000495 PARAMETER Experiment Name: At_Guard_Cells_P Parameter: Harvest Date Value: 8/2/2002
  misc_feature: MA Experiment 20000495 PARAMETER Experiment Name: At_Guard_Cells_P Parameter: Organism Value: A. thaliana
  misc_feature: MA Experiment 20000495 PARAMETER Experiment Name: At_Guard_Cells_P Parameter: Tissue Value: Guard Cells vs. Leaves
  misc_feature: MA Experiment ID: 20000496 Result: Up-regulated in Transcription
  misc_feature: MA Experiment 20000496 PARAMETER Experiment Name: At_Guard_Cells_P Parameter: Harvest Date Value: 7/19/2002
  misc_feature: MA Experiment 20000496 PARAMETER Experiment Name: At_Guard_Cells_P Parameter: Organism Value: Canola
  misc_feature: MA Experiment 20000496 PARAMETER Experiment Name: At_Guard_Cells_P Parameter: Tissue Value: Guard Cells vs. Leaves
  misc_feature: MA Experiment ID: 20000794 Result: Up-regulated in Transcription
  misc_feature: MA Experiment 20000794 PARAMETER Experiment Name: At_Petals_P Parameter: Age (day) Value: 23-25 days
  misc_feature: MA Experiment 20000794 PARAMETER Experiment Name: At_Petals_P Parameter: Plant Line Value: WS
  misc_feature: MA Experiment 20000794 PARAMETER Experiment Name: At_Petals_P Parameter: Tissue Value: Petals vs. Whole plant
  misc_feature: MA Experiment ID: 20001911 Result: Up-regulated in Transcription
  misc_feature: MA Experiment 20001911 PARAMETER Experiment Name: At_Drought_Reproduction_P Parameter: Age (day) Value: 40
  misc_feature: MA Experiment 20001911 PARAMETER Experiment Name: At_Drought_Reproduction_P Parameter: Organism Value: A. thaliana
  misc_feature: MA Experiment 20001911 PARAMETER Experiment Name: At_Drought_Reproduction_P Parameter: Plant Line Value: WS
  misc_feature: MA Experiment 20001911 PARAMETER Experiment Name: At_Drought_Reproduction_P Parameter: Timepoint (day) Value: 10
  misc_feature: MA Experiment 20001911 PARAMETER Experiment Name: At_Drought_Reproduction_P Parameter: Tissue Value: Flowers
  misc_feature: MA Experiment 20001911 PARAMETER Experiment Name: At_Drought_Reproduction_P Parameter: Treatment Value: Drought vs. No Drought
atgcagatggctgatcaacagcagacaggggagaattcttctgctcttgattctagagctgaagtagaaactggttataccacagtgagtaactcaacaacattggatggactaaacaagcagacagttccctcagttcaagcatctggcagtgtgtctttggagcaccaggctcccacagatgttacgtcgcagtggaagatgattctgcatgaggagagcaatcagtattattactggaatacagaaactggagaaacttcgtgggaattgcctacagttttgactcaaactacctttgcatatgggactgggtacaatgagtctgggcccatggttacagatgcttccaccttgatttcaagtgttgaaccaagctatttcgtacccgtgcaaaatagtttcacaggaactgactattctacttttccaactgttgagctggatgggagaaacaaaagtgaagatctatatgtcaaaagtttaggaactgatggtcatcaagttgaatgtcggatagactctgttgttagttgtcaggaggacctttcaaggccaggaaattcagatcatgtgcatacttattttgatgcaggagctgctactgacctcccatctcgcttgttgagtcaaatcgaaagcttactggagaagctgaggtctctgaagaggtcgcatgggaactttcacagcaatgagcagataacaaagtacattctggaggttgaagtcagacattctgatgtaaaggcgctcatattggacacctcacctttactttctttttggcttcacactgagaaacaacttaagcggctggaagatagtgttaacgatgagatttaccagcttgcaaaatctgcagtaatggatgaaccagaaactaacaaaagccctcccaaagaaaagttggtggcagatgctaatacagagagtgagtccgaggacagtgagagagatggagagttagctcaatctggaaaatctcttcattcagatgaatcagctgatgggagcggcgatggatctcctaaacactccccaaatcatccagctgggcagtctgatattattccttcaactgagatgcttcagaaggccggctccccagatgtggaagatgttgacatggatgtggatatggaagttgaagaatcagttccagtgtcttctgttcaagtgatagacgcttctgatggtaagatgttcagtcaaacagagccatccaaccttcatacagatgttccaccacctccgggtgaggaatggattccaccaccgccgtctgagagtgaagatgttcctccaccgccaccagacagttatagcgaaccaattcctccaccacctgacaatggccatgtcgcttcatctttgtccagtgactctctcggagttccctataccgtacctcaatcatatatgcatcaatctgctgattatgcgacacaatacaacttatcctatccagagtccaattatcaatataccaatgctgttactctagctcctaatactcagttctatggccatgtggatggatctcaagtttctcttccccaatccacattttattatgaaactgttcctggtacaactgaagttgttcctgcagcagccagtgctggtgaagcttattacgatttcaatggtgcagctccactgtttcctgtcattagctcgggtgagtcatctctacatcacagtggagttggttctgctaatcaccacatcccaaacaactcttctacagctgcagtgcctagttcgagatccaatgactctactgaggttggatcttcagcaactgcttctaaatccacagatgttacaagtggatcgtctctattagcaaaaggtcaaactaaagtgaaacggacaaaaaagaaaacagtagctgctacatctacattgaggtcaaataaaaaggtttccagtttggttgacaagtggaaagctgcgaaagaggagctaaacgatagcgaagaagaagaagatgattccgaaatcctagatagaaaaagaaaacgagaaatcgaagaatggaaatctcgacaaatcgcaagtggagaggctaaagacaacgcaaatttccaacccctgggtggtgactggcgtgagaaagtgaaacggaagagagaacgagctgagaagtctcagaagaaagaccccgaaaagcagcaaaaacctgatctaacaaaactctcagcaaatctcccgtcggaatggcaggcatattgggacgaatctaccaaaaaagtttactatgggaatacgagtacatctcaaaccagttggacacgacccactacctga

SEQ ID NO: 78208 - protein, 771 aa, Arabidopsis thaliana; identical to SEQ ID NO: 75208
  peptide (1)..(771): Ceres Seq. ID no. 12639832
  misc_feature (62)..(92): Pfam Name: WW domain Pfam Description: WW domain
  misc_feature (19)..(97): Homolog of NCBI NO: 11360125 NR Description: hypothetical protein DKFZp434M2023.1 - human
  misc_feature (639)..(713): Homolog of NCBI NO: 11360125 NR Description: hypothetical protein DKFZp434M2023.1 - human
  misc_feature (409)..(455): Homolog of NCBI NO: 11360125 NR Description: hypothetical protein DKFZp434M2023.1 - human
  misc_feature (19)..(97): Homolog of NCBI NO: 24308033 NR Description: KIAA1014 protein [Homo sapiens]
  misc_feature (639)..(713): Homolog of NCBI NO: 24308033 NR Description: KIAA1014 protein [Homo sapiens]
  misc_feature (409)..(455): Homolog of NCBI NO: 24308033 NR Description: KIAA1014 protein [Homo sapiens]
  misc_feature (19)..(97): Homolog of NCBI NO: 20521728 NR Description: KIAA1014 protein [Homo sapiens]
  misc_feature (639)..(713): Homolog of NCBI NO: 20521728 NR Description: KIAA1014 protein [Homo sapiens]
  misc_feature (409)..(455): Homolog of NCBI NO: 20521728 NR Description: KIAA1014 protein [Homo sapiens]
  misc_feature (19)..(122): Homolog of NCBI NO: 39104535 NR Description: mKIAA1014 protein [Mus musculus]

SEQ ID NO: 78209 - protein, 769 aa, Arabidopsis thaliana; identical to SEQ ID NO: 77183
  peptide (1)..(769): Ceres Seq. ID no. 12639833
  misc_feature (60)..(90): Pfam Name: WW domain Pfam Description: WW domain
  misc_feature (17)..(95): Homolog of NCBI NO: 11360125 NR Description: hypothetical protein DKFZp434M2023.1 - human
  misc_feature (637)..(711): Homolog of NCBI NO: 11360125 NR Description: hypothetical protein DKFZp434M2023.1 - human
  misc_feature (407)..(453): Homolog of NCBI NO: 11360125 NR Description: hypothetical protein DKFZp434M2023.1 - human
  misc_feature (17)..(95): Homolog of NCBI NO: 24308033 NR Description: KIAA1014 protein [Homo sapiens]
  misc_feature (637)..(711): Homolog of NCBI NO: 24308033 NR Description: KIAA1014 protein [Homo sapiens]
  misc_feature (407)..(453): Homolog of NCBI NO: 24308033 NR Description: KIAA1014 protein [Homo sapiens]
  misc_feature (17)..(95): Homolog of NCBI NO: 20521728 NR Description: KIAA1014 protein [Homo sapiens]
  misc_feature (637)..(711): Homolog of NCBI NO: 20521728 NR Description: KIAA1014 protein [Homo sapiens]
  misc_feature (407)..(453): Homolog of NCBI NO: 20521728 NR Description: KIAA1014 protein [Homo sapiens]
  misc_feature (17)..(120): Homolog of NCBI NO: 39104535 NR Description: mKIAA1014 protein [Mus musculus]

SEQ ID NO: 78210 - protein, 704 aa, Arabidopsis thaliana; identical to SEQ ID NO: 77184
  peptide (1)..(704): Ceres Seq. ID no. 12639834
  misc_feature (1)..(25): Pfam Name: WW domain Pfam Description: WW domain
  misc_feature (1)..(30): Homolog of NCBI NO: 11360125 NR Description: hypothetical protein DKFZp434M2023.1 - human
  misc_feature (572)..(646): Homolog of NCBI NO: 11360125 NR Description: hypothetical protein DKFZp434M2023.1 - human
  misc_feature (342)..(388): Homolog of NCBI NO: 11360125 NR Description: hypothetical protein DKFZp434M2023.1 - human
  misc_feature (1)..(30): Homolog of NCBI NO: 24308033 NR Description: KIAA1014 protein [Homo sapiens]
  misc_feature (572)..(646): Homolog of NCBI NO: 24308033 NR Description: KIAA1014 protein [Homo sapiens]
  misc_feature (342)..(388): Homolog of NCBI NO: 24308033 NR Description: KIAA1014 protein [Homo sapiens]
  misc_feature (1)..(30): Homolog of NCBI NO: 20521728 NR Description: KIAA1014 protein [Homo sapiens]
  misc_feature (572)..(646): Homolog of NCBI NO: 20521728 NR Description: KIAA1014 protein [Homo sapiens]
  misc_feature (342)..(388): Homolog of NCBI NO: 20521728 NR Description: KIAA1014 protein [Homo sapiens]
  misc_feature (1)..(55): Homolog of NCBI NO: 39104535 NR Description: mKIAA1014 protein [Mus musculus]

SEQ ID NO: 78211 - DNA, 501 bp, Arabidopsis thaliana
  misc_feature (1)..(501): Ceres Seq. ID no. 12639893
  misc_feature: MA Experiment ID: 20001451 Result: Down-regulated in Transcription
  misc_feature: MA Experiment 20001451 PARAMETER Experiment Name: At_Far-red-induction_P Parameter: Age (day) Value: 7
  misc_feature: MA Experiment 20001451 PARAMETER Experiment Name: At_Far-red-induction_P Parameter: Light Value: Far-red vs. White
  misc_feature: MA Experiment 20001451 PARAMETER Experiment Name: At_Far-red-induction_P Parameter: Organism Value: A. thaliana
  misc_feature: MA Experiment 20001451 PARAMETER Experiment Name: At_Far-red-induction_P Parameter: Plant Line Value: Columbia
  misc_feature: MA Experiment 20001451 PARAMETER Experiment Name: At_Far-red-induction_P Parameter: Timepoint (hr) Value: 24
  misc_feature: MA Experiment 20001451 PARAMETER Experiment Name: At_Far-red-induction_P Parameter: Tissue Value: Whole Plant
atgtacgccggatattcaggaacggcgtcgtcttgggtagcgaagacttcagtttctgcgtcagggaagaggatacagagggagatggctgagcttaacattgatccacctcctgattgctcagctggtccaaaaggagataatctctaccattggatcgccaccatcattggtccttcgggaactccctatgaaggagggatctttttcctggatataattttcccatctgattatccattcaagccacctaagttggtgttcaagactcggatttaccattgcaatgttgatactgcgggagatttaagtgtgaacattctaagagatagttggagtccagcccttacaatcactaaagtcttacaagccatcagatctatcttcttaaaacctgaaccctatagtccagctttaccggtgattgcacggctctacttgacagatagagaaaagcatgacgaggtagccaaagaatggacattgcgatttgccaagtga

SEQ ID NO: 78212 - protein, 166 aa, Arabidopsis thaliana
  peptide (1)..(166): Ceres Seq. ID no. 12639894
  misc_feature (1)..(166): Homolog of NCBI NO: 22331064 NR Description: E2, ubiquitin-conjugating enzyme, putative; id: At3g13550.1, supported by cDNA: gi_20065778 [Arabidopsis >gi|9280307|dbj|BAB01762.1|
  misc_feature (16)..(166): Homolog of NCBI NO: 34393509 NR Description: putative elicitor inducible beta-1,3-glucanase
  misc_feature (9)..(165): Homolog of NCBI NO: 1717850 NR Description: Ubiquitin-conjugating enzyme E2-23 kDa
  misc_feature (9)..(165): Homolog of NCBI NO: 5454146 NR Description: ubiquitin-conjugating enzyme E2E 3 (UBC4/5
  misc_feature (9)..(165): Homolog of NCBI NO: 39794483 NR Description: Unknown (protein for MGC:76120) [Silurana
  misc_feature (14)..(165): Homolog of NCBI NO: 27503950 NR Description: Similar to ubiquitin-conjugating enzyme E2E 3,
  misc_feature (9)..(165): Homolog of NCBI NO: 40363453 NR Description: ubiquitin conjugating enzyme E2 [Xenopus laevis]
  misc_feature (7)..(165): Homolog of NCBI NO: 21450233 NR Description: hypothetical protein MGC28917 [Mus musculus]
  misc_feature (7)..(165): Homolog of NCBI NO: 22749327 NR Description: hypothetical protein FLJ25157 [Homo sapiens] unnamed protein product [Homo sapiens]
  misc_feature (7)..(165): Homolog of NCBI NO: 34869227 NR Description: similar to cDNA sequence BC016265 [Rattus
MYAGYSGTASSWVAKTSVSASGKRIQREMAELNIDPPPDCSAGPKGDNLYHWIATIIGPSGTPYEGGIFFLDIIFPSDYPFKPPKLVFKTRIYHCNVDTAGDLSVNILRDSWSPALTITKVLQAIRSIFLKPEPYSPALPVIARLYLTDREKHDEVAKEWTLRFAK

SEQ ID NO: 78213 - protein, 138 aa, Arabidopsis thaliana
  peptide (1)..(138): Ceres Seq. ID no. 12639895
  misc_feature (1)..(138): Homolog of NCBI NO: 22331064 NR Description: E2, ubiquitin-conjugating enzyme, putative; id: At3g13550.1, supported by cDNA: gi_20065778 [Arabidopsis >gi|9280307|dbj|BAB01762.1|
  misc_feature (1)..(138): Homolog of NCBI NO: 34393509 NR Description: putative elicitor inducible beta-1,3-glucanase
  misc_feature (1)..(137): Homolog of NCBI NO: 1717850 NR Description: Ubiquitin-conjugating enzyme E2-23 kDa
  misc_feature (1)..(137): Homolog of NCBI NO: 5454146 NR Description: ubiquitin-conjugating enzyme E2E 3 (UBC4/5
  misc_feature (1)..(137): Homolog of NCBI NO: 39794483 NR Description: Unknown (protein for MGC:76120) [Silurana
  misc_feature (1)..(137): Homolog of NCBI NO: 27503950 NR Description: Similar to ubiquitin-conjugating enzyme E2E 3,
  misc_feature (1)..(137): Homolog of NCBI NO: 40363453 NR Description: ubiquitin conjugating enzyme E2 [Xenopus laevis]
  misc_feature (1)..(137): Homolog of NCBI NO: 21450233 NR Description: hypothetical protein MGC28917 [Mus musculus]
  misc_feature (1)..(137): Homolog of NCBI NO: 22749327 NR Description: hypothetical protein FLJ25157 [Homo sapiens] unnamed protein product [Homo sapiens]
  misc_feature (1)..(137): Homolog of NCBI NO: 34869227 NR Description: similar to cDNA sequence BC016265 [Rattus
MAELNIDPPPDCSAGPKGDNLYHWIATIIGPSGTPYEGGIFFLDIIFPSDYPFKPPKLVFKTRIYHCNVDTAGDLSVNILRDSWSPALTITKVLQAIRSIFLKPEPYSPALPVIARLYLTDREKHDEVAKEWTLRFAK

SEQ ID NO: 78214 - DNA, 1262 bp, Arabidopsis thaliana
  misc_feature (1)..(1262): Ceres Seq. ID no. 12639927
  misc_feature: MA Experiment ID: 108595 Result: Up-regulated in Transcription
  misc_feature: MA Experiment 108595 PARAMETER Experiment Name: At_Ler-pi_Ovule_cDNA_P Parameter: Plant Line Value: null
  misc_feature: MA Experiment ID: 20000234 Result: Up-regulated in Transcription
  misc_feature: MA Experiment 20000234 PARAMETER Experiment Name: At_Siliques_P Parameter: Age (day) Value: 21
  misc_feature: MA Experiment 20000234 PARAMETER Experiment Name: At_Siliques_P Parameter: Organism Value: A. thaliana
  misc_feature: MA Experiment 20000234 PARAMETER Experiment Name: At_Siliques_P Parameter: Plant Line Value: WS
  misc_feature: MA Experiment 20000234 PARAMETER Experiment Name: At_Siliques_P Parameter: Tissue Value: Less Than 5mm Siliques vs. Whole Plant
  misc_feature: MA Experiment ID: 20000264 Result: Up-regulated in Transcription
  misc_feature: MA Experiment 20000264 PARAMETER Experiment Name: At_Open_Flower_P Parameter: Age (day) Value: 21
  misc_feature: MA Experiment 20000264 PARAMETER Experiment Name: At_Open_Flower_P Parameter: Plant Line Value: WS
  misc_feature: MA Experiment 20000264 PARAMETER Experiment Name: At_Open_Flower_P Parameter: Tissue Value: Open Flower vs. Whole Plant
  misc_feature: MA Experiment ID: 20000437 Result: Down-regulated in Transcription
  misc_feature: MA Experiment 20000437 PARAMETER Experiment Name: At_Drought_P Parameter: Age (day) Value: 8
  misc_feature: MA Experiment 20000437 PARAMETER Experiment Name: At_Drought_P Parameter: Organism Value: A. thaliana
  misc_feature: MA Experiment 20000437 PARAMETER Experiment Name: At_Drought_P Parameter: Plant Line Value: WS
  misc_feature: MA Experiment 20000437 PARAMETER Experiment Name: At_Drought_P Parameter: Timepoint (hr) Value: 24
  misc_feature: MA Experiment 20000437 PARAMETER Experiment Name: At_Drought_P Parameter: Tissue Value: Whole Plant
  misc_feature: MA Experiment 20000437 PARAMETER Experiment Name: At_Drought_P Parameter: Treatment Value: Drought vs. No Drought
  misc_feature: MA Experiment ID: 20000495 Result: Up-regulated in Transcription
  misc_feature: MA Experiment 20000495 PARAMETER Experiment Name: At_Guard_Cells_P Parameter: Harvest Date Value: 8/2/2002
  misc_feature: MA Experiment 20000495 PARAMETER Experiment Name: At_Guard_Cells_P Parameter: Organism Value: A. thaliana
  misc_feature: MA Experiment 20000495 PARAMETER Experiment Name: At_Guard_Cells_P Parameter: Tissue Value: Guard Cells vs. Leaves
  misc_feature: MA Experiment ID: 20001450 Result: Down-regulated in Transcription
  misc_feature: MA Experiment 20001450 PARAMETER Experiment Name: At_Far-red-induction_P Parameter: Age (day) Value: 7
  misc_feature: MA Experiment 20001450 PARAMETER Experiment Name: At_Far-red-induction_P Parameter: Light Value: Far-red vs. White
  misc_feature: MA Experiment 20001450 PARAMETER Experiment Name: At_Far-red-induction_P Parameter: Organism Value: A. thaliana
  misc_feature: MA Experiment 20001450 PARAMETER Experiment Name: At_Far-red-induction_P Parameter: Plant Line Value: Columbia
  misc_feature: MA Experiment 20001450 PARAMETER Experiment Name: At_Far-red-induction_P Parameter: Timepoint (hr) Value: 8
  misc_feature: MA Experiment 20001450 PARAMETER Experiment Name: At_Far-red-induction_P Parameter: Tissue Value: Whole Plant
  misc_feature: MA Experiment ID: 20001560 Result: Up-regulated in Transcription
  misc_feature: MA Experiment 20001560 PARAMETER Experiment Name: At_Drought_Soil_Dry_P Parameter: Age (day) Value: 28
  misc_feature: MA Experiment 20001560 PARAMETER Experiment Name: At_Drought_Soil_Dry_P Parameter: Organism Value: A. thaliana
  misc_feature: MA Experiment 20001560 PARAMETER Experiment Name: At_Drought_Soil_Dry_P Parameter: Plant Line Value: WS
  misc_feature: MA Experiment 20001560 PARAMETER Experiment Name: At_Drought_Soil_Dry_P Parameter: Post Timepoint (hr) Value: None
  misc_feature: MA Experiment 20001560 PARAMETER Experiment Name: At_Drought_Soil_Dry_P Parameter: Post-Treatment Value: None
  misc_feature: MA Experiment 20001560 PARAMETER Experiment Name: At_Drought_Soil_Dry_P Parameter: Timepoint (day) Value: 14
  misc_feature: MA Experiment 20001560 PARAMETER Experiment Name: At_Drought_Soil_Dry_P Parameter: Treatment Value: Drought vs. No Drought
  misc_feature: MA Experiment ID: 20001911 Result: Down-regulated in Transcription
  misc_feature: MA Experiment 20001911 PARAMETER Experiment Name: At_Drought_Reproduction_P Parameter: Age (day) Value: 40
  misc_feature: MA Experiment 20001911 PARAMETER Experiment Name: At_Drought_Reproduction_P Parameter: Organism Value: A. thaliana
  misc_feature: MA Experiment 20001911 PARAMETER Experiment Name: At_Drought_Reproduction_P Parameter: Plant Line Value: WS
  misc_feature: MA Experiment 20001911 PARAMETER Experiment Name: At_Drought_Reproduction_P Parameter: Timepoint (day) Value: 10
  misc_feature: MA Experiment 20001911 PARAMETER Experiment Name: At_Drought_Reproduction_P Parameter: Tissue Value: Flowers
  misc_feature: MA Experiment 20001911 PARAMETER Experiment Name: At_Drought_Reproduction_P Parameter: Treatment Value: Drought vs. No Drought
acaatcacttgtctgattctctcatataatagagttttctttctattctcctctgcttaatttcccagaaattactctttctgtgcttatcggattcaatagattcttagtaaatcgtaatggagacaccatcatcgacaagaagagtcacgagatctcagacccgctgtgctatcaataatctcttatcctcaaagaaagcggatgattggtcagataaatgtcaatcgaagtcggtacaaagaaacggtgcaaaagacaggtctgcgttgtttgacataaccaacgactcaccgatcgtaggtctggcgatgcagacaccgtcctcaggagttgttgggaagaggaacatgagcagaatcaataacactcctggatctggtgaggctctcttgagaggccaagtcaagactctcttgcagaaggttgaggaagaagcagatctcaccaagatttcgttggaatctcgtcctttcatccatctcgttacttctcccatgggtcttctcgccccaactccggccaacaccccccaagttcttggtttctcagacgaagtgcaggttgtgatcacttctccggtagttgcaggacaattcagagcaccgtctcaggtggtggaaagcaacatgtttgatgagaaagaagaaagcttggagttagagaagagcccgagcattactcggtcattgcttctggactttagtgataaatcagaattatgggagagctcagactgctcatctgtggtgactcaaaacccagaggatgataactcgtcggtgtggtcgatgcaggccaatgcaagtgccaaagacgaagagtatgatgatgaagaggaagaagcctattcttacggtgaggaatatgatgaggaatactacgacgaggaagaggaggaagaagagggagggattgtggatgggttgtgtgagggaattaggaagatgagcgtagagactgactttgcagggaaacacactagatttgtgtatgacagtgaagatgaagagattgtggaggccaaagatcaatctccaggagtgttgcgtttgaaaggctttcctacaccgacaggaaaacatgtcagatttgccggtgatgaatgagttcagtttgaatctttcttcttggagttgtgacaaaaagcctcatatgtctcgactttttttttttttttttcttgttgttgcttgaagattcacaaatctgattcttgttattaccttgttgttatttttcaataactaaaagtgtaatcg

SEQ ID NO: 78215 - protein, 329 aa, Arabidopsis thaliana; identical to SEQ ID NO: 39350
  peptide (1)..(329): Ceres Seq. ID no. 12639928
  misc_feature (1)..(329): Homolog of NCBI NO: 15239303 NR Description: putative protein; protein id: At5g66230.1 thaliana] >gi|26451855|dbj|BAC43020.1| unknown protein thaliana] >gi|28950901|gb|AAO63374.1| At5g66230 [Arabidopsis
  misc_feature (1)..(182): Homolog of NCBI NO: 15230432 NR Description: hypothetical protein; protein id: At3g51230.1
  misc_feature (274)..(329): Homolog of NCBI NO: 15230432 NR Description: hypothetical protein; protein id: At3g51230.1
  misc_feature (1)..(328): Homolog of NCBI NO: 37537140 NR Description: putative proline and glutamic acid rich nuclear

SEQ ID NO: 78216 - protein, 265 aa, Arabidopsis thaliana; identical to SEQ ID NO: 39351
  peptide (1)..(265): Ceres Seq. ID no. 12639929
  misc_feature (1)..(265): Homolog of NCBI NO: 15239303 NR Description: putative protein; protein id: At5g66230.1 thaliana] >gi|26451855|dbj|BAC43020.1| unknown protein thaliana] >gi|28950901|gb|AAO63374.1| At5g66230 [Arabidopsis
  misc_feature (1)..(118): Homolog of NCBI NO: 15230432 NR Description: hypothetical protein; protein id: At3g51230.1
  misc_feature (210)..(265): Homolog of NCBI NO: 15230432 NR Description: hypothetical protein; protein id: At3g51230.1
  misc_feature (1)..(264): Homolog of NCBI NO: 37537140 NR Description: putative proline and glutamic acid rich nuclear

SEQ ID NO: 78217 - protein, 252 aa, Arabidopsis thaliana; identical to SEQ ID NO: 39352
  peptide (1)..(252): Ceres Seq. ID no. 12639930
  misc_feature (1)..(252): Homolog of NCBI NO: 15239303 NR Description: putative protein; protein id: At5g66230.1 thaliana] >gi|26451855|dbj|BAC43020.1| unknown protein thaliana] >gi|28950901|gb|AAO63374.1| At5g66230 [Arabidopsis
  misc_feature (1)..(105): Homolog of NCBI NO: 15230432 NR Description: hypothetical protein; protein id: At3g51230.1
  misc_feature (197)..(252): Homolog of NCBI NO: 15230432 NR Description: hypothetical protein; protein id: At3g51230.1
  misc_feature (1)..(251): Homolog of NCBI NO: 37537140 NR Description: putative proline and glutamic acid rich nuclear

SEQ ID NO: 78218 - DNA, 876 bp, Arabidopsis thaliana
  misc_feature (1)..(876): Ceres Seq. ID no. 12639935
  misc_feature: MA Experiment ID: 20000185 Result: Up-regulated in Transcription
  misc_feature: MA Experiment 20000185 PARAMETER Experiment Name: At_Roots__P Parameter: Age (day) Value: 7 vs. 21
  misc_feature: MA Experiment 20000185 PARAMETER Experiment Name: At_Roots__P Parameter: Organism Value: A. thaliana
  misc_feature: MA Experiment 20000185 PARAMETER Experiment Name: At_Roots__P Parameter: Tissue Value: Roots vs. Whole Plant
  misc_feature: MA Experiment ID: 20001451 Result: Up-regulated in Transcription
  misc_feature: MA Experiment 20001451 PARAMETER Experiment Name: At_Far-red-induction_P Parameter: Age (day) Value: 7
  misc_feature: MA Experiment 20001451 PARAMETER Experiment Name: At_Far-red-induction_P Parameter: Light Value: Far-red vs. White
  misc_feature: MA Experiment 20001451 PARAMETER Experiment Name: At_Far-red-induction_P Parameter: Organism Value: A. thaliana
  misc_feature: MA Experiment 20001451 PARAMETER Experiment Name: At_Far-red-induction_P Parameter: Plant Line Value: Columbia
  misc_feature: MA Experiment 20001451 PARAMETER Experiment Name: At_Far-red-induction_P Parameter: Timepoint (hr) Value: 24
  misc_feature: MA Experiment 20001451 PARAMETER Experiment Name: At_Far-red-induction_P Parameter: Tissue Value: Whole Plant
atgaaggttgatcaagattattcgtgtagtataccgcctggatttaggtttcatccgacagatgaagaacttgtcggatattatctcaagaagaaaatcgcctcccagaggattgatctcgacgttatcagagaaattgatctttacaagatcgaaccatgggatctacaagagagatgtaggatagggtacgaggagcaaacggagtggtatttcttcagccatagagacaagaagtatccgactgggactaggacaaaccgagccaccgtggccggtttctggaaagcaacgggccgggacaaggcggtttacctcaactccaaacttatcggtatgagaaaaacgcttgtcttttaccgaggtcgagcgcctaatggccaaaagtccgattggatcattcacgaatactacagcctcgagtcacaccagaactctcctccacaggaagaaggatgggtagtgtgtagagcatttaagaaacgaacgaccatcccaacaaaaaggaggcaactttgggatccgaactgcttattctacgacgacgccactctcttggaacctctcgacaagcgagccagacataatcctgattttaccgccacaccgttcaagcaagaactactctccgaggccagtcacgtccaggatggagatttcggatctatgtaccttcaatgcatcgatgatgatcaattctcccagcttcctcagctcgagagcccctctcttccgtcggaaataactccccatagtactactttttctgagaacagtagccggaaagatgacatgagctccgagaagaggatcactgactggagatatctagataagttcgtggcgtctcaatttttgatgagtggagaagactaa

SEQ ID NO: 78219 - protein, 291 aa, Arabidopsis thaliana; identical to SEQ ID NO: 73020
  peptide (1)..(291): Ceres Seq. ID no. 12639936
  misc_feature (11)..(141): Pfam Name: No apical meristem (NAM) protein Pfam Description: No apical meristem (NAM) protein
  misc_feature (1)..(291): Homolog of NCBI NO: 15239338 NR Description: NAM (no apical meristem)-like protein; protein At5g66300.1 [Arabidopsis thaliana] >gi|10177424|dbj|BAB10709.1|
  misc_feature (6)..(254): Homolog of NCBI NO: 15234325 NR Description: NAM like protein; protein id: At4g36160.1
  misc_feature (8)..(269): Homolog of NCBI NO: 15227958 NR Description: putative NAM (no apical meristem)-like protein; id: At2g18060.1 [Arabidopsis thaliana] >gi|25352296|pir||G84559
  misc_feature (8)..(290): Homolog of NCBI NO: 34902254 NR Description: Putative NAM-like protein [Oryza sativa (japonica
  misc_feature (3)..(286): Homolog of NCBI NO: 15217612 NR Description: NAM-like protein; protein id: At1g71930.1,
  misc_feature (11)..(182): Homolog of NCBI NO: 15221256 NR Description: unknown protein; protein id: At1g12260.1
  misc_feature (11)..(182): Homolog of NCBI NO: 15221554 NR Description: unknown protein; protein id: At1g62700.1
  misc_feature (11)..(170): Homolog of NCBI NO: 24413978 NR Description: NAM-like protein [Oryza sativa (japonica
  misc_feature (11)..(182): Homolog of NCBI NO: 25402716 NR Description: hypothetical protein [imported] - Arabidopsis >gi|10086508|gb|AAG12568.1|AC022522_1 Hypothetical protein
  misc_feature (11)..(277): Homolog of NCBI NO: 38637051 NR Description: putative OsNAC7 protein [Oryza sativa (japonica

SEQ ID NO: 78220 - protein, 179 aa, Arabidopsis thaliana; identical to SEQ ID NO: 73021
  peptide (1)..(179): Ceres Seq. ID no. 12639937
  misc_feature (1)..(179): Homolog of NCBI NO: 15239338 NR Description: NAM (no apical meristem)-like protein; protein At5g66300.1 [Arabidopsis thaliana] >gi|10177424|dbj|BAB10709.1|
  misc_feature (1)..(142): Homolog of NCBI NO: 15234325 NR Description: NAM like protein; protein id: At4g36160.1
  misc_feature (1)..(157): Homolog of NCBI NO: 15227958 NR Description: putative NAM (no apical meristem)-like protein; id: At2g18060.1 [Arabidopsis thaliana] >gi|25352296|pir||G84559
  misc_feature (1)..(178): Homolog of NCBI NO: 34902254 NR Description: Putative NAM-like protein [Oryza sativa (japonica
  misc_feature (1)..(174): Homolog of NCBI NO: 15217612 NR Description: NAM-like protein; protein id: At1g71930.1,
  misc_feature (1)..(70): Homolog of NCBI NO: 15221256 NR Description: unknown protein; protein id: At1g12260.1
  misc_feature (1)..(70): Homolog of NCBI NO: 15221554 NR Description: unknown protein; protein id: At1g62700.1
  misc_feature (1)..(58): Homolog of NCBI NO: 24413978 NR Description: NAM-like protein [Oryza sativa (japonica
  misc_feature (1)..(70): Homolog of NCBI NO: 25402716 NR Description: hypothetical protein [imported] - Arabidopsis >gi|10086508|gb|AAG12568.1|AC022522_1 Hypothetical protein
  misc_feature (1)..(165): Homolog of NCBI NO: 38637051 NR Description: putative OsNAC7 protein [Oryza sativa (japonica

SEQ ID NO: 78221 - DNA, 876 bp, Arabidopsis thaliana
  misc_feature (1)..(876): Ceres Seq. ID no. 12639956
  misc_feature: MA Experiment ID: 20000173 Result: Down-regulated in Transcription
  misc_feature: MA Experiment 20000173 PARAMETER Experiment Name: At_42deg_Heat_P Parameter: Age (day) Value: 14
  misc_feature: MA Experiment 20000173 PARAMETER Experiment Name: At_42deg_Heat_P Parameter: Organism Value: A. thaliana
  misc_feature: MA Experiment 20000173 PARAMETER Experiment Name: At_42deg_Heat_P Parameter: Plant Line Value: WS
  misc_feature: MA Experiment 20000173 PARAMETER Experiment Name: At_42deg_Heat_P Parameter: Temperature (deg C) Value: 42 vs. 22
  misc_feature: MA Experiment 20000173 PARAMETER Experiment Name: At_42deg_Heat_P Parameter: Timepoint (hr) Value: 6
  misc_feature: MA Experiment 20000173 PARAMETER Experiment Name: At_42deg_Heat_P Parameter: Tissue Value: Aerial
  misc_feature: MA Experiment ID: 20000185 Result: Down-regulated in Transcription
  misc_feature: MA Experiment 20000185 PARAMETER Experiment Name: At_Roots__P Parameter: Age (day) Value: 7 vs. 21
  misc_feature: MA Experiment 20000185 PARAMETER Experiment Name: At_Roots__P Parameter: Organism Value: A. thaliana
  misc_feature: MA Experiment 20000185 PARAMETER Experiment Name: At_Roots__P Parameter: Tissue Value: Roots vs. Whole Plant
  misc_feature: MA Experiment ID: 20000437 Result: Down-regulated in Transcription
  misc_feature: MA Experiment 20000437 PARAMETER Experiment Name: At_Drought_P Parameter: Age (day) Value: 8
  misc_feature: MA Experiment 20000437 PARAMETER Experiment Name: At_Drought_P Parameter: Organism Value: A. thaliana
  misc_feature: MA Experiment 20000437 PARAMETER Experiment Name: At_Drought_P Parameter: Plant Line Value: WS
  misc_feature: MA Experiment 20000437 PARAMETER Experiment Name: At_Drought_P Parameter: Timepoint (hr) Value: 24
  misc_feature: MA Experiment 20000437 PARAMETER Experiment Name: At_Drought_P Parameter: Tissue Value: Whole Plant
  misc_feature: MA Experiment 20000437 PARAMETER Experiment Name: At_Drought_P Parameter: Treatment Value: Drought vs. No Drought
  misc_feature: MA Experiment ID: 20000453 Result: Down-regulated in Transcription
  misc_feature: MA Experiment 20000453 PARAMETER Experiment Name: At_100uM_ABA_P Parameter: Age (day) Value: 15
  misc_feature: MA Experiment 20000453 PARAMETER Experiment Name: At_100uM_ABA_P Parameter: Organism Value: A. thaliana
  misc_feature: MA Experiment 20000453 PARAMETER Experiment Name: At_100uM_ABA_P Parameter: Plant Line Value: WS
  misc_feature: MA Experiment 20000453 PARAMETER Experiment Name: At_100uM_ABA_P Parameter: Timepoint (hr) Value: 24
  misc_feature: MA Experiment 20000453 PARAMETER Experiment Name: At_100uM_ABA_P Parameter: Tissue Value: Aerial
  misc_feature: MA Experiment 20000453 PARAMETER Experiment Name: At_100uM_ABA_P Parameter: Treatment Value: 100uM ABA vs. No Treatment
  misc_feature: MA Experiment ID: 20000794 Result: Down-regulated in Transcription
  misc_feature: MA Experiment 20000794 PARAMETER Experiment Name: At_Petals_P Parameter: Age (day) Value: 23-25 days
  misc_feature: MA Experiment 20000794 PARAMETER Experiment Name: At_Petals_P Parameter: Plant Line Value: WS
  misc_feature: MA Experiment 20000794 PARAMETER Experiment Name: At_Petals_P Parameter: Tissue Value: Petals vs. Whole plant
  misc_feature: MA Experiment ID: 20001247 Result: Down-regulated in Transcription
  misc_feature: MA Experiment 20001247 PARAMETER Experiment Name: At_Far-red-induction_P Parameter: Age (day) Value: 7
  misc_feature: MA Experiment 20001247 PARAMETER Experiment Name: At_Far-red-induction_P Parameter: Light Value: Far-red vs. White
  misc_feature: MA Experiment 20001247 PARAMETER Experiment Name: At_Far-red-induction_P Parameter: Organism Value: A. thaliana
  misc_feature: MA Experiment 20001247 PARAMETER Experiment Name: At_Far-red-induction_P Parameter: Plant Line Value: Columbia
  misc_feature: MA Experiment 20001247 PARAMETER Experiment Name: At_Far-red-induction_P Parameter: Timepoint (hr) Value: 1
  misc_feature: MA Experiment 20001247 PARAMETER Experiment Name: At_Far-red-induction_P Parameter: Tissue Value: Whole Plant
  misc_feature: MA Experiment ID: 20001451 Result: Down-regulated in Transcription
  misc_feature: MA Experiment 20001451 PARAMETER Experiment Name: At_Far-red-induction_P Parameter: Age (day) Value: 7
  misc_feature: MA Experiment 20001451 PARAMETER Experiment Name: At_Far-red-induction_P Parameter: Light Value: Far-red vs. White
  misc_feature: MA Experiment 20001451 PARAMETER Experiment Name: At_Far-red-induction_P Parameter: Organism Value: A. thaliana
  misc_feature: MA Experiment 20001451 PARAMETER Experiment Name: At_Far-red-induction_P Parameter: Plant Line Value: Columbia
  misc_feature: MA Experiment 20001451 PARAMETER Experiment Name: At_Far-red-induction_P Parameter: Timepoint (hr) Value: 24
  misc_feature: MA Experiment 20001451 PARAMETER Experiment Name: At_Far-red-induction_P Parameter: Tissue Value: Whole Plant
  misc_feature: MA Experiment ID: 20001458 Result: Up-regulated in Transcription
  misc_feature: MA Experiment 20001458 PARAMETER Experiment Name: At_50mM_NH4NO3_L-to-H_P Parameter: Age (day) Value: Undefined
  misc_feature: MA Experiment 20001458 PARAMETER Experiment Name: At_50mM_NH4NO3_L-to-H_P Parameter: Organism Value: Undefined
  misc_feature: MA Experiment 20001458 PARAMETER Experiment Name: At_50mM_NH4NO3_L-to-H_P Parameter: Plant Line Value: Undefined
  misc_feature: MA Experiment 20001458 PARAMETER Experiment Name: At_50mM_NH4NO3_L-to-H_P Parameter: Timepoint (hr) Value: 2
  misc_feature: MA Experiment 20001458 PARAMETER Experiment Name: At_50mM_NH4NO3_L-to-H_P Parameter: Tissue Value: Siliques
  misc_feature: MA Experiment 20001458 PARAMETER Experiment Name: At_50mM_NH4NO3_L-to-H_P Parameter: Treatment Value: 50mM NH4NO3 vs. 100mM Manitol
  misc_feature: MA Experiment ID: 20001557 Result: Down-regulated in Transcription
  misc_feature: MA Experiment 20001557 PARAMETER Experiment Name: At_Drought_Soil_Dry_P Parameter: Age (day) Value: 27
  misc_feature: MA Experiment 20001557 PARAMETER Experiment Name: At_Drought_Soil_Dry_P Parameter: Organism Value: A. thaliana
  misc_feature: MA Experiment 20001557 PARAMETER Experiment Name: At_Drought_Soil_Dry_P Parameter: Plant Line Value: WS
  misc_feature: MA Experiment 20001557 PARAMETER Experiment Name: At_Drought_Soil_Dry_P Parameter: Post Timepoint (hr) Value: 3
  misc_feature: MA Experiment 20001557 PARAMETER Experiment Name: At_Drought_Soil_Dry_P Parameter: Post-Treatment Value: Re-Water vs. No Drought
  misc_feature: MA Experiment 20001557 PARAMETER Experiment Name: At_Drought_Soil_Dry_P Parameter: Timepoint (day) Value: 13
  misc_feature: MA Experiment 20001557 PARAMETER Experiment Name: At_Drought_Soil_Dry_P Parameter: Treatment Value: Drought vs. No Drought
  misc_feature: MA Experiment ID: 20001757 Result: Up-regulated in Transcription
  misc_feature: MA Experiment 20001757 PARAMETER Experiment Name: At_50mM_NH4NO3_L-to-H_P Parameter: Timepoint (hr) Value: 6
  misc_feature: MA Experiment 20001757 PARAMETER Experiment Name: At_50mM_NH4NO3_L-to-H_P Parameter: Tissue Value: Leaf
  misc_feature: MA Experiment 20001757 PARAMETER Experiment Name: At_50mM_NH4NO3_L-to-H_P Parameter: Treatment Value: 50mM NH4NO3 vs 100mM Mannitol
  misc_feature: MA Experiment ID: 20001904 Result: Down-regulated in Transcription
  misc_feature: MA Experiment 20001904 PARAMETER Experiment Name: At_Drought_Reproduction_P Parameter: Age (day) Value: 37
  misc_feature: MA Experiment 20001904 PARAMETER Experiment Name: At_Drought_Reproduction_P Parameter: Organism Value: A. thaliana
  misc_feature: MA Experiment 20001904 PARAMETER Experiment Name: At_Drought_Reproduction_P Parameter: Plant Line Value: WS
  misc_feature: MA Experiment 20001904 PARAMETER Experiment Name: At_Drought_Reproduction_P Parameter: Timepoint (day) Value: 7
  misc_feature: MA Experiment 20001904 PARAMETER Experiment Name: At_Drought_Reproduction_P Parameter: Tissue Value: Rosettes
  misc_feature: MA Experiment 20001904 PARAMETER Experiment Name: At_Drought_Reproduction_P Parameter: Treatment Value: Drought vs. No Drought
  misc_feature: MA Experiment ID: 20001906 Result: Down-regulated in Transcription
  misc_feature: MA Experiment 20001906 PARAMETER Experiment Name: At_Drought_Reproduction_P Parameter: Age (day) Value: 35
  misc_feature: MA Experiment 20001906 PARAMETER Experiment Name: At_Drought_Reproduction_P Parameter: Organism Value: A. thaliana
  misc_feature: MA Experiment 20001906 PARAMETER Experiment Name: At_Drought_Reproduction_P Parameter: Plant Line Value: WS
  misc_feature: MA Experiment 20001906 PARAMETER Experiment Name: At_Drought_Reproduction_P Parameter: Timepoint (day) Value: 5
  misc_feature: MA Experiment 20001906 PARAMETER Experiment Name: At_Drought_Reproduction_P Parameter: Tissue Value: Siliques
  misc_feature: MA Experiment 20001906 PARAMETER Experiment Name: At_Drought_Reproduction_P Parameter: Treatment Value: Drought vs. No Drought
  misc_feature: MA Experiment ID: 20001908 Result: Down-regulated in Transcription
  misc_feature: MA Experiment 20001908 PARAMETER Experiment Name: At_Drought_Reproduction_P Parameter: Age (day) Value: 40
  misc_feature: MA Experiment 20001908 PARAMETER Experiment Name: At_Drought_Reproduction_P Parameter: Organism Value: A. thaliana
  misc_feature: MA Experiment 20001908 PARAMETER Experiment Name: At_Drought_Reproduction_P Parameter: Plant Line Value: WS
  misc_feature: MA Experiment 20001908 PARAMETER Experiment Name: At_Drought_Reproduction_P Parameter: Timepoint (day) Value: 10
  misc_feature: MA Experiment 20001908 PARAMETER Experiment Name: At_Drought_Reproduction_P Parameter: Tissue Value: Siliques
  misc_feature: MA Experiment 20001908 PARAMETER Experiment Name: At_Drought_Reproduction_P Parameter: Treatment Value: Drought vs. No Drought
atggcgattgtttccgtctctaactcttttctcactttcaattctcccaatcagctccgatttagccgaagaagattctctgccatggcttcttcaactactggagtgagagtcgctgaaggagaaggcaatttgccaaaacttgtccttacttctcctcagaacagcgaggctgagatatatctcttcggaggctgcattacttcttggaaagttgcgagcggtaaagatcttctttttgtcagaccagatgctgtcttcaataagattaagcccattagcggagggattccacattgttttccacagtttggacctgggctaattcaacagcatgggtttggaaggaacatggactggtctgttgtcgattcccagaatgcagatgacaatgctgctgttactcttgagcttaaggatggtccctatagtcgagccatgtgggactttgctttccaggctctatacaaggtcattgttggcgcggactccctttccactgagctaaagattacaaacacagacgataaaccattttctttcagcactgcgttgcatacttacttccgtgcttcttctgcgggggcctccgtgagaggtctaaagggttgtaaaactctcaataaggatccagaccctaagaacccaatagagggtaaagaagacagggatgcagtcacttttcctggatttgtggataccgtctatcttgatgctcccaatgaattgcagtttgataatggcttgggtgataaaataatcatcaaaaacacaaattggtcggatgcggtcttgtggaacccgcatactcagatggaggcttgttacagagactttgtgtgcgtggaaaatgcaaagcttggggatgtcaactag

SEQ ID NO: 78222 - protein, 291 aa, Arabidopsis thaliana
  peptide (1)..(291): Ceres Seq. ID no. 12639957
  misc_feature (46)..(290): Pfam Name: Aldose 1-epimerase Pfam Description: Aldose 1-epimerase
  misc_feature (1)..(290): Homolog of NCBI NO: 15240009 NR Description: apospory-associated protein C-like; protein id:
  misc_feature (36)..(288): Homolog of NCBI NO: 6970044 NR Description: apospory-associated protein C; APOC
  misc_feature (36)..(279): Homolog of NCBI NO: 38344152 NR Description: OSJNBa0041A02.19 [Oryza sativa (japonica
  misc_feature (29)..(287): Homolog of NCBI NO: 15242099 NR Description: apospory-associated protein C; protein id:
  misc_feature (45)..(279): Homolog of NCBI NO: 2501555 NR Description: POSSIBLE APOSPORY-ASSOCIATED PROTEIN C
  misc_feature (38)..(279): Homolog of NCBI NO: 40253263 NR Description: putative Aldose 1-epimerase [Oryza sativa
  misc_feature (36)..(287): Homolog of NCBI NO: 19387263 NR Description: putative apospory-associated protein C [Oryza
  misc_feature (36)..(287): Homolog of NCBI NO: 15236591 NR Description: putative protein; protein id: At4g23730.1, by cDNA: 21949. [Arabidopsis thaliana] >gi|7486738|pir||T05605
  misc_feature (40)..(284): Homolog of NCBI NO: 16612258 NR Description: AT3g01590/F4P13_13 [Arabidopsis thaliana]
  misc_feature (40)..(268): Homolog of NCBI NO: 18395868 NR Description: expressed protein; protein id: At3g01590.1, by cDNA: 41354., supported by cDNA: gi_16612257, supported by gi_20258972 [Arabidopsis thaliana]
MAIVSVSNSFLTFNSPNQLRFSRRRFSAMASSTTGVRVAEGEGNLPKLVLTSPQNSEAEIYLFGGCITSWKVASGKDLLFVRPDAVFNKIKPISGGIPHCFPQFGPGLIQQHGFGRNMDWSVVDSQNADDNAAVTLELKDGPYSRAMWDFAFQALYKVIVGADSLSTELKITNTDDKPFSFSTALHTYFRASSAGASVRGLKGCKTLNKDPDPKNPIEGKEDRDAVTFPGFVDTVYLDAPNELQFDNGLGDKIIIKNTNWSDAVLWNPHTQMEACYRDFVCVENAKLGDVN

SEQ ID NO: 78223 - protein, 263 aa, Arabidopsis thaliana
  peptide (1)..(263): Ceres Seq. ID no. 12639958
  misc_feature (18)..(262): Pfam Name: Aldose 1-epimerase Pfam Description: Aldose 1-epimerase
  misc_feature (1)..(262): Homolog of NCBI NO: 15240009 NR Description: apospory-associated protein C-like; protein id:
  misc_feature (8)..(260): Homolog of NCBI NO: 6970044 NR Description: apospory-associated protein C; APOC
  misc_feature (8)..(251): Homolog of NCBI NO: 38344152 NR Description: OSJNBa0041A02.19 [Oryza sativa (japonica
  misc_feature (1)..(259): Homolog of NCBI NO: 15242099 NR Description: apospory-associated protein C; protein id:
  misc_feature (17)..(251): Homolog of NCBI NO: 2501555 NR Description: POSSIBLE APOSPORY-ASSOCIATED PROTEIN C
  misc_feature (10)..(251): Homolog of NCBI NO: 40253263 NR Description: putative Aldose 1-epimerase [Oryza sativa
  misc_feature (8)..(259): Homolog of NCBI NO: 19387263 NR Description: putative apospory-associated protein C [Oryza
  misc_feature (8)..(259): Homolog of NCBI NO: 15236591 NR Description: putative protein; protein id: At4g23730.1, by cDNA: 21949. [Arabidopsis thaliana] >gi|7486738|pir||T05605
  misc_feature (12)..(256): Homolog of NCBI NO: 16612258 NR Description: AT3g01590/F4P13_13 [Arabidopsis thaliana]
  misc_feature (12)..(240): Homolog of NCBI NO: 18395868 NR Description: expressed protein; protein id: At3g01590.1, by cDNA: 41354., supported by cDNA: gi_16612257, supported by gi_20258972 [Arabidopsis thaliana]
MASSTTGVRVAEGEGNLPKLVLTSPQNSEAEIYLFGGCITSWKVASGKDLLFVRPDAVFNKIKPISGGIPHCFPQFGPGLIQQHGFGRNMDWSVVDSQNADDNAAVTLELKDGPYSRAMWDFAFQALYKVIVGADSLSTELKITNTDDKPFSFSTALHTYFRASSAGASVRGLKGCKTLNKDPDPKNPIEGKEDRDAVTFPGFVDTVYLDAPNELQFDNGLGDKIIIKNTNWSDAVLWNPHTQMEACYRDFVCVENAKLGDVN

SEQ ID NO: 78224 - protein, 174 aa, Arabidopsis thaliana
  peptide (1)..(174): Ceres Seq. ID no. 12639959
  misc_feature (1)..(173): Pfam Name: Aldose 1-epimerase Pfam Description: Aldose 1-epimerase
  misc_feature (1)..(173): Homolog of NCBI NO: 15240009 NR Description: apospory-associated protein C-like; protein id:
  misc_feature (1)..(171): Homolog of NCBI NO: 6970044 NR Description: apospory-associated protein C; APOC
  misc_feature (1)..(162): Homolog of NCBI NO: 38344152 NR Description: OSJNBa0041A02.19 [Oryza sativa (japonica
  misc_feature (1)..(170): Homolog of NCBI NO: 15242099 NR Description: apospory-associated protein C; protein id:
  misc_feature (1)..(162): Homolog of NCBI NO: 2501555 NR Description: POSSIBLE APOSPORY-ASSOCIATED PROTEIN C
  misc_feature (1)..(162): Homolog of NCBI NO: 40253263 NR Description: putative Aldose 1-epimerase [Oryza sativa
  misc_feature (1)..(170): Homolog of NCBI NO: 19387263 NR Description: putative apospory-associated protein C [Oryza
  misc_feature (1)..(170): Homolog of NCBI NO: 15236591 NR Description: putative protein; protein id: At4g23730.1, by cDNA: 21949. [Arabidopsis thaliana] >gi|7486738|pir||T05605
  misc_feature (1)..(167): Homolog of NCBI NO: 16612258 NR Description: AT3g01590/F4P13_13 [Arabidopsis thaliana]
  misc_feature (1)..(151): Homolog of NCBI NO: 18395868 NR Description: expressed protein; protein id: At3g01590.1, by cDNA: 41354., supported by cDNA: gi_16612257, supported by gi_20258972 [Arabidopsis thaliana]
MDWSVVDSQNADDNAAVTLELKDGPYSRAMWDFAFQALYKVIVGADSLSTELKITNTDDKPFSFSTALHTYFRASSAGASVRGLKGCKTLNKDPDPKNPIEGKEDRDAVTFPGFVDTVYLDAPNELQFDNGLGDKIIIKNTNWSDAVLWNPHTQMEACYRDFVCVENAKLGDVN

SEQ ID NO: 78225 - DNA, 1830 bp, Arabidopsis thaliana
  misc_feature (1)..(1830): Ceres Seq. ID no. 12639968
  misc_feature: MA Experiment ID: 20000185 Result: Up-regulated in Transcription
  misc_feature: MA Experiment 20000185 PARAMETER Experiment Name: At_Roots__P Parameter: Age (day) Value: 7 vs. 21
  misc_feature: MA Experiment 20000185 PARAMETER Experiment Name: At_Roots__P Parameter: Organism Value: A. thaliana
  misc_feature: MA Experiment 20000185 PARAMETER Experiment Name: At_Roots__P Parameter: Tissue Value: Roots vs. Whole Plant
  misc_feature: MA Experiment ID: 20000227 Result: Up-regulated in Transcription
  misc_feature: MA Experiment 20000227 PARAMETER Experiment Name: At_Root-Tips-vs-Tops_P Parameter: Tissue Value: Root Tips vs. Root Tops
  misc_feature: MA Experiment ID: 20000234 Result: Up-regulated in Transcription
  misc_feature: MA Experiment 20000234 PARAMETER Experiment Name: At_Siliques_P Parameter: Age (day) Value: 21
  misc_feature: MA Experiment 20000234 PARAMETER Experiment Name: At_Siliques_P Parameter: Organism Value: A. thaliana
  misc_feature: MA Experiment 20000234 PARAMETER Experiment Name: At_Siliques_P Parameter: Plant Line Value: WS
  misc_feature: MA Experiment 20000234 PARAMETER Experiment Name: At_Siliques_P Parameter: Tissue Value: Less Than 5mm Siliques vs. Whole Plant
  misc_feature: MA Experiment ID: 20000235 Result: Up-regulated in Transcription
  misc_feature: MA Experiment 20000235 PARAMETER Experiment Name: At_Siliques_P Parameter: Age (day) Value: 21
  misc_feature: MA Experiment 20000235 PARAMETER Experiment Name: At_Siliques_P Parameter: Organism Value: A. thaliana
  misc_feature: MA Experiment 20000235 PARAMETER Experiment Name: At_Siliques_P Parameter: Plant Line Value: WS
  misc_feature: MA Experiment 20000235 PARAMETER Experiment Name: At_Siliques_P Parameter: Tissue Value: 5-10mm Siliques vs. Whole Plant
  misc_feature: MA Experiment ID: 20000264 Result: Up-regulated in Transcription
  misc_feature: MA Experiment 20000264 PARAMETER Experiment Name: At_Open_Flower_P Parameter: Age (day) Value: 21
  misc_feature: MA Experiment 20000264 PARAMETER Experiment Name: At_Open_Flower_P Parameter: Plant Line Value: WS
  misc_feature: MA Experiment 20000264 PARAMETER Experiment Name: At_Open_Flower_P Parameter: Tissue Value: Open Flower vs. Whole Plant
  misc_feature: MA Experiment ID: 20000265 Result: Up-regulated in Transcription
  misc_feature: MA Experiment 20000265 PARAMETER Experiment Name: At_Open_Flower_P Parameter: Age (day) Value: 21
  misc_feature: MA Experiment 20000265 PARAMETER Experiment Name: At_Open_Flower_P Parameter: Plant Line Value: WS
  misc_feature: MA Experiment 20000265 PARAMETER Experiment Name: At_Open_Flower_P Parameter: Tissue Value: Closed Flower vs. Whole Plant
  misc_feature: MA Experiment ID: 20000286 Result: Up-regulated in Transcription
  misc_feature: MA Experiment 20000286 PARAMETER Experiment Name: At_Open_Flower_P Parameter: Age (day) Value: 21
  misc_feature: MA Experiment 20000286 PARAMETER Experiment Name: At_Open_Flower_P Parameter: Plant Line Value: WS
  misc_feature: MA Experiment 20000286 PARAMETER Experiment Name: At_Open_Flower_P Parameter: Tissue Value: Half Open vs. Whole Plant
  misc_feature: MA Experiment ID: 20000439 Result: Up-regulated in Transcription
  misc_feature: MA Experiment 20000439 PARAMETER Experiment Name: At_Roots__P Parameter: Age (day) Value: 14 vs. 21
  misc_feature: MA Experiment 20000439 PARAMETER Experiment Name: At_Roots__P Parameter: Organism Value: A. thaliana
  misc_feature: MA Experiment 20000439 PARAMETER Experiment Name: At_Roots__P Parameter: Tissue Value: Roots vs. Whole Plant
  misc_feature: MA Experiment ID: 20001556 Result: Up-regulated in Transcription
  misc_feature: MA Experiment 20001556 PARAMETER Experiment Name: At_Drought_Soil_Dry_P Parameter: Age (day) Value: 26
  misc_feature: MA Experiment 20001556 PARAMETER Experiment Name: At_Drought_Soil_Dry_P Parameter: Organism Value: A. thaliana
  misc_feature: MA Experiment 20001556 PARAMETER Experiment Name: At_Drought_Soil_Dry_P Parameter: Plant Line Value: WS
  misc_feature: MA Experiment 20001556 PARAMETER Experiment Name: At_Drought_Soil_Dry_P Parameter: Post Timepoint (hr) Value: None
  misc_feature: MA Experiment 20001556 PARAMETER Experiment Name: At_Drought_Soil_Dry_P Parameter: Post-Treatment Value: None
  misc_feature: MA Experiment 20001556 PARAMETER Experiment Name: At_Drought_Soil_Dry_P Parameter: Timepoint (day) Value: 12
  misc_feature: MA Experiment 20001556 PARAMETER Experiment Name: At_Drought_Soil_Dry_P Parameter: Treatment Value: Drought vs. No Drought
atgggatttggagtaggtggtggaggtggtagaatgttggatttgaggattgtccaaaatcacaagcgttcaaagagtgccagctttccagaaaagaaaagagttgaaggagataaaacctcaaatagttctcatgaagcctctcaacgaatgaagctggacatgggacgttcaaatgaatcaaagcataatcaatatcattcaaacacggagacttcattgaagcaagagattactcacctcgagacaagattacaagatcagtttaaggttcgttgtgcattagagaaagccttaggttatcgaacagcatcttcttacgtactgactgaaacaaacgacattgccatgcctaagccagctactgatttaatcaaagacgttgcggtgctcgaaatggaagttatacatttggaacagtatcttctttcattatacagaaaagcctttgagcagcaaatctcttctgtatctccaaatttagagaacaagaagccaaaatctcctcctgttacaacccctagaaggcgtctagacttttctgaagatgatgataccccctcgaaaacagatcaacacacagttcctctgcttgatgataatcaaaatcaatcaaagaaaacagagattgctgcggttgaccgagaccagatggaccccagttttcgccgtagtcactctcaacgttcggcatttgggagtagaaaagcttctcccgaagattcttggggtaaagccagccgctcttgtcactcacagccactgtatgtgcagaatggagataacctaatcagtctagctgaacatcttggcacccgaatctcggatcatgttccagaaacacccaacaagttatctgaaggaatggtcaagtgcatgtcagaaatatactgcaagcttgcagagccaccttctgtgctacatcgtgggctttcatctccaaactcgtctttatcatcaagtgcattttcgccctctgaccaatacgatacatcgagccctggattcggaaacagctcctcttttgatgttcggctagataactctttccatgtagaaggagaaaaggacttcagtggaccttacagcagcattgttgaagtgctttgcatttacagagacgccaaaaaggccagtgaggtggaagatcttctgcaaaacttcaaattggaggaagtcgatccaaggaagttgaaacatgaagagaagctagcgttttggataaatgtgcacaatgcacttgtgatgcatgcgtttttagcttatgggattccacagaacaatgtgaagagagtcttacttctactcaaggctgcatataacattggtggacacacaattagcgccgaagcgatacaaagttcgattcttgggtgcaaaatgtctcatcctggacagtggcttagactactatttgcttcgaggaaattcaaagcaggggatgaaagattagcttatgcaatcgatcatcctgagcctctcctgcattttgcacttacttcaggcagccactccgatcccgcggttcgtgtatatacaccgaaaagaatccagcaagagcttgaaacgtcgaaagaagagtacataagaatgaacttaagcatacgcaagcagagaatcctattgccaaagcttgtggagacgtttgcaaaagactccggtttatgtccggcgggtttgacagagatggttaaccggagtataccggagtcttcaaggaaatgtgtaaagagatgtcaatctagtactagtaaaccacgaaagacaattgattggatccctcacagctttacatttagatatcttattcttagagaagctgccaaatga

SEQ ID NO: 78226 - protein, 609 aa, Arabidopsis thaliana
  peptide (1)..(609): Ceres Seq. ID no. 12639969
  misc_feature (389)..(529): Pfam Name: Protein of unknown function, DUF547 Pfam Description: Protein of unknown function, DUF547
  misc_feature (213)..(609): Homolog of NCBI NO: 15224054 NR Description: unknown protein; protein id: At2g23700.1 thaliana] >gi|20197175|gb|AAC17092.2| unknown protein thaliana] >gi|26451207|dbj|BAC42707.1| unknown protein
  misc_feature (19)..(186): Homolog of NCBI NO: 15224054 NR Description: unknown protein; protein id: At2g23700.1 thaliana] >gi|20197175|gb|AAC17092.2| unknown protein thaliana] >gi|26451207|dbj|BAC42707.1| unknown protein
  misc_feature (213)..(609): Homolog of NCBI NO: 39104579 NR Description: unknown protein [Arabidopsis thaliana]
  misc_feature (19)..(186): Homolog of NCBI NO: 39104579 NR Description: unknown protein [Arabidopsis thaliana]
  misc_feature (213)..(609): Homolog of NCBI NO: 7486263 NR Description: hypothetical protein At2g23700 [imported] -
  misc_feature (19)..(186): Homolog of NCBI NO: 7486263 NR Description: hypothetical protein At2g23700 [imported] -
  misc_feature (227)..(608): Homolog of NCBI NO: 40539066 NR Description: hypothetical protein [Oryza sativa (japonica
  misc_feature (19)..(171): Homolog of NCBI NO: 40539066 NR Description: hypothetical protein [Oryza sativa (japonica
  misc_feature (60)..(609): Homolog of NCBI NO: 28916180 NR Description: putative ternary complex factor MIP1 [Antirrhinum
  misc_feature (341)..(603): Homolog of NCBI NO: 9294699 NR Description: gb|AAC17092.1~gene_id:MCB22.7~similar to unknown
MGFGVGGGGGRMLDLRIVQNHKRSKSASFPEKKRVEGDKTSNSSHEASQRMKLDMGRSNESKHNQYHSNTETSLKQEITHLETRLQDQFKVRCALEKALGYRTASSYVLTETNDIAMPKPATDLIKDVAVLEMEVIHLEQYLLSLYRKAFEQQISSVSPNLENKKPKSPPVTTPRRRLDFSEDDDTPSKTDQHTVPLLDDNQNQSKKTEIAAVDRDQMDPSFRRSHSQRSAFGSRKASPEDSWGKASRSCHSQPLYVQNGDNLISLAEHLGTRISDHVPETPNKLSEGMVKCMSEIYCKLAEPPSVLHRGLSSPNSSLSSSAFSPSDQYDTSSPGFGNSSSFDVRLDNSFHVEGEKDFSGPYSSIVEVLCIYRDAKKASEVEDLLQNFKLEEVDPRKLKHEEKLAFWINVHNALVMHAFLAYGIPQNNVKRVLLLLKAAYNIGGHTISAEAIQSSILGCKMSHPGQWLRLLFASRKFKAGDERLAYAIDHPEPLLHFALTSGSHSDPAVRVYTPKRIQQELETSKEEYIRMNLSIRKQRILLPKLVETFAKDSGLCPAGLTEMVNRSIPESSRKCVKRCQSSTSKPRKTIDWIPHSFTFRYLILREAAK

SEQ ID NO: 78227 - protein, 598 aa, Arabidopsis thaliana
  peptide (1)..(598): Ceres Seq. ID no. 12639970
  misc_feature (378)..(518): Pfam Name: Protein of unknown function, DUF547 Pfam Description: Protein of unknown function, DUF547
  misc_feature (202)..(598): Homolog of NCBI NO: 15224054 NR Description: unknown protein; protein id: At2g23700.1 thaliana] >gi|20197175|gb|AAC17092.2| unknown protein thaliana] >gi|26451207|dbj|BAC42707.1| unknown protein
  misc_feature (8)..(175): Homolog of NCBI NO: 15224054 NR Description: unknown protein; protein id: At2g23700.1 thaliana] >gi|20197175|gb|AAC17092.2| unknown protein thaliana] >gi|26451207|dbj|BAC42707.1| unknown protein
  misc_feature (202)..(598): Homolog of NCBI NO: 39104579 NR Description: unknown protein [Arabidopsis thaliana]
  misc_feature (8)..(175): Homolog of NCBI NO: 39104579 NR Description: unknown protein [Arabidopsis thaliana]
  misc_feature (202)..(598): Homolog of NCBI NO: 7486263 NR Description: hypothetical protein At2g23700 [imported] -
  misc_feature (8)..(175): Homolog of NCBI NO: 7486263 NR Description: hypothetical protein At2g23700 [imported] -
  misc_feature (216)..(597): Homolog of NCBI NO: 40539066 NR Description: hypothetical protein [Oryza sativa (japonica
  misc_feature (8)..(160): Homolog of NCBI NO: 40539066 NR Description: hypothetical protein [Oryza sativa (japonica
  misc_feature (49)..(598): Homolog of NCBI NO: 28916180 NR Description: putative ternary complex factor MIP1 [Antirrhinum
  misc_feature (330)..(592): Homolog of NCBI NO: 9294699 NR Description: gb|AAC17092.1~gene_id:MCB22.7~similar to unknown
MLDLRIVQNHKRSKSASFPEKKRVEGDKTSNSSHEASQRMKLDMGRSNESKHNQYHSNTETSLKQEITHLETRLQDQFKVRCALEKALGYRTASSYVLTETNDIAMPKPATDLIKDVAVLEMEVIHLEQYLLSLYRKAFEQQISSVSPNLENKKPKSPPVTTPRRRLDFSEDDDTPSKTDQHTVPLLDDNQNQSKKTEIAAVDRDQMDPSFRRSHSQRSAFGSRKASPEDSWGKASRSCHSQPLYVQNGDNLISLAEHLGTRISDHVPETPNKLSEGMVKCMSEIYCKLAEPPSVLHRGLSSPNSSLSSSAFSPSDQYDTSSPGFGNSSSFDVRLDNSFHVEGEKDFSGPYSSIVEVLCIYRDAKKASEVEDLLQNFKLEEVDPRKLKHEEKLAFWINVHNALVMHAFLAYGIPQNNVKRVLLLLKAAYNIGGHTISAEAIQSSILGCKMSHPGQWLRLLFASRKFKAGDERLAYAIDHPEPLLHFALTSGSHSDPAVRVYTPKRIQQELETSKEEYIRMNLSIRKQRILLPKLVETFAKDSGLCPAGLTEMVNRSIPESSRKCVKRCQSSTSKPRKTIDWIPHSFTFRYLILREAAK

SEQ ID NO: 78228 - protein, 559 aa, Arabidopsis thaliana
  peptide (1)..(559): Ceres Seq. ID no. 12639971
  misc_feature (339)..(479): Pfam Name: Protein of unknown function, DUF547 Pfam Description: Protein of unknown function, DUF547
  misc_feature (163)..(559): Homolog of NCBI NO: 15224054 NR Description: unknown protein; protein id: At2g23700.1 thaliana] >gi|20197175|gb|AAC17092.2| unknown protein thaliana] >gi|26451207|dbj|BAC42707.1| unknown protein
  misc_feature (1)..(136): Homolog of NCBI NO: 15224054 NR Description: unknown protein; protein id: At2g23700.1 thaliana] >gi|20197175|gb|AAC17092.2| unknown protein thaliana] >gi|26451207|dbj|BAC42707.1| unknown protein
  misc_feature (163)..(559): Homolog of NCBI NO: 39104579 NR Description: unknown protein [Arabidopsis thaliana]
  misc_feature (1)..(136): Homolog of NCBI NO: 39104579 NR Description: unknown protein [Arabidopsis thaliana]
  misc_feature (163)..(559): Homolog of NCBI NO: 7486263 NR Description: hypothetical protein At2g23700 [imported] -
  misc_feature (1)..(136): Homolog of NCBI NO: 7486263 NR Description: hypothetical protein At2g23700 [imported] -
  misc_feature (177)..(558): Homolog of NCBI NO: 40539066 NR Description: hypothetical protein [Oryza sativa (japonica
  misc_feature (1)..(121): Homolog of NCBI NO: 40539066 NR Description: hypothetical protein [Oryza sativa (japonica
  misc_feature (10)..(559): Homolog of NCBI NO: 28916180 NR Description: putative ternary complex factor MIP1 [Antirrhinum
  misc_feature (291)..(553): Homolog of NCBI NO: 9294699 NR Description: gb|AAC17092.1~gene_id:MCB22.7~similar to unknown
MKLDMGRSNESKHNQYHSNTETSLKQEITHLETRLQDQFKVRCALEKALGYRTASSYVLTETNDIAMPKPATDLIKDVAVLEMEVIHLEQYLLSLYRKAFEQQISSVSPNLENKKPKSPPVTTPRRRLDFSEDDDTPSKTDQHTVPLLDDNQNQSKKTEIAAVDRDQMDPSFRRSHSQRSAFGSRKASPEDSWGKASRSCHSQPLYVQNGDNLISLAEHLGTRISDHVPETPNKLSEGMVKCMSEIYCKLAEPPSVLHRGLSSPNSSLSSSAFSPSDQYDTSSPGFGNSSSFDVRLDNSFHVEGEKDFSGPYSSIVEVLCIYRDAKKASEVEDLLQNFKLEEVDPRKLKHEEKLAFWINVHNALVMHAFLAYGIPQNNVKRVLLLLKAAYNIGGHTISAEAIQSSILGCKMSHPGQWLRLLFASRKFKAGDERLAYAIDHPEPLLHFALTSGSHSDPAVRVYTPKRIQQELETSKEEYIRMNLSIRKQRILLPKLVETFAKDSGLCPAGLTEMVNRSIPESSRKCVKRCQSSTSKPRKTIDWIPHSFTFRYLILREAAK

SEQ ID NO: 78229 - DNA, 1200 bp, Arabidopsis thaliana
  misc_feature (1)..(1200): Ceres Seq. ID no. 12639996
  misc_feature: MA Experiment ID: 20000227 Result: Up-regulated in Transcription
  misc_feature: MA Experiment 20000227 PARAMETER Experiment Name: At_Root-Tips-vs-Tops_P Parameter: Tissue Value: Root Tips vs. Root Tops
  misc_feature: MA Experiment ID: 20001558 Result: Up-regulated in Transcription
  misc_feature: MA Experiment 20001558 PARAMETER Experiment Name: At_Drought_Soil_Dry_P Parameter: Age (day) Value: 27
  misc_feature: MA Experiment 20001558 PARAMETER Experiment Name: At_Drought_Soil_Dry_P Parameter: Organism Value: A. thaliana
  misc_feature: MA Experiment 20001558 PARAMETER Experiment Name: At_Drought_Soil_Dry_P Parameter: Plant Line Value: WS
  misc_feature: MA Experiment 20001558 PARAMETER Experiment Name: At_Drought_Soil_Dry_P Parameter: Post Timepoint (hr) Value: 6
  misc_feature: MA Experiment 20001558 PARAMETER Experiment Name: At_Drought_Soil_Dry_P Parameter: Post-Treatment Value: Re-Water vs. No Drought
  misc_feature: MA Experiment 20001558 PARAMETER Experiment Name: At_Drought_Soil_Dry_P Parameter: Timepoint (day) Value: 13
  misc_feature: MA Experiment 20001558 PARAMETER Experiment Name: At_Drought_Soil_Dry_P Parameter: Treatment Value: Drought vs. No Drought
atgtataaccttagtaggatcatttatcgtttctcctcggtttcacttaaccctagcacgagagcatctgggtttctacttgagaacgcttcatcaaaaatcttacaatctgctacgaatcgagcattttctgcaaaatcaggatctgatggagttggaggcgatgataacggctggaatatttcaacaggaggatcatttggtggtacaggatctgctgatcttgattgggacaataaatctatgtggtctactggtttaactaaggagcatttcgatggtgtctccgttggtcgtcagaagaacgcggcgaatccttcttctgataacaccccttctgattcgggtgatgtaatgagcaaattgggtccaaaggaggtagctttggttaatgaaatgaatgagtatgatgatttgcttaaagagattgagcaagataataggcaaggcagggcttttgttgatgggattaaacagagaatgatggagatcagtgtgttgttgaagcaagttaaagagccaggtgctagagggtcttatcttaaggactctgagaagactgagatgtatagattgcacaaagagaatcctgaggtgtatactattgagaggcttgctaaggattataggattatgaggcagcgtgttcacgccattctttttcttaaagaagatgaagaagaagaggagaggaagcttggtcgtcctttggatgattctgttgaccgtttgcttgatgagtaccctgagttcttcatttcgcatgaccgggaatttcatgtggcctcacttaattacaaacccgacttcaaggtcatgccagaaggatgggatggtacaatcaaagatatggatgaagtccattatgagatctcaaagaaagaggatgacatgctttacgaagaatttgtccgaaggtttgagttcaacaaaatgaaatggagaggagaagtgatgtgccacaagtacagcaggagacgttcatcagagggatggaaaatcacggttgagaaattgggtgctaagggcaaacgtggagccggaggtggctggaagtttatgagtcttccagatggatcaagccgaccactcaacgaaatggagaaggtctatgttaagcgtgaaaccccactacgtcgccgatgggaatgttatgtctcctgtgggttcttgtttgattctgattttgcttctgtttga

SEQ ID NO: 78230 - protein, 399 aa, Arabidopsis thaliana
  peptide (1)..(399): Ceres Seq. ID no. 12639997
  misc_feature (1)..(381): Homolog of NCBI NO: 8809640 NR Description: gb|AAC32909.1~gene_id:MMI9.10~similar to unknown
  misc_feature (1)..(372): Homolog of NCBI NO: 15241764 NR Description: putative protein; protein id: At5g62270.1
  misc_feature (69)..(381): Homolog of NCBI NO: 34908962 NR Description: P0003D09.18 [Oryza sativa (japonica
  misc_feature (143)..(366): Homolog of NCBI NO: 15227059 NR Description: predicted by genscan; protein id: At2g02880.1
  misc_feature (206)..(379): Homolog of NCBI NO: 18071389 NR Description: putative mucin [Oryza sativa]
MYNLSRIIYRFSSVSLNPSTRASGFLLENASSKILQSATNRAFSAKSGSDGVGGDDNGWNISTGGSFGGTGSADLDWDNKSMWSTGLTKEHFDGVSVGRQKNAANPSSDNTPSDSGDVMSKLGPKEVALVNEMNEYDDLLKEIEQDNRQGRAFVDGIKQRMMEISVLLKQVKEPGARGSYLKDSEKTEMYRLHKENPEVYTIERLAKDYRIMRQRVHAILFLKEDEEEEERKLGRPLDDSVDRLLDEYPEFFISHDREFHVASLNYKPDFKVMPEGWDGTIKDMDEVHYEISKKEDDMLYEEFVRRFEFNKMKWRGEVMCHKYSRRRSSEGWKITVEKLGAKGKRGAGGGWKFMSLPDGSSRPLNEMEKVYVKRETPLRRRWECYVSCGFLFDSDFASV

SEQ ID NO: 78231 - protein, 318 aa, Arabidopsis thaliana
  peptide (1)..(318): Ceres Seq. ID no. 12639998
  misc_feature (1)..(300): Homolog of NCBI NO: 8809640 NR Description: gb|AAC32909.1~gene_id:MMI9.10~similar to unknown
  misc_feature (1)..(291): Homolog of NCBI NO: 15241764 NR Description: putative protein; protein id: At5g62270.1
  misc_feature (1)..(300): Homolog of NCBI NO: 34908962 NR Description: P0003D09.18 [Oryza sativa (japonica
  misc_feature (62)..(285): Homolog of NCBI NO: 15227059 NR Description: predicted by genscan; protein id: At2g02880.1
  misc_feature (125)..(298): Homolog of NCBI NO: 18071389 NR Description: putative mucin [Oryza sativa]
MWSTGLTKEHFDGVSVGRQKNAANPSSDNTPSDSGDVMSKLGPKEVALVNEMNEYDDLLKEIEQDNRQGRAFVDGIKQRMMEISVLLKQVKEPGARGSYLKDSEKTEMYRLHKENPEVYTIERLAKDYRIMRQRVHAILFLKEDEEEEERKLGRPLDDSVDRLLDEYPEFFISHDREFHVASLNYKPDFKVMPEGWDGTIKDMDEVHYEISKKEDDMLYEEFVRRFEFNKMKWRGEVMCHKYSRRRSSEGWKITVEKLGAKGKRGAGGGWKFMSLPDGSSRPLNEMEKVYVKRETPLRRRWECYVSCGFLFDSDFASV

SEQ ID NO: 78232 - protein, 281 aa, Arabidopsis thaliana
  peptide (1)..(281): Ceres Seq. ID no. 12639999
  misc_feature (1)..(263): Homolog of NCBI NO: 8809640 NR Description: gb|AAC32909.1~gene_id:MMI9.10~similar to unknown
  misc_feature (1)..(254): Homolog of NCBI NO: 15241764 NR Description: putative protein; protein id: At5g62270.1
  misc_feature (1)..(263): Homolog of NCBI NO: 34908962 NR Description: P0003D09.18 [Oryza sativa (japonica
  misc_feature (25)..(248): Homolog of NCBI NO: 15227059 NR Description: predicted by genscan; protein id: At2g02880.1
  misc_feature (88)..(261): Homolog of NCBI NO: 18071389 NR Description: putative mucin [Oryza sativa]
MSKLGPKEVALVNEMNEYDDLLKEIEQDNRQGRAFVDGIKQRMMEISVLLKQVKEPGARGSYLKDSEKTEMYRLHKENPEVYTIERLAKDYRIMRQRVHAILFLKEDEEEEERKLGRPLDDSVDRLLDEYPEFFISHDREFHVASLNYKPDFKVMPEGWDGTIKDMDEVHYEISKKEDDMLYEEFVRRFEFNKMKWRGEVMCHKYSRRRSSEGWKITVEKLGAKGKRGAGGGWKFMSLPDGSSRPLNEMEKVYVKRETPLRRRWECYVSCGFLFDSDFASV

SEQ ID NO: 78233 - DNA, 609 bp, Arabidopsis thaliana
  misc_feature (1)..(609): Ceres Seq. ID no. 12640004
  misc_feature: MA Experiment ID: 20000169 Result: Down-regulated in Transcription
  misc_feature: MA Experiment 20000169 PARAMETER Experiment Name: At_100uM_ABA_P Parameter: Age (day) Value: 14
  misc_feature: MA Experiment 20000169 PARAMETER Experiment Name: At_100uM_ABA_P Parameter: Organism Value: A. thaliana
  misc_feature: MA Experiment 20000169 PARAMETER Experiment Name: At_100uM_ABA_P Parameter: Plant Line Value: WS
  misc_feature: MA Experiment 20000169 PARAMETER Experiment Name: At_100uM_ABA_P Parameter: Timepoint (hr) Value: 6
  misc_feature: MA Experiment 20000169 PARAMETER Experiment Name: At_100uM_ABA_P Parameter: Tissue Value: Aerial
  misc_feature: MA Experiment 20000169 PARAMETER Experiment Name: At_100uM_ABA_P Parameter: Treatment Value: 100uM ABA vs. No Treatment
  misc_feature: MA Experiment ID: 20000171 Result: Down-regulated in Transcription
  misc_feature: MA Experiment 20000171 PARAMETER Experiment Name: At_42deg_Heat_P Parameter: Age (day) Value: 14
  misc_feature: MA Experiment 20000171 PARAMETER Experiment Name: At_42deg_Heat_P Parameter: Organism Value: A. thaliana
  misc_feature: MA Experiment 20000171 PARAMETER Experiment Name: At_42deg_Heat_P Parameter: Plant Line Value: WS
  misc_feature: MA Experiment 20000171 PARAMETER Experiment Name: At_42deg_Heat_P Parameter: Temperature (deg C) Value: 42 vs. 22
  misc_feature: MA Experiment 20000171 PARAMETER Experiment Name: At_42deg_Heat_P Parameter: Timepoint (hr) Value: 1
  misc_feature: MA Experiment 20000171 PARAMETER Experiment Name: At_42deg_Heat_P Parameter: Tissue Value: Aerial
  misc_feature: MA Experiment ID: 20000179 Result: Down-regulated in Transcription
  misc_feature: MA Experiment 20000179 PARAMETER Experiment Name: At_Germinating_Seeds_P Parameter: Age (hr) Value: 6 vs. 0
  misc_feature: MA Experiment 20000179 PARAMETER Experiment Name: At_Germinating_Seeds_P Parameter: Tissue Value: Germinating Seeds
  misc_feature: MA Experiment ID: 20000182 Result: Down-regulated in Transcription
  misc_feature: MA Experiment 20000182 PARAMETER Experiment Name: At_2mM_SA_P Parameter: Age (day) Value: 14
  misc_feature: MA Experiment 20000182 PARAMETER Experiment Name: At_2mM_SA_P Parameter: Organism Value: A. thaliana
  misc_feature: MA Experiment 20000182 PARAMETER Experiment Name: At_2mM_SA_P Parameter: Plant Line Value: WS
  misc_feature: MA Experiment 20000182 PARAMETER Experiment Name: At_2mM_SA_P Parameter: Timepoint (hr) Value: 6
  misc_feature: MA Experiment 20000182 PARAMETER Experiment Name: At_2mM_SA_P Parameter: Tissue Value: Aerial
  misc_feature: MA Experiment 20000182 PARAMETER Experiment Name: At_2mM_SA_P Parameter: Treatment Value: 2mM SA vs. No Treatment
  misc_feature: MA Experiment ID: 20000211 Result: Up-regulated in Transcription
  misc_feature: MA Experiment 20000211 PARAMETER Experiment Name: At_0.001percent_MeJA__P Parameter: Age (day) Value: 14
  misc_feature: MA Experiment 20000211 PARAMETER Experiment Name: At_0.001percent_MeJA__P Parameter: Organism Value: A. thaliana
  misc_feature: MA Experiment 20000211 PARAMETER Experiment Name: At_0.001percent_MeJA__P Parameter: Plant Line Value: WS
  misc_feature: MA Experiment 20000211 PARAMETER Experiment Name: At_0.001percent_MeJA__P Parameter: Timepoint (hr) Value: 1
  misc_feature: MA Experiment 20000211 PARAMETER Experiment Name: At_0.001percent_MeJA__P Parameter: Tissue Value: Aerial
  misc_feature: MA Experiment 20000211 PARAMETER Experiment Name: At_0.001percent_MeJA__P Parameter: Treatment Value: 0.001percent MeJA vs. No Treatment
  misc_feature: MA Experiment ID: 20000214 Result: Up-regulated in Transcription
  misc_feature: MA Experiment 20000214 PARAMETER Experiment Name: At_4deg_Cold_P Parameter: Timepoint (hr) Value: 6
  misc_feature: MA Experiment ID: 20000227 Result: Down-regulated in Transcription
  misc_feature: MA Experiment 20000227 PARAMETER Experiment Name: At_Root-Tips-vs-Tops_P Parameter: Tissue Value: Root Tips vs. Root Tops
  misc_feature: MA Experiment ID: 20000437 Result: Down-regulated in Transcription
  misc_feature: MA Experiment 20000437 PARAMETER Experiment Name: At_Drought_P Parameter: Age (day) Value: 8
  misc_feature: MA Experiment 20000437 PARAMETER Experiment Name: At_Drought_P Parameter: Organism Value: A. thaliana
  misc_feature: MA Experiment 20000437 PARAMETER Experiment Name: At_Drought_P Parameter: Plant Line Value: WS
  misc_feature: MA Experiment 20000437 PARAMETER Experiment Name: At_Drought_P Parameter: Timepoint (hr) Value: 24
  misc_feature: MA Experiment 20000437 PARAMETER Experiment Name: At_Drought_P Parameter: Tissue Value: Whole Plant
  misc_feature: MA Experiment 20000437 PARAMETER Experiment Name: At_Drought_P Parameter: Treatment Value: Drought vs. No Drought
  misc_feature: MA Experiment ID: 20001560 Result: Down-regulated in Transcription
  misc_feature: MA Experiment 20001560 PARAMETER Experiment Name: At_Drought_Soil_Dry_P Parameter: Age (day) Value: 28
  misc_feature: MA Experiment 20001560 PARAMETER Experiment Name: At_Drought_Soil_Dry_P Parameter: Organism Value: A. thaliana
  misc_feature: MA Experiment 20001560 PARAMETER Experiment Name: At_Drought_Soil_Dry_P Parameter: Plant Line Value: WS
  misc_feature: MA Experiment 20001560 PARAMETER Experiment Name: At_Drought_Soil_Dry_P Parameter: Post Timepoint (hr) Value: None
  misc_feature: MA Experiment 20001560 PARAMETER Experiment Name: At_Drought_Soil_Dry_P Parameter: Post-Treatment Value: None
  misc_feature: MA Experiment 20001560 PARAMETER Experiment Name: At_Drought_Soil_Dry_P Parameter: Timepoint (day) Value: 14
  misc_feature: MA Experiment 20001560 PARAMETER Experiment Name: At_Drought_Soil_Dry_P Parameter: Treatment Value: Drought vs. No Drought
  misc_feature: MA Experiment ID: 20001757 Result: Up-regulated in Transcription
  misc_feature: MA Experiment 20001757 PARAMETER Experiment Name: At_50mM_NH4NO3_L-to-H_P Parameter: Timepoint (hr) Value: 6
  misc_feature: MA Experiment 20001757 PARAMETER Experiment Name: At_50mM_NH4NO3_L-to-H_P Parameter: Tissue Value: Leaf
  misc_feature: MA Experiment 20001757 PARAMETER Experiment Name: At_50mM_NH4NO3_L-to-H_P Parameter: Treatment Value: 50mM NH4NO3 vs 100mM Mannitol
  misc_feature: MA Experiment ID: 20001904 Result: Down-regulated in Transcription
  misc_feature: MA Experiment 20001904 PARAMETER Experiment Name: At_Drought_Reproduction_P Parameter: Age (day) Value: 37
  misc_feature: MA Experiment 20001904 PARAMETER Experiment Name: At_Drought_Reproduction_P Parameter: Organism Value: A. thaliana
  misc_feature: MA Experiment 20001904 PARAMETER Experiment Name: At_Drought_Reproduction_P Parameter: Plant Line Value: WS
  misc_feature: MA Experiment 20001904 PARAMETER Experiment Name: At_Drought_Reproduction_P Parameter: Timepoint (day) Value: 7
  misc_feature: MA Experiment 20001904 PARAMETER Experiment Name: At_Drought_Reproduction_P Parameter: Tissue Value: Rosettes
  misc_feature: MA Experiment 20001904 PARAMETER Experiment Name: At_Drought_Reproduction_P Parameter: Treatment Value: Drought vs. No Drought
  misc_feature: MA Experiment ID: 20001905 Result: Down-regulated in Transcription
  misc_feature: MA Experiment 20001905 PARAMETER Experiment Name: At_Drought_Reproduction_P Parameter: Age (day) Value: 40
  misc_feature: MA Experiment 20001905 PARAMETER Experiment Name: At_Drought_Reproduction_P Parameter: Organism Value: A. thaliana
  misc_feature: MA Experiment 20001905 PARAMETER Experiment Name: At_Drought_Reproduction_P Parameter: Plant Line Value: WS
  misc_feature: MA Experiment 20001905 PARAMETER Experiment Name: At_Drought_Reproduction_P Parameter: Timepoint (day) Value: 10
  misc_feature: MA Experiment 20001905 PARAMETER Experiment Name: At_Drought_Reproduction_P Parameter: Tissue Value: Rosettes
  misc_feature: MA Experiment 20001905 PARAMETER Experiment Name: At_Drought_Reproduction_P Parameter: Treatment Value: Drought vs. No Drought
  misc_feature: MA Experiment ID: 20001906 Result: Down-regulated in Transcription
  misc_feature: MA Experiment 20001906 PARAMETER Experiment Name: At_Drought_Reproduction_P Parameter: Age (day) Value: 35
  misc_feature: MA Experiment 20001906 PARAMETER Experiment Name: At_Drought_Reproduction_P Parameter: Organism Value: A. thaliana
  misc_feature: MA Experiment 20001906 PARAMETER Experiment Name: At_Drought_Reproduction_P Parameter: Plant Line Value: WS
  misc_feature: MA Experiment 20001906 PARAMETER Experiment Name: At_Drought_Reproduction_P Parameter: Timepoint (day) Value: 5
  misc_feature: MA Experiment 20001906 PARAMETER Experiment Name: At_Drought_Reproduction_P Parameter: Tissue Value: Siliques
  misc_feature: MA Experiment 20001906 PARAMETER Experiment Name: At_Drought_Reproduction_P Parameter: Treatment Value: Drought vs. No Drought
  misc_feature: MA Experiment ID: 20001908 Result: Down-regulated in Transcription
  misc_feature: MA Experiment 20001908 PARAMETER Experiment Name: At_Drought_Reproduction_P Parameter: Age (day) Value: 40
  misc_feature: MA Experiment 20001908 PARAMETER Experiment Name: At_Drought_Reproduction_P Parameter: Organism Value: A. thaliana
  misc_feature: MA Experiment 20001908 PARAMETER Experiment Name: At_Drought_Reproduction_P Parameter: Plant Line Value: WS
  misc_feature: MA Experiment 20001908 PARAMETER Experiment Name: At_Drought_Reproduction_P Parameter: Timepoint (day) Value: 10
  misc_feature: MA Experiment 20001908 PARAMETER Experiment Name: At_Drought_Reproduction_P Parameter: Tissue Value: Siliques
  misc_feature: MA Experiment 20001908 PARAMETER Experiment Name: At_Drought_Reproduction_P Parameter: Treatment Value: Drought vs. No Drought
atggcaaaacaatatctctttgtactcctctcaatctcctatctcttatcactggagctcacggcggccaccgcagcctcacagaccggagcttccaaaaaagccataaacttcatccaatcttcttgcaaaaccaccacataccctgccttatgtgtccactcactctccgtctacgcaaacgacatccaaacaagccctaaacgtttagctgagaccgctatagccgtgacactaagccgagcccaatccacgaagctcttcgtctcgcgtctaacacgtatgaagggtcttaagaagcgcgaggtcgaagccatcaaagattgcgtcgaggagatgaacgataccgttgaccgtttgaccaaatctgttcaagaactgaagttgtgtgggagtgccaaagatcaagaccagtttgcgtaccacatgagtaatgctcagacttggactagtgcggctttgactgacgagaacacttgctccgatgggttctcgggtcgggttatggatgggaggatcaagaactcggttcgggctagaatcatgaacgtgggacatgaaaccagcaacgctttgtccttgattaatgcctttgctaaaacttactaa

SEQ ID NO: 78234 - protein, 202 aa, Arabidopsis thaliana; identical to SEQ ID NO: 21361
  peptide (1)..(202): Ceres Seq. ID no. 12640005
  misc_feature (1)..(202): Homolog of NCBI NO: 15241799 NR Description: ripening-related protein - like; protein id: supported by cDNA: 9669., supported by cDNA: gi_14423453,
  misc_feature (1)..(202): Homolog of NCBI NO: 21618088 NR Description: ripening-related protein-like [Arabidopsis
  misc_feature (50)..(202): Homolog of NCBI NO: 11127599 NR Description: DC 1.2 homolog [Arabidopsis thaliana]
  misc_feature (1)..(202): Homolog of NCBI NO: 15232790 NR Description: putative protein; protein id: At3g47380.1
  misc_feature (1)..(199): Homolog of NCBI NO: 7406663 NR Description: putative ripening-related protein [Vitis vinifera]
  misc_feature (31)..(199): Homolog of NCBI NO: 7488727 NR Description: 21K protein precursor - alfalfa
  misc_feature (1)..(202): Homolog of NCBI NO: 15234982 NR Description: putative protein; protein id: At4g25260.1, by cDNA: gi_16604469, supported by cDNA: gi_18958029 [Arabidopsis
  misc_feature (10)..(199): Homolog of NCBI NO: 112717 NR Description: 21 KD PROTEIN PRECURSOR (1.2 PROTEIN)
  misc_feature (16)..(199): Homolog of NCBI NO: 15234547 NR Description: putative protein; protein id: At4g12390.1, by cDNA: 27615., supported by cDNA: gi_15450853, supported by
  misc_feature (21)..(199): Homolog of NCBI NO: 21555297 NR Description: unknown [Arabidopsis thaliana]

SEQ ID NO: 78235 - protein, 108 aa, Arabidopsis thaliana
  peptide (1)..(108): Ceres Seq. ID no. 12640006
  misc_feature (1)..(108): Homolog of NCBI NO: 15241799 NR Description: ripening-related protein - like; protein id: supported by cDNA: 9669., supported by cDNA: gi_14423453,
  misc_feature (1)..(108): Homolog of NCBI NO: 21618088 NR Description: ripening-related protein-like [Arabidopsis
  misc_feature (1)..(108): Homolog of NCBI NO: 11127599 NR Description: DC 1.2 homolog [Arabidopsis thaliana]
  misc_feature (1)..(108): Homolog of NCBI NO: 15232790 NR Description: putative protein; protein id: At3g47380.1
  misc_feature (1)..(105): Homolog of NCBI NO: 7406663 NR Description: putative ripening-related protein [Vitis vinifera]
  misc_feature (1)..(105): Homolog of NCBI NO: 7488727 NR Description: 21K protein precursor - alfalfa
  misc_feature (1)..(108): Homolog of NCBI NO: 15234982 NR Description: putative protein; protein id: At4g25260.1, by cDNA: gi_16604469, supported by cDNA: gi_18958029 [Arabidopsis
  misc_feature (1)..(105): Homolog of NCBI NO: 112717 NR Description: 21 KD PROTEIN PRECURSOR (1.2 PROTEIN)
  misc_feature (1)..(105): Homolog of NCBI NO: 15234547 NR Description: putative protein; protein id: At4g12390.1, by cDNA: 27615., supported by cDNA: gi_15450853, supported by
  misc_feature (1)..(105): Homolog of NCBI NO: 21555297 NR Description: unknown [Arabidopsis thaliana]
MKGLKKREVEAIKDCVEEMNDTVDRLTKSVQELKLCGSAKDQDQFAYHMSNAQTWTSAALTDENTCSDGFSGRVMDGRIKNSVRARIMNVGHETSNALSLINAFAKTY

SEQ ID NO: 78236 - DNA, 1464 bp, Arabidopsis thaliana
  misc_feature (1)..(1464): Ceres Seq. ID no. 12640026
  misc_feature: MA Experiment ID: 20000180 Result: Up-regulated in Transcription
  misc_feature: MA Experiment 20000180 PARAMETER Experiment Name: At_Germinating_Seeds_P Parameter: Age (hr) Value: 24 vs. 0
  misc_feature: MA Experiment 20000180 PARAMETER Experiment Name: At_Germinating_Seeds_P Parameter: Tissue Value: Germinating Seeds
  misc_feature: MA Experiment ID: 20000437 Result: Down-regulated in Transcription
  misc_feature: MA Experiment 20000437 PARAMETER Experiment Name: At_Drought_P Parameter: Age (day) Value: 8
  misc_feature: MA Experiment 20000437 PARAMETER Experiment Name: At_Drought_P Parameter: Organism Value: A. thaliana
  misc_feature: MA Experiment 20000437 PARAMETER Experiment Name: At_Drought_P Parameter: Plant Line Value: WS
  misc_feature: MA Experiment 20000437 PARAMETER Experiment Name: At_Drought_P Parameter: Timepoint (hr) Value: 24
  misc_feature: MA Experiment 20000437 PARAMETER Experiment Name: At_Drought_P Parameter: Tissue Value: Whole Plant
  misc_feature: MA Experiment 20000437 PARAMETER Experiment Name: At_Drought_P Parameter: Treatment Value: Drought vs. No Drought
  misc_feature: MA Experiment ID: 20001450 Result: Down-regulated in Transcription
  misc_feature: MA Experiment 20001450 PARAMETER Experiment Name: At_Far-red-induction_P Parameter: Age (day) Value: 7
  misc_feature: MA Experiment 20001450 PARAMETER Experiment Name: At_Far-red-induction_P Parameter: Light Value: Far-red vs. White
  misc_feature: MA Experiment 20001450 PARAMETER Experiment Name: At_Far-red-induction_P Parameter: Organism Value: A. thaliana
  misc_feature: MA Experiment 20001450 PARAMETER Experiment Name: At_Far-red-induction_P Parameter: Plant Line Value: Columbia
  misc_feature: MA Experiment 20001450 PARAMETER Experiment Name: At_Far-red-induction_P Parameter: Timepoint (hr) Value: 8
  misc_feature: MA Experiment 20001450 PARAMETER Experiment Name: At_Far-red-induction_P Parameter: Tissue Value: Whole Plant
  misc_feature: MA Experiment ID: 20001555 Result: Down-regulated in Transcription
  misc_feature: MA Experiment 20001555 PARAMETER Experiment Name: At_Drought_Soil_Dry_P Parameter: Age (day) Value: 24
  misc_feature: MA Experiment 20001555 PARAMETER Experiment Name: At_Drought_Soil_Dry_P Parameter: Organism Value: A. thaliana
  misc_feature: MA Experiment 20001555 PARAMETER Experiment Name: At_Drought_Soil_Dry_P Parameter: Plant Line Value: WS
  misc_feature: MA Experiment 20001555 PARAMETER Experiment Name: At_Drought_Soil_Dry_P Parameter: Post Timepoint (hr) Value: None
  misc_feature: MA Experiment 20001555 PARAMETER Experiment Name: At_Drought_Soil_Dry_P Parameter: Post-Treatment Value: None
  misc_feature: MA Experiment 20001555 PARAMETER Experiment Name: At_Drought_Soil_Dry_P Parameter: Timepoint (day) Value: 10
  misc_feature: MA Experiment 20001555 PARAMETER Experiment Name: At_Drought_Soil_Dry_P Parameter: Treatment Value: Drought vs. No Drought
  misc_feature: MA Experiment ID: 20001911 Result: Down-regulated in Transcription
  misc_feature: MA Experiment 20001911 PARAMETER Experiment Name: At_Drought_Reproduction_P Parameter: Age (day) Value: 40
  misc_feature: MA Experiment 20001911 PARAMETER Experiment Name: At_Drought_Reproduction_P Parameter: Organism Value: A. thaliana
  misc_feature: MA Experiment 20001911 PARAMETER Experiment Name: At_Drought_Reproduction_P Parameter: Plant Line Value: WS
  misc_feature: MA Experiment 20001911 PARAMETER Experiment Name: At_Drought_Reproduction_P Parameter: Timepoint (day) Value: 10
  misc_feature: MA Experiment 20001911 PARAMETER Experiment Name: At_Drought_Reproduction_P Parameter: Tissue Value: Flowers
  misc_feature: MA Experiment 20001911 PARAMETER Experiment Name: At_Drought_Reproduction_P Parameter: Treatment Value: Drought vs. No Drought
atggagaaatcaatggagaaaagcgtgagctctgctgcttctggtaattcaataaactcgaagctgaggtatcctctcagatcggctcttagatccaaggaagggaagcctcctgttcctgatttctctgcttcttctatgcccagaagggcacgagttgtatctgctgttagtcagagtacaacagttcttgatttgtctgggaagaagagtgttgatcgaaccaagctaccaccaagaagactttcgattccaaacaagcccacaagcaattcttctgttaaatcagtgagcagcagcgtcacttctctttctgaagtcaagccaaagagatcacgcattgttcctagaagcttcaatgaaacaacaacacctgtctctagtaatctcagatcatcagtgactcgaaagaaagttgaagacttgtcttcctctacttattggctgactcatatcaagctagctgaatccgtggcgaaacattcgatctctctcggtttctttaaacttgctcttcatgcagggtgtgagccacttgacaagatgaaagaagagttgaaattgtatgctcgtcgcaataacatggatgggcttgctgatgctatgaaggaactttcggaactgtacaatatctctgaagaatccaatcaggtgcaggtctcggagactagttctgttgtagctgaagaaacagctatgtctctgaacaacgataatgatgtccagagttcattctccactcctggaaattcgaacatcacatcagagatcacgaaagacgatgctttgcaagattcaaccgtcacaaaaacaactaaggaaaaagatgctttgcaagattcatctgtcacagaaacaactaaggaaaaagatgctttgcaagattcatctgtcacagaaacatctaaggaagaaggtgctttgcaagattcatctgtcacagaaacaactaaggaagaagatgctttgcaagattcatctgtcacagaaacaactaaggaagagcaggcgttggaaactgtaacacaaggaagaactagaaagtctctggaggtaatcaatgtgaaccaagagaatgattcagaggttgttcaggaatccgaagaagggctccgtccatcagcagatggtgttcagatcgtgactgttgttaaaccttcagacaagaaacgtgccagaaaggagactgttcctaagaacaacctgccggtgaggacaaagaaatcactagcaaccaactctgctaattcaaaaacagttcaagtaaacaaggatgataagtctcagaagaagtctgagaggatcactaaacccaggactaagagagttcaagaagagtcaaagaagtcaattaagaaatctactgctaaagaaggtgaagttaaatctctgaagcaaacagagaaaatggagaacaaagaaaacacggttgttgttggtgcaggagaagacatccaggtttaa

SEQ ID NO: 78237 - protein, 487 aa, Arabidopsis thaliana
  peptide (1)..(487): Ceres Seq. ID no. 12640027
  misc_feature (130)..(472): Pfam Name: Caldesmon Pfam Description: Caldesmon
  misc_feature (1)..(487): Homolog of NCBI NO: 15241865 NR Description: unknown protein; protein id: At5g62550.1 thaliana] >gi|10178086|dbj|BAB11505.1| gene_id:K19B1.16~unknown
  misc_feature (204)..(474): Homolog of NCBI NO: 29374744 NR Description: cell wall surface anchor family protein faecalis V583] >gi|29342202|gb|AAO79968.1| cell wall surface
  misc_feature (212)..(477): Homolog of NCBI NO: 29374744 NR Description: cell wall surface anchor family protein faecalis V583] >gi|29342202|gb|AAO79968.1| cell wall surface
  misc_feature (88)..(475): Homolog of NCBI NO: 39593039 NR Description: Hypothetical protein CBG09238 [Caenorhabditis
  misc_feature (4)..(476): Homolog of NCBI NO: 27469167 NR Description: streptococcal hemagglutinin protein epidermidis ATCC 12228] >gi|27316716|gb|AAO05891.1|AE016751_186
  misc_feature (41)..(471): Homolog of NCBI NO: 6164595 NR Description: lacunin [Manduca sexta]
  misc_feature (259)..(476): Homolog of NCBI NO: 28829807 NR Description: similar to Oryza sativa (japonica
  misc_feature (10)..(472): Homolog of NCBI NO: 27469167 NR Description: streptococcal hemagglutinin protein epidermidis ATCC 12228] >gi|27316716|gb|AAO05891.1|AE016751_186
  misc_feature (202)..(475): Homolog of NCBI NO: 39593039 NR Description: Hypothetical protein CBG09238 [Caenorhabditis
  misc_feature (89)..(476): Homolog of NCBI NO: 30681829 NR Description: expressed protein [Arabidopsis thaliana]
MEKSMEKSVSSAASGNSINSKLRYPLRSALRSKEGKPPVPDFSASSMPRRARVVSAVSQSTTVLDLSGKKSVDRTKLPPRRLSIPNKPTSNSSVKSVSSSVTSLSEVKPKRSRIVPRSFNETTTPVSSNLRSSVTRKKVEDLSSSTYWLTHIKLAESVAKHSISLGFFKLALHAGCEPLDKMKEELKLYARRNNMDGLADAMKELSELYNISEESNQVQVSETSSVVAEETAMSLNNDNDVQSSFSTPGNSNITSEITKDDALQDSTVTKTTKEKDALQDSSVTETTKEKDALQDSSVTETSKEEGALQDSSVTETTKEEDALQDSSVTETTKEEQALETVTQGRTRKSLEVINVNQENDSEVVQESEEGLRPSADGVQIVTVVKPSDKKRARKETVPKNNLPVRTKKSLATNSANSKTVQVNKDDKSQKKSERITKPRTKRVQEESKKSIKKSTAKEGEVKSLKQTEKMENKENTVVVGAGEDIQV

SEQ ID NO: 78238 - protein, 483 aa, Arabidopsis thaliana
  peptide (1)..(483): Ceres Seq. ID no. 12640028
  misc_feature (126)..(468): Pfam Name: Caldesmon Pfam Description: Caldesmon
  misc_feature (1)..(483): Homolog of NCBI NO: 15241865 NR Description: unknown protein; protein id: At5g62550.1 thaliana] >gi|10178086|dbj|BAB11505.1| gene_id:K19B1.16~unknown
  misc_feature (200)..(470): Homolog of NCBI NO: 29374744 NR Description: cell wall surface anchor family protein faecalis V583] >gi|29342202|gb|AAO79968.1| cell wall surface
  misc_feature (208)..(473): Homolog of NCBI NO: 29374744 NR Description: cell wall surface anchor family protein faecalis V583] >gi|29342202|gb|AAO79968.1| cell wall surface
  misc_feature (84)..(471): Homolog of NCBI NO: 39593039 NR Description: Hypothetical protein CBG09238 [Caenorhabditis
  misc_feature (1)..(472): Homolog of NCBI NO: 27469167 NR Description: streptococcal hemagglutinin protein epidermidis ATCC 12228] >gi|27316716|gb|AAO05891.1|AE016751_186
  misc_feature (37)..(467): Homolog of NCBI NO: 6164595 NR Description: lacunin [Manduca sexta]
  misc_feature (255)..(472): Homolog of NCBI NO: 28829807 NR Description: similar to Oryza sativa (japonica
  misc_feature (6)..(468): Homolog of NCBI NO: 27469167 NR Description: streptococcal hemagglutinin protein epidermidis ATCC 12228] >gi|27316716|gb|AAO05891.1|AE016751_186
  misc_feature (198)..(471): Homolog of NCBI NO: 39593039 NR Description: Hypothetical protein CBG09238 [Caenorhabditis
  misc_feature (85)..(472): Homolog of NCBI NO: 30681829 NR Description: expressed protein [Arabidopsis thaliana]
MEKSVSSAASGNSINSKLRYPLRSALRSKEGKPPVPDFSASSMPRRARVVSAVSQSTTVLDLSGKKSVDRTKLPPRRLSIPNKPTSNSSVKSVSSSVTSLSEVKPKRSRIVPRSFNETTTPVSSNLRSSVTRKKVEDLSSSTYWLTHIKLAESVAKHSISLGFFKLALHAGCEPLDKMKEELKLYARRNNMDGLADAMKELSELYNISEESNQVQVSETSSVVAEETAMSLNNDNDVQSSFSTPGNSNITSEITKDDALQDSTVTKTTKEKDALQDSSVTETTKEKDALQDSSVTETSKEEGALQDSSVTETTKEEDALQDSSVTETTKEEQALETVTQGRTRKSLEVINVNQENDSEVVQESEEGLRPSADGVQIVTVVKPSDKKRARKETVPKNNLPVRTKKSLATNSANSKTVQVNKDDKSQKKSERITKPRTKRVQEESKKSIKKSTAKEGEVKSLKQTEKMENKENTVVVGAGEDIQV

SEQ ID NO: 78239 - protein, 441 aa, Arabidopsis thaliana
  peptide (1)..(441): Ceres Seq. ID no. 12640029
  misc_feature (84)..(426): Pfam Name: Caldesmon Pfam Description: Caldesmon
  misc_feature (1)..(441): Homolog of NCBI NO: 15241865 NR Description: unknown protein; protein id: At5g62550.1 thaliana] >gi|10178086|dbj|BAB11505.1| gene_id:K19B1.16~unknown
  misc_feature (158)..(428): Homolog of NCBI NO: 29374744 NR Description: cell wall surface anchor family protein faecalis V583] >gi|29342202|gb|AAO79968.1| cell wall surface
  misc_feature (166)..(431): Homolog of NCBI NO: 29374744 NR Description: cell wall surface anchor family protein faecalis V583] >gi|29342202|gb|AAO79968.1| cell wall surface
  misc_feature (42)..(429): Homolog of NCBI NO: 39593039 NR Description: Hypothetical protein CBG09238 [Caenorhabditis
  misc_feature (1)..(430): Homolog of NCBI NO: 27469167 NR Description: streptococcal hemagglutinin protein epidermidis ATCC 12228] >gi|27316716|gb|AAO05891.1|AE016751_186
  misc_feature (1)..(425): Homolog of NCBI NO: 6164595 NR Description: lacunin [Manduca sexta]
  misc_feature (213)..(430): Homolog of NCBI NO: 28829807 NR Description: similar to Oryza sativa (japonica
  misc_feature (1)..(426): Homolog of NCBI NO: 27469167 NR Description: streptococcal hemagglutinin protein epidermidis ATCC 12228] >gi|27316716|gb|AAO05891.1|AE016751_186
  misc_feature (156)..(429): Homolog of NCBI NO: 39593039 NR Description: Hypothetical protein CBG09238 [Caenorhabditis
  misc_feature (43)..(430): Homolog of NCBI NO: 30681829 NR Description: expressed protein [Arabidopsis thaliana]
MPRRARVVSAVSQSTTVLDLSGKKSVDRTKLPPRRLSIPNKPTSNSSVKSVSSSVTSLSEVKPKRSRIVPRSFNETTTPVSSNLRSSVTRKKVEDLSSSTYWLTHIKLAESVAKHSISLGFFKLALHAGCEPLDKMKEELKLYARRNNMDGLADAMKELSELYNISEESNQVQVSETSSVVAEETAMSLNNDNDVQSSFSTPGNSNITSEITKDDALQDSTVTKTTKEKDALQDSSVTETTKEKDALQDSSVTETSKEEGALQDSSVTETTKEEDALQDSSVTETTKEEQALETVTQGRTRKSLEVINVNQENDSEVVQESEEGLRPSADGVQIVTVVKPSDKKRARKETVPKNNLPVRTKKSLATNSANSKTVQVNKDDKSQKKSERITKPRTKRVQEESKKSIKKSTAKEGEVKSLKQTEKMENKENTVVVGAGEDIQV

SEQ ID NO: 78240 - DNA, 1677 bp, Arabidopsis thaliana
  misc_feature (1)..(1677): Ceres Seq. ID no. 12640052
  misc_feature: MA Experiment ID: 20000171 Result: Up-regulated in Transcription
  misc_feature: MA Experiment 20000171 PARAMETER Experiment Name: At_42deg_Heat_P Parameter: Age (day) Value: 14
  misc_feature: MA Experiment 20000171 PARAMETER Experiment Name: At_42deg_Heat_P Parameter: Organism Value: A. thaliana
  misc_feature: MA Experiment 20000171 PARAMETER Experiment Name: At_42deg_Heat_P Parameter: Plant Line Value: WS
  misc_feature: MA Experiment 20000171 PARAMETER Experiment Name: At_42deg_Heat_P Parameter: Temperature (deg C) Value: 42 vs. 22
  misc_feature: MA Experiment 20000171 PARAMETER Experiment Name: At_42deg_Heat_P Parameter: Timepoint (hr) Value: 1
  misc_feature: MA Experiment 20000171 PARAMETER Experiment Name: At_42deg_Heat_P Parameter: Tissue Value: Aerial
  misc_feature: MA Experiment ID: 20000173 Result: Up-regulated in Transcription
  misc_feature: MA Experiment 20000173 PARAMETER Experiment Name: At_42deg_Heat_P Parameter: Age (day) Value: 14
  misc_feature: MA Experiment 20000173 PARAMETER Experiment Name: At_42deg_Heat_P Parameter: Organism Value: A. thaliana
  misc_feature: MA Experiment 20000173 PARAMETER Experiment Name: At_42deg_Heat_P Parameter: Plant Line Value: WS
  misc_feature: MA Experiment 20000173 PARAMETER Experiment Name: At_42deg_Heat_P Parameter: Temperature (deg C) Value: 42 vs. 22
  misc_feature: MA Experiment 20000173 PARAMETER Experiment Name: At_42deg_Heat_P Parameter: Timepoint (hr) Value: 6
  misc_feature: MA Experiment 20000173 PARAMETER Experiment Name: At_42deg_Heat_P Parameter: Tissue Value: Aerial
  misc_feature: MA Experiment ID: 20000265 Result: Up-regulated in Transcription
  misc_feature: MA Experiment 20000265 PARAMETER Experiment Name: At_Open_Flower_P Parameter: Age (day) Value: 21
  misc_feature: MA Experiment 20000265 PARAMETER Experiment Name: At_Open_Flower_P Parameter: Plant Line Value: WS
  misc_feature: MA Experiment 20000265 PARAMETER Experiment Name: At_Open_Flower_P Parameter: Tissue Value: Closed Flower vs. Whole Plant
  misc_feature: MA Experiment ID: 20001911 Result: Down-regulated in Transcription
  misc_feature: MA Experiment 20001911 PARAMETER Experiment Name: At_Drought_Reproduction_P Parameter: Age (day) Value: 40
  misc_feature: MA Experiment 20001911 PARAMETER Experiment Name: At_Drought_Reproduction_P Parameter: Organism Value: A. thaliana
  misc_feature: MA Experiment 20001911 PARAMETER Experiment Name: At_Drought_Reproduction_P Parameter: Plant Line Value: WS
  misc_feature: MA Experiment 20001911 PARAMETER Experiment Name: At_Drought_Reproduction_P Parameter: Timepoint (day) Value: 10
  misc_feature: MA Experiment 20001911 PARAMETER Experiment Name: At_Drought_Reproduction_P Parameter: Tissue Value: Flowers
  misc_feature: MA Experiment 20001911 PARAMETER Experiment Name: At_Drought_Reproduction_P Parameter: Treatment Value: Drought vs. No Drought
atggatgaagcaaacaggttaagcgcgtggaatggttacgtagactggcgaagtagacctgcgttgcgtggccgccatggcggtatgcttgctgcctcgttcgtcttggttgtggaagtgttggagaaccttgcgtttttagcaaacgcgagcaacctagtgctgtatttgtcaacaaagatgggattttcgccgtccggagccgcaaatgccgtaaccgcttttatgggaacggcatttttcttggcccttctcggagggtttttggcagacgccttcttcactactttccatatctatttagtcagcgccgccatagaattcttgggcttgatggtactgacggtccaagcccacgagcactctaccgagccatggtctcgtgtatttctatttgtgggtctatatttagtagctcttggtgtcggaggaataaaaggctcgttgccaccgcacggagcggaacagttcgacgaagaaacatcgagtgggaggagacaaagatctttcttctttaactacttcatatttagcctctcgtgcggtgccttgatagccgtcacggtcgtggtctggctcgaagacaacaaaggctggtcttatggcttcggtgtctccacagccgcgatcctgatctcggtcccggttttcttggccggttctcgcgtttatcgcctcaaggttcctagtggaagtccaatcacgactctgttcaaagtgttaaccgctgctttatacgctaaatataagaaaagaagaacttcaagaattgttgtaacgtgtcacacaagaaatgattgtgatgacagcgtaaccaaacaaaactgtgacggagatgatggatttctcggatctttcctaggtgaagttgtgagagagcgtgaatcactaccacgtccactccgttgtacggaagagcaagtcaaagatgtgaagatagtcatcaagatcctacctattttcatgtctaccattatgcttaactgttgtctagctcagctctcgacgttttccgttcaacaagcttccacaatgaacacaaagctcgggtcctttactgtcccacccgcggcattaccagtttttccagtggtcttcatgatgatcttagctccgacctataaccacctcctcctccctctagcgagaaaatcaacaaaaaccgaaaccggcataacccaccttcaacgcatcggaacagggctagtcctttccatagtcgcaatggcggtggcagccttagtggaaacaaaacgcaagcacgtcgttgttagttgctgctcaaacaacaactcatcttcttattcttcttcgccgcttcctataacgtttctttgggtggctattcaatatgtgtttctcggatcagccgatctattcactctagccggtatgatggagtttttcttcaccgaagctccttctaccatgcgttcccttgcaacctcgctctcatgggcgtctcttgcgatgggatattactttagctctgttctcgtctcggctgttaatttcgtaacaggcttaaaccatcacaatccatggcttttgggggagaatctaaatcagtaccatctcgagagattctactggctcatgtgtgtgcttagtgggattaatttcttgcattatctcttttgggctagtcgttatgtgtaccggtcgaaccaagggtaa

SEQ ID NO: 78241 - protein, 558 aa, Arabidopsis thaliana
  peptide (1)..(558): Ceres Seq. ID no. 12640053
  misc_feature (97)..(489): Pfam Name: POT family Pfam Description: POT family
  misc_feature (1)..(558): Homolog of NCBI NO: 10177451 NR Description: nitrate transporter NTL1 [Arabidopsis thaliana]
  misc_feature (1)..(558): Homolog of NCBI NO: 15241938 NR Description: nitrate transporter NTL1 - like protein; protein
  misc_feature (293)..(555): Homolog of NCBI NO: 18409382 NR Description: nitrate transporter (NTL1); protein id: supported by cDNA: gi_17064753, supported by cDNA: gi_3377516 thaliana] >gi|23397158|gb|AAN31862.1| putative nitrate
  misc_feature (1)..(244): Homolog of NCBI NO: 18409382 NR Description: nitrate transporter (NTL1); protein id: supported by cDNA: gi_17064753, supported by cDNA: gi_3377516 thaliana] >gi|23397158|gb|AAN31862.1| putative nitrate
  misc_feature (293)..(555): Homolog of NCBI NO: 17064754 NR Description: nitrate transporter (NTL1) [Arabidopsis thaliana]
  misc_feature (293)..(555): Homolog of NCBI NO: 25404844 NR Description: nitrate transporter (NTL1), 53025-56402 - Arabidopsis thaliana >gi|12325224|gb|AAG52554.1|AC010675_2
  misc_feature (1)..(244): Homolog of NCBI NO: 17064754 NR Description: nitrate transporter (NTL1) [Arabidopsis thaliana]
  misc_feature (7)..(244): Homolog of NCBI NO: 25404844 NR Description: nitrate transporter (NTL1), 53025-56402 - Arabidopsis thaliana >gi|12325224|gb|AAG52554.1|AC010675_2
  misc_feature (7)..(555): Homolog of NCBI NO: 22329803 NR Description: nitrate transporter, putative; protein id: supported by cDNA: gi_18175947, supported by cDNA: gi_20465362 thaliana] >gi|18175948|gb|AAL59956.1| putative nitrate
  misc_feature (7)..(555): Homolog of NCBI NO: 25403281 NR Description: protein T7N9.10 [imported] - Arabidopsis thaliana
MDEANRLSAWNGYVDWRSRPALRGRHGGMLAASFVLVVEVLENLAFLANASNLVLYLSTKMGFSPSGAANAVTAFMGTAFFLALLGGFLADAFFTTFHIYLVSAAIEFLGLMVLTVQAHEHSTEPWSRVFLFVGLYLVALGVGGIKGSLPPHGAEQFDEETSSGRRQRSFFFNYFIFSLSCGALIAVTVVVWLEDNKGWSYGFGVSTAAILISVPVFLAGSRVYRLKVPSGSPITTLFKVLTAALYAKYKKRRTSRIVVTCHTRNDCDDSVTKQNCDGDDGFLGSFLGEVVRERESLPRPLRCTEEQVKDVKIVIKILPIFMSTIMLNCCLAQLSTFSVQQASTMNTKLGSFTVPPAALPVFPVVFMMILAPTYNHLLLPLARKSTKTETGITHLQRIGTGLVLSIVAMAVAALVETKRKHVVVSCCSNNNSSSYSSSPLPITFLWVAIQYVFLGSADLFTLAGMMEFFFTEAPSTMRSLATSLSWASLAMGYYFSSVLVSAVNFVTGLNHHNPWLLGENLNQYHLERFYWLMCVLSGINFLHYLFWASRYVYRSNQG

SEQ ID NO: 78242 - protein, 530 aa, Arabidopsis thaliana
  peptide (1)..(530): Ceres Seq. ID no. 12640054
  misc_feature (69)..(461): Pfam Name: POT family Pfam Description: POT family
  misc_feature (1)..(530): Homolog of NCBI NO: 10177451 NR Description: nitrate transporter NTL1 [Arabidopsis thaliana]
  misc_feature (1)..(530): Homolog of NCBI NO: 15241938 NR Description: nitrate transporter NTL1 - like protein; protein
  misc_feature (265)..(527): Homolog of NCBI NO: 18409382 NR Description: nitrate transporter (NTL1); protein id: supported by cDNA: gi_17064753, supported by cDNA: gi_3377516 thaliana] >gi|23397158|gb|AAN31862.1| putative nitrate
  misc_feature (1)..(216): Homolog of NCBI NO: 18409382 NR Description: nitrate transporter (NTL1); protein id: supported by cDNA: gi_17064753, supported by cDNA: gi_3377516 thaliana] >gi|23397158|gb|AAN31862.1| putative nitrate
  misc_feature (265)..(527): Homolog of NCBI NO: 17064754 NR Description: nitrate transporter (NTL1) [Arabidopsis thaliana]
  misc_feature (265)..(527): Homolog of NCBI NO: 25404844 NR Description: nitrate transporter (NTL1), 53025-56402 - Arabidopsis thaliana >gi|12325224|gb|AAG52554.1|AC010675_2
  misc_feature (1)..(216): Homolog of NCBI NO: 17064754 NR Description: nitrate transporter (NTL1) [Arabidopsis thaliana]
  misc_feature (1)..(216): Homolog of NCBI NO: 25404844 NR Description: nitrate transporter (NTL1), 53025-56402 - Arabidopsis thaliana >gi|12325224|gb|AAG52554.1|AC010675_2
  misc_feature (1)..(527): Homolog of NCBI NO: 22329803 NR Description: nitrate transporter, putative; protein id: supported by cDNA: gi_18175947, supported by cDNA: gi_20465362 thaliana] >gi|18175948|gb|AAL59956.1| putative nitrate
  misc_feature (1)..(527): Homolog of NCBI NO: 25403281 NR Description: protein T7N9.10 [imported] - Arabidopsis thaliana
MLAASFVLVVEVLENLAFLANASNLVLYLSTKMGFSPSGAANAVTAFMGTAFFLALLGGFLADAFFTTFHIYLVSAAIEFLGLMVLTVQAHEHSTEPWSRVFLFVGLYLVALGVGGIKGSLPPHGAEQFDEETSSGRRQRSFFFNYFIFSLSCGALIAVTVVVWLEDNKGWSYGFGVSTAAILISVPVFLAGSRVYRLKVPSGSPITTLFKVLTAALYAKYKKRRTSRIVVTCHTRNDCDDSVTKQNCDGDDGFLGSFLGEVVRERESLPRPLRCTEEQVKDVKIVIKILPIFMSTIMLNCCLAQLSTFSVQQASTMNTKLGSFTVPPAALPVFPVVFMMILAPTYNHLLLPLARKSTKTETGITHLQRIGTGLVLSIVAMAVAALVETKRKHVVVSCCSNNNSSSYSSSPLPITFLWVAIQYVFLGSADLFTLAGMMEFFFTEAPSTMRSLATSLSWASLAMGYYFSSVLVSAVNFVTGLNHHNPWLLGENLNQYHLERFYWLMCVLSGINFLHYLFWASRYVYRSNQG

SEQ ID NO: 78243 - protein, 498 aa, Arabidopsis thaliana
  peptide (1)..(498): Ceres Seq. ID no. 12640055
  misc_feature (37)..(429): Pfam Name: POT family Pfam Description: POT family
  misc_feature (1)..(498): Homolog of NCBI NO: 10177451 NR Description: nitrate transporter NTL1 [Arabidopsis thaliana]
  misc_feature (1)..(498): Homolog of NCBI NO: 15241938 NR Description: nitrate transporter NTL1 - like protein; protein
  misc_feature (233)..(495): Homolog of NCBI NO: 18409382 NR Description: nitrate transporter (NTL1); protein id: supported by cDNA: gi_17064753, supported by cDNA: gi_3377516 thaliana] >gi|23397158|gb|AAN31862.1| putative nitrate
  misc_feature (1)..(184): Homolog of NCBI NO: 18409382 NR Description: nitrate transporter (NTL1); protein id: supported by cDNA: gi_17064753, supported by cDNA: gi_3377516 thaliana] >gi|23397158|gb|AAN31862.1| putative nitrate
  misc_feature (233)..(495): Homolog of NCBI NO: 17064754 NR Description: nitrate transporter (NTL1) [Arabidopsis thaliana]
  misc_feature (233)..(495): Homolog of NCBI NO: 25404844 NR Description: nitrate transporter (NTL1), 53025-56402 - Arabidopsis thaliana >gi|12325224|gb|AAG52554.1|AC010675_2
  misc_feature (1)..(184): Homolog of NCBI NO: 17064754 NR Description: nitrate transporter (NTL1) [Arabidopsis thaliana]
  misc_feature (1)..(184): Homolog of NCBI NO: 25404844 NR Description: nitrate transporter (NTL1), 53025-56402 - Arabidopsis thaliana >gi|12325224|gb|AAG52554.1|AC010675_2
  misc_feature (1)..(495): Homolog of NCBI NO: 22329803 NR Description: nitrate transporter, putative; protein id: supported by cDNA: gi_18175947, supported by cDNA: gi_20465362 thaliana] >gi|18175948|gb|AAL59956.1| putative nitrate
  misc_feature (1)..(495): Homolog of NCBI NO: 25403281 NR Description: protein T7N9.10 [imported] - Arabidopsis thaliana
MGFSPSGAANAVTAFMGTAFFLALLGGFLADAFFTTFHIYLVSAAIEFLGLMVLTVQAHEHSTEPWSRVFLFVGLYLVALGVGGIKGSLPPHGAEQFDEETSSGRRQRSFFFNYFIFSLSCGALIAVTVVVWLEDNKGWSYGFGVSTAAILISVPVFLAGSRVYRLKVPSGSPITTLFKVLTAALYAKYKKRRTSRIVVTCHTRNDCDDSVTKQNCDGDDGFLGSFLGEVVRERESLPRPLRCTEEQVKDVKIVIKILPIFMSTIMLNCCLAQLSTFSVQQASTMNTKLGSFTVPPAALPVFPVVFMMILAPTYNHLLLPLARKSTKTETGITHLQRIGTGLVLSIVAMAVAALVETKRKHVVVSCCSNNNSSSYSSSPLPITFLWVAIQYVFLGSADLFTLAGMMEFFFTEAPSTMRSLATSLSWASLAMGYYFSSVLVSAVNFVTGLNHHNPWLLGENLNQYHLERFYWLMCVLSGINFLHYLFWASRYVYRSNQG

SEQ ID NO: 78244 - DNA, 1344 bp, Arabidopsis thaliana
  misc_feature (1)..(1344): Ceres Seq. ID no. 12640097
  misc_feature: MA Experiment ID: 20001558 Result: Up-regulated in Transcription
  misc_feature: MA Experiment 20001558 PARAMETER Experiment Name: At_Drought_Soil_Dry_P Parameter: Age (day) Value: 27
  misc_feature: MA Experiment 20001558 PARAMETER Experiment Name: At_Drought_Soil_Dry_P Parameter: Organism Value: A. thaliana
  misc_feature: MA Experiment 20001558 PARAMETER Experiment Name: At_Drought_Soil_Dry_P Parameter: Plant Line Value: WS
  misc_feature: MA Experiment 20001558 PARAMETER Experiment Name: At_Drought_Soil_Dry_P Parameter: Post Timepoint (hr) Value: 6
  misc_feature: MA Experiment 20001558 PARAMETER Experiment Name: At_Drought_Soil_Dry_P Parameter: Post-Treatment Value: Re-Water vs. No Drought
  misc_feature: MA Experiment 20001558 PARAMETER Experiment Name: At_Drought_Soil_Dry_P Parameter: Timepoint (day) Value: 13
  misc_feature: MA Experiment 20001558 PARAMETER Experiment Name: At_Drought_Soil_Dry_P Parameter: Treatment Value: Drought vs. No Drought
atggcggacaatcgaagaagaagaagcctattcgacttcctacttttctccgtgtttctaggactcgcatgtctctgtttatctccgattccggcaacagctcaacgtcggaaactcaggttcagtgttaacggcgagttcaagatactacaagtggcggatatgcattttgctaacggcgctaagacgcagtgtcaaaatgttcttcctagccagagagctcattgctcagacctcaacaccaccatcttcatgtcgcgagtcatcgccgccgagaagcctgatcttatcgtcttcaccggtgataacatatttgggtttgatgtaaaagacgctttgaaatccataaacgctgcgtttgctccagcgattgcgtctaaaatcccatgggttgctattttgggaaaccatgaccaagaatctacatttacaagacaacaagttatgaatcacattgtgaagcttcccaacactttgtctcaagtgaatcctcctgaagctgctcattacattgatggttttggtaattacaatctccaaatccatggagctgctgattcgaaactacagaacaaatctgttcttaatctttattttctcgatagtggagattattctagtgttccttacatggaaggttatgattggatcaaaacttctcagcagttttggttcgaccgcacttcaaaacgtctcaagagggagtacaacgcaaagcctaatcctcaagaaggtatagctccaggactagcttacttccacattccattaccggagtttttgagttttgactcaaagaacgctacaaaaggagtgagacaagaaggtacatccgcggcttctacaaactcgggtttcttcacaacattgatagctagaggagatgtgaaatctgtgtttgtgggtcacgaccatgtcaacgacttctgcggtgaacttaaaggtttgaatctatgttatggtggtggatttgggtatcatgcttatggtaaagctggatgggaaagaagagcgagagttgtggttgttgatttgaataagaagagaaaaggaaagtggggagctgtgaaatcgattaagacatggaagaggcttgatgataagcatctctctgttattgactctcaagttctttggaacaattctgcaaacaaattagttgttcgttgatattgattccatgtgttgttgttttgatctgtctactaaatgttctgttttagttggttttgggtttcatagaaactgtttaagtgtttatcattgagttagttttaaactccatttgatgtaattttgtttggtttaagactttaaggcaagaaagtgaaaaactaaactttc

SEQ ID NO: 78245 - protein, 389 aa, Arabidopsis thaliana
  peptide (1)..(389): Ceres Seq. ID no. 12640098
  misc_feature (47)..(307): Pfam Name: Calcineurin-like phosphoesterase Pfam Description: Calcineurin-like phosphoesterase
  misc_feature (1)..(389): Homolog of NCBI NO: 15242654 NR Description: putative protein; protein id: At5g63140.1 thaliana] >gi|10177295|dbj|BAB10556.1|
  misc_feature (28)..(382): Homolog of NCBI NO: 7208777 NR Description: putative PTS protein [Cicer arietinum]
  misc_feature (1)..(385): Homolog of NCBI NO: 25763519 NR Description: probable phosphoesterase (EC 3.1.-.-) At2g46880 -
  misc_feature (1)..(382): Homolog of NCBI NO: 15226455 NR Description: hypothetical protein; protein id: At2g46880.1
  misc_feature (1)..(382): Homolog of NCBI NO: 30267807 NR Description: hypothetical protein [Arabidopsis thaliana]
  misc_feature (1)..(325): Homolog of NCBI NO: 30267809 NR Description: hypothetical protein [Arabidopsis thaliana]
  misc_feature (39)..(382): Homolog of NCBI NO: 15242042 NR Description: putative protein; protein id: At5g57140.1 thaliana] >gi|8843816|dbj|BAA97364.1| to unknown protein [Arabidopsis thaliana]
  misc_feature (29)..(382): Homolog of NCBI NO: 6323393 NR Description: Dose-Dependent Cell cycle Regulator; Dcr2p
  misc_feature (40)..(374): Homolog of NCBI NO: 40740622 NR Description: hypothetical protein AN3604.2 [Aspergillus
  misc_feature (85)..(353): Homolog of NCBI NO: 29349293 NR Description: putative phosphohydrolase, Icc family [Bacteroides
MADNRRRRSLFDFLLFSVFLGLACLCLSPIPATAQRRKLRFSVNGEFKILQVADMHFANGAKTQCQNVLPSQRAHCSDLNTTIFMSRVIAAEKPDLIVFTGDNIFGFDVKDALKSINAAFAPAIASKIPWVAILGNHDQESTFTRQQVMNHIVKLPNTLSQVNPPEAAHYIDGFGNYNLQIHGAADSKLQNKSVLNLYFLDSGDYSSVPYMEGYDWIKTSQQFWFDRTSKRLKREYNAKPNPQEGIAPGLAYFHIPLPEFLSFDSKNATKGVRQEGTSAASTNSGFFTTLIARGDVKSVFVGHDHVNDFCGELKGLNLCYGGGFGYHAYGKAGWERRARVVVVDLNKKRKGKWGAVKSIKTWKRLDDKHLSVIDSQVLWNNSANKLVVR

SEQ ID NO: 78246 - protein, 335 aa, Arabidopsis thaliana; identical to SEQ ID NO: 35819
  peptide (1)..(335): Ceres Seq. ID no. 12640099
  misc_feature (1)..(253): Pfam Name: Calcineurin-like phosphoesterase Pfam Description: Calcineurin-like phosphoesterase
  misc_feature (1)..(335): Homolog of NCBI NO: 15242654 NR Description: putative protein; protein id: At5g63140.1 thaliana] >gi|10177295|dbj|BAB10556.1|
  misc_feature (1)..(328): Homolog of NCBI NO: 7208777 NR Description: putative PTS protein [Cicer arietinum]
  misc_feature (1)..(331): Homolog of NCBI NO: 25763519 NR Description: probable phosphoesterase (EC 3.1.-.-) At2g46880 -
  misc_feature (1)..(328): Homolog of NCBI NO: 15226455 NR Description: hypothetical protein; protein id: At2g46880.1
  misc_feature (1)..(328): Homolog of NCBI NO: 30267807 NR Description: hypothetical protein [Arabidopsis thaliana]
  misc_feature (1)..(271): Homolog of NCBI NO: 30267809 NR Description: hypothetical protein [Arabidopsis thaliana]
  misc_feature (1)..(328): Homolog of NCBI NO: 15242042 NR Description: putative protein; protein id: At5g57140.1 thaliana] >gi|8843816|dbj|BAA97364.1| to unknown protein [Arabidopsis thaliana]
  misc_feature (1)..(328): Homolog of NCBI NO: 6323393 NR Description: Dose-Dependent Cell cycle Regulator; Dcr2p
  misc_feature (1)..(320): Homolog of NCBI NO: 40740622 NR Description: hypothetical protein AN3604.2 [Aspergillus
  misc_feature (31)..(299): Homolog of NCBI NO: 29349293 NR Description: putative phosphohydrolase, Icc family [Bacteroides

SEQ ID NO: 78247 - protein, 305 aa, Arabidopsis thaliana; identical to SEQ ID NO: 43290
  peptide (1)..(305): Ceres Seq. ID no. 12640100
  misc_feature (1)..(223): Pfam Name: Calcineurin-like phosphoesterase Pfam Description: Calcineurin-like phosphoesterase
  misc_feature (1)..(305): Homolog of NCBI NO: 15242654 NR Description: putative protein; protein id: At5g63140.1 thaliana] >gi|10177295|dbj|BAB10556.1|
  misc_feature (1)..(298): Homolog of NCBI NO: 7208777 NR Description: putative PTS protein [Cicer arietinum]
  misc_feature (1)..(301): Homolog of NCBI NO: 25763519 NR Description: probable phosphoesterase (EC 3.1.-.-) At2g46880 -
  misc_feature (1)..(298): Homolog of NCBI NO: 15226455 NR Description: hypothetical protein; protein id: At2g46880.1
  misc_feature (1)..(298): Homolog of NCBI NO: 30267807 NR Description: hypothetical protein [Arabidopsis thaliana]
  misc_feature (1)..(241): Homolog of NCBI NO: 30267809 NR Description: hypothetical protein [Arabidopsis thaliana]
  misc_feature (1)..(298): Homolog of NCBI NO: 15242042 NR Description: putative protein; protein id: At5g57140.1 thaliana] >gi|8843816|dbj|BAA97364.1| to unknown protein [Arabidopsis thaliana]
  misc_feature (1)..(298): Homolog of NCBI NO: 6323393 NR Description: Dose-Dependent Cell cycle Regulator; Dcr2p
  misc_feature (1)..(290): Homolog of NCBI NO: 40740622 NR Description: hypothetical protein AN3604.2 [Aspergillus
  misc_feature (1)..(269): Homolog of NCBI NO: 29349293 NR Description: putative phosphohydrolase, Icc family [Bacteroides

SEQ ID NO: 78248 - DNA, 925 bp, Arabidopsis thaliana
  misc_feature (1)..(925): Ceres Seq. ID no. 12640127
  misc_feature: MA Experiment ID: 108434 Result: Up-regulated in Transcription
  misc_feature: MA Experiment 108434 PARAMETER Experiment Name: At_Root_Tips_cDNA_P Parameter: Tissue Value: Root Tips
  misc_feature: MA Experiment ID: 108461 Result: Up-regulated in Transcription
  misc_feature: MA Experiment 108461 PARAMETER Experiment Name: At_Germinating_Seeds_cDNA_P Parameter: Age (day) Value: 1 vs. 0
  misc_feature: MA Experiment 108461 PARAMETER Experiment Name: At_Germinating_Seeds_cDNA_P Parameter: Tissue Value: Germinating Seeds
  misc_feature: MA Experiment ID: 108463 Result: Down-regulated in Transcription
  misc_feature: MA Experiment 108463 PARAMETER Experiment Name: At_Germinating_Seeds_cDNA_P Parameter: Age (day) Value: 3 vs. 0
  misc_feature: MA Experiment 108463 PARAMETER Experiment Name: At_Germinating_Seeds_cDNA_P Parameter: Tissue Value: Germinating Seeds
  misc_feature: MA Experiment ID: 108464 Result: Down-regulated in Transcription
  misc_feature: MA Experiment 108464 PARAMETER Experiment Name: At_Germinating_Seeds_cDNA_P Parameter: Age (day) Value: 4 vs. 0
  misc_feature: MA Experiment 108464 PARAMETER Experiment Name: At_Germinating_Seeds_cDNA_P Parameter: Tissue Value: Germinating Seeds
  misc_feature: MA Experiment ID: 108595 Result: Down-regulated in Transcription
  misc_feature: MA Experiment 108595 PARAMETER Experiment Name: At_Ler-pi_Ovule_cDNA_P Parameter: Plant Line Value: null
  misc_feature: MA Experiment ID: 20000069 Result: Down-regulated in Transcription
  misc_feature: MA Experiment 20000069 PARAMETER Experiment Name: At_100uM_ABA_Mutants_cDNA_P Parameter: Plant Line Value: CS23
  misc_feature: MA Experiment 20000069 PARAMETER Experiment Name: At_100uM_ABA_Mutants_cDNA_P Parameter: Timepoint (hr) Value: 6
  misc_feature: MA Experiment 20000069 PARAMETER Experiment Name: At_100uM_ABA_Mutants_cDNA_P Parameter: Tissue Value: Aerial
  misc_feature: MA Experiment 20000069 PARAMETER Experiment Name: At_100uM_ABA_Mutants_cDNA_P Parameter: Treatment Value: 100uM ABA vs. No Treatment
  misc_feature: MA Experiment ID: 20000070 Result: Down-regulated in Transcription
  misc_feature: MA Experiment 20000070 PARAMETER Experiment Name: At_100uM_ABA_Mutants_cDNA_P Parameter: Plant Line Value: CS24
  misc_feature: MA Experiment 20000070 PARAMETER Experiment Name: At_100uM_ABA_Mutants_cDNA_P Parameter: Timepoint (hr) Value: 6
  misc_feature: MA Experiment 20000070 PARAMETER Experiment Name: At_100uM_ABA_Mutants_cDNA_P Parameter: Tissue Value: Aerial
  misc_feature: MA Experiment 20000070 PARAMETER Experiment Name: At_100uM_ABA_Mutants_cDNA_P Parameter: Treatment Value: 100uM ABA vs. No Treatment
  misc_feature: MA Experiment ID: 20000071 Result: Down-regulated in Transcription
  misc_feature: MA Experiment 20000071 PARAMETER Experiment Name: At_100uM_ABA_Mutants_cDNA_P Parameter: Plant Line Value: CS8104
  misc_feature: MA Experiment 20000071 PARAMETER Experiment Name: At_100uM_ABA_Mutants_cDNA_P Parameter: Timepoint (hr) Value: 6
  misc_feature: MA Experiment 20000071 PARAMETER Experiment Name: At_100uM_ABA_Mutants_cDNA_P Parameter: Tissue Value: Aerial
  misc_feature: MA Experiment 20000071 PARAMETER Experiment Name: At_100uM_ABA_Mutants_cDNA_P Parameter: Treatment Value: 100uM ABA vs. No Treatment
  misc_feature: MA Experiment ID: 20000072 Result: Down-regulated in Transcription
  misc_feature: MA Experiment 20000072 PARAMETER Experiment Name: At_100uM_ABA_Mutants_cDNA_P Parameter: Plant Line Value: CS8105
  misc_feature: MA Experiment 20000072 PARAMETER Experiment Name: At_100uM_ABA_Mutants_cDNA_P Parameter: Timepoint (hr) Value: 6
  misc_feature: MA Experiment 20000072 PARAMETER Experiment Name: At_100uM_ABA_Mutants_cDNA_P Parameter: Tissue Value: Aerial
  misc_feature: MA Experiment 20000072 PARAMETER Experiment Name: At_100uM_ABA_Mutants_cDNA_P Parameter: Treatment Value: 100uM ABA vs. No Treatment
  misc_feature: MA Experiment ID: 20000087 Result: Down-regulated in Transcription
  misc_feature: MA Experiment 20000087 PARAMETER Experiment Name: At_100uM_ABA_Mutants_cDNA_P Parameter: Plant Line Value: WS
  misc_feature: MA Experiment 20000087 PARAMETER Experiment Name: At_100uM_ABA_Mutants_cDNA_P Parameter: Timepoint (hr) Value: 6
  misc_feature: MA Experiment 20000087 PARAMETER Experiment Name: At_100uM_ABA_Mutants_cDNA_P Parameter: Tissue Value: Aerial
  misc_feature: MA Experiment 20000087 PARAMETER Experiment Name: At_100uM_ABA_Mutants_cDNA_P Parameter: Treatment Value: 100uM ABA vs. No Treatment
  misc_feature: MA Experiment ID: 20000117 Result: Down-regulated in Transcription
  misc_feature: MA Experiment 20000117 PARAMETER Experiment Name: At_100uM_ABA_Mutants_cDNA_P Parameter: Plant Line Value: Columbia
  misc_feature: MA Experiment 20000117 PARAMETER Experiment Name: At_100uM_ABA_Mutants_cDNA_P Parameter: Timepoint (hr) Value: 6
  misc_feature: MA Experiment 20000117 PARAMETER Experiment Name: At_100uM_ABA_Mutants_cDNA_P Parameter: Tissue Value: Aerial
  misc_feature: MA Experiment 20000117 PARAMETER Experiment Name: At_100uM_ABA_Mutants_cDNA_P Parameter: Treatment Value: 100uM ABA vs. No Treatment
  misc_feature: MA Experiment ID: 20000179 Result: Up-regulated in Transcription
  misc_feature: MA Experiment 20000179 PARAMETER Experiment Name: At_Germinating_Seeds_P Parameter: Age (hr) Value: 6 vs. 0
  misc_feature: MA Experiment 20000179 PARAMETER Experiment Name: At_Germinating_Seeds_P Parameter: Tissue Value: Germinating Seeds
  misc_feature: MA Experiment ID: 20000180 Result: Up-regulated in Transcription
  misc_feature: MA Experiment 20000180 PARAMETER Experiment Name: At_Germinating_Seeds_P Parameter: Age (hr) Value: 24 vs. 0
  misc_feature: MA Experiment 20000180 PARAMETER Experiment Name: At_Germinating_Seeds_P Parameter: Tissue Value: Germinating Seeds
  misc_feature: MA Experiment ID: 20000184 Result: Up-regulated in Transcription
  misc_feature: MA Experiment 20000184 PARAMETER Experiment Name: At_Shoots__P Parameter: Age (day) Value: 7
  misc_feature: MA Experiment 20000184 PARAMETER Experiment Name: At_Shoots__P Parameter: Tissue Value: Shoots vs. Whole Plant
  misc_feature: MA Experiment ID: 20000185 Result: Down-regulated in Transcription
  misc_feature: MA Experiment 20000185 PARAMETER Experiment Name: At_Roots__P Parameter: Age (day) Value: 7 vs. 21
  misc_feature: MA Experiment 20000185 PARAMETER Experiment Name: At_Roots__P Parameter: Organism Value: A. thaliana
  misc_feature: MA Experiment 20000185 PARAMETER Experiment Name: At_Roots__P Parameter: Tissue Value: Roots vs. Whole Plant
  misc_feature: MA Experiment ID: 20000234 Result: Up-regulated in Transcription
  misc_feature: MA Experiment 20000234 PARAMETER Experiment Name: At_Siliques_P Parameter: Age (day) Value: 21
  misc_feature: MA Experiment 20000234 PARAMETER Experiment Name: At_Siliques_P Parameter: Organism Value: A. thaliana
  misc_feature: MA Experiment 20000234 PARAMETER Experiment Name: At_Siliques_P Parameter: Plant Line Value: WS
  misc_feature: MA Experiment 20000234 PARAMETER Experiment Name: At_Siliques_P Parameter: Tissue Value: Less Than 5mm Siliques vs. Whole Plant
  misc_feature: MA Experiment ID: 20000235 Result: Up-regulated in Transcription
  misc_feature: MA Experiment 20000235 PARAMETER Experiment Name: At_Siliques_P Parameter: Age (day) Value: 21
  misc_feature: MA Experiment 20000235 PARAMETER Experiment Name: At_Siliques_P Parameter: Organism Value: A. thaliana
  misc_feature: MA Experiment 20000235 PARAMETER Experiment Name: At_Siliques_P Parameter: Plant Line Value: WS
  misc_feature: MA Experiment 20000235 PARAMETER Experiment Name: At_Siliques_P Parameter: Tissue Value: 5-10mm Siliques vs. Whole Plant
  misc_feature: MA Experiment ID: 20000437 Result: Down-regulated in Transcription
  misc_feature: MA Experiment 20000437 PARAMETER Experiment Name: At_Drought_P Parameter: Age (day) Value: 8
  misc_feature: MA Experiment 20000437 PARAMETER Experiment Name: At_Drought_P Parameter: Organism Value: A. thaliana
  misc_feature: MA Experiment 20000437 PARAMETER Experiment Name: At_Drought_P Parameter: Plant Line Value: WS
  misc_feature: MA Experiment 20000437 PARAMETER Experiment Name: At_Drought_P Parameter: Timepoint (hr) Value: 24
  misc_feature: MA Experiment 20000437 PARAMETER Experiment Name: At_Drought_P Parameter: Tissue Value: Whole Plant
  misc_feature: MA Experiment 20000437 PARAMETER Experiment Name: At_Drought_P Parameter: Treatment Value: Drought vs. No Drought
  misc_feature: MA Experiment ID: 20000439 Result: Down-regulated in Transcription
  misc_feature: MA Experiment 20000439 PARAMETER Experiment Name: At_Roots__P Parameter: Age (day) Value: 14 vs. 21
  misc_feature: MA Experiment 20000439 PARAMETER Experiment Name: At_Roots__P Parameter: Organism Value: A. thaliana
  misc_feature: MA Experiment 20000439 PARAMETER Experiment Name: At_Roots__P Parameter: Tissue Value: Roots vs. Whole Plant
  misc_feature: MA Experiment ID: 20000527 Result: Up-regulated in Transcription
  misc_feature: MA Experiment 20000527 PARAMETER Experiment Name: At_10percent_PEG_P Parameter: Age (day) Value: 20
  misc_feature: MA Experiment 20000527 PARAMETER Experiment Name: At_10percent_PEG_P Parameter: Organism Value: A. thaliana
  misc_feature: MA Experiment 20000527 PARAMETER Experiment Name: At_10percent_PEG_P Parameter: Plant Line Value: WS
  misc_feature: MA Experiment 20000527 PARAMETER Experiment Name: At_10percent_PEG_P Parameter: Timepoint (day) Value: 20
  misc_feature: MA Experiment 20000527 PARAMETER Experiment Name: At_10percent_PEG_P Parameter: Tissue Value: Whole Plant
  misc_feature: MA Experiment 20000527 PARAMETER Experiment Name: At_10percent_PEG_P Parameter: Treatment Value: 10percent PEG vs. No Treatment
  misc_feature: MA Experiment ID: 20000794 Result: Down-regulated in Transcription
  misc_feature: MA Experiment 20000794 PARAMETER Experiment Name: At_Petals_P Parameter: Age (day) Value: 23-25 days
  misc_feature: MA Experiment 20000794 PARAMETER Experiment Name: At_Petals_P Parameter: Plant Line Value: WS
  misc_feature: MA Experiment 20000794 PARAMETER Experiment Name: At_Petals_P Parameter: Tissue Value: Petals vs. Whole plant
  misc_feature: MA Experiment ID: 20001248 Result: Down-regulated in Transcription
  misc_feature: MA Experiment 20001248 PARAMETER Experiment Name: At_Far-red-induction_P Parameter: Age (day) Value: 7
  misc_feature: MA Experiment 20001248 PARAMETER Experiment Name: At_Far-red-induction_P Parameter: Light Value: Far-red vs. White
  misc_feature: MA Experiment 20001248 PARAMETER Experiment Name: At_Far-red-induction_P Parameter: Organism Value: A. thaliana
  misc_feature: MA Experiment 20001248 PARAMETER Experiment Name: At_Far-red-induction_P Parameter: Plant Line Value: Columbia
  misc_feature: MA Experiment 20001248 PARAMETER Experiment Name: At_Far-red-induction_P Parameter: Timepoint (hr) Value: 4
  misc_feature: MA Experiment 20001248 PARAMETER Experiment Name: At_Far-red-induction_P Parameter: Tissue Value: Whole Plant
  misc_feature: MA Experiment ID: 20001450 Result: Down-regulated in Transcription
  misc_feature: MA Experiment 20001450 PARAMETER Experiment Name: At_Far-red-induction_P Parameter: Age (day) Value: 7
  misc_feature: MA Experiment 20001450 PARAMETER Experiment Name: At_Far-red-induction_P Parameter: Light Value: Far-red vs. White
  misc_feature: MA Experiment 20001450 PARAMETER Experiment Name: At_Far-red-induction_P Parameter: Organism Value: A. thaliana
  misc_feature: MA Experiment 20001450 PARAMETER Experiment Name: At_Far-red-induction_P Parameter: Plant Line Value: Columbia
  misc_feature: MA Experiment 20001450 PARAMETER Experiment Name: At_Far-red-induction_P Parameter: Timepoint (hr) Value: 8
  misc_feature: MA Experiment 20001450 PARAMETER Experiment Name: At_Far-red-induction_P Parameter: Tissue Value: Whole Plant
  misc_feature: MA Experiment ID: 20001451 Result: Down-regulated in Transcription
  misc_feature: MA Experiment 20001451 PARAMETER Experiment Name: At_Far-red-induction_P Parameter: Age (day) Value: 7
  misc_feature: MA Experiment 20001451 PARAMETER Experiment Name: At_Far-red-induction_P Parameter: Light Value: Far-red vs. White
  misc_feature: MA Experiment 20001451 PARAMETER Experiment Name: At_Far-red-induction_P Parameter: Organism Value: A. thaliana
  misc_feature: MA Experiment 20001451 PARAMETER Experiment Name: At_Far-red-induction_P Parameter: Plant Line Value: Columbia
  misc_feature: MA Experiment 20001451 PARAMETER Experiment Name: At_Far-red-induction_P Parameter: Timepoint (hr) Value: 24
  misc_feature: MA Experiment 20001451 PARAMETER Experiment Name: At_Far-red-induction_P Parameter: Tissue Value: Whole Plant
  misc_feature: MA Experiment ID: 20001558 Result: Up-regulated in Transcription
  misc_feature: MA Experiment 20001558 PARAMETER Experiment Name: At_Drought_Soil_Dry_P Parameter: Age (day) Value: 27
  misc_feature: MA Experiment 20001558 PARAMETER Experiment Name: At_Drought_Soil_Dry_P Parameter: Organism Value: A. thaliana
  misc_feature: MA Experiment 20001558 PARAMETER Experiment Name: At_Drought_Soil_Dry_P Parameter: Plant Line Value: WS
  misc_feature: MA Experiment 20001558 PARAMETER Experiment Name: At_Drought_Soil_Dry_P Parameter: Post Timepoint (hr) Value: 6
  misc_feature: MA Experiment 20001558 PARAMETER Experiment Name: At_Drought_Soil_Dry_P Parameter: Post-Treatment Value: Re-Water vs. No Drought
  misc_feature: MA Experiment 20001558 PARAMETER Experiment Name: At_Drought_Soil_Dry_P Parameter: Timepoint (day) Value: 13
  misc_feature: MA Experiment 20001558 PARAMETER Experiment Name: At_Drought_Soil_Dry_P Parameter: Treatment Value: Drought vs. No Drought
  misc_feature: MA Experiment ID: 20001560 Result: Up-regulated in Transcription
  misc_feature: MA Experiment 20001560 PARAMETER Experiment Name: At_Drought_Soil_Dry_P Parameter: Age (day) Value: 28
  misc_feature: MA Experiment 20001560 PARAMETER Experiment Name: At_Drought_Soil_Dry_P Parameter: Organism Value: A. thaliana
  misc_feature: MA Experiment 20001560 PARAMETER Experiment Name: At_Drought_Soil_Dry_P Parameter: Plant Line Value: WS
  misc_feature: MA Experiment 20001560 PARAMETER Experiment Name: At_Drought_Soil_Dry_P Parameter: Post Timepoint (hr) Value: None
  misc_feature: MA Experiment 20001560 PARAMETER Experiment Name: At_Drought_Soil_Dry_P Parameter: Post-Treatment Value: None
  misc_feature: MA Experiment 20001560 PARAMETER Experiment Name: At_Drought_Soil_Dry_P Parameter: Timepoint (day) Value: 14
  misc_feature: MA Experiment 20001560 PARAMETER Experiment Name: At_Drought_Soil_Dry_P Parameter: Treatment Value: Drought vs. No Drought
  misc_feature: MA Experiment ID: 20001757 Result: Up-regulated in Transcription
  misc_feature: MA Experiment 20001757 PARAMETER Experiment Name: At_50mM_NH4NO3_L-to-H_P Parameter: Timepoint (hr) Value: 6
  misc_feature: MA Experiment 20001757 PARAMETER Experiment Name: At_50mM_NH4NO3_L-to-H_P Parameter: Tissue Value: Leaf
  misc_feature: MA Experiment 20001757 PARAMETER Experiment Name: At_50mM_NH4NO3_L-to-H_P Parameter: Treatment Value: 50mM NH4NO3 vs 100mM Mannitol
  misc_feature: MA Experiment ID: 20001906 Result: Down-regulated in Transcription
  misc_feature: MA Experiment 20001906 PARAMETER Experiment Name: At_Drought_Reproduction_P Parameter: Age (day) Value: 35
  misc_feature: MA Experiment 20001906 PARAMETER Experiment Name: At_Drought_Reproduction_P Parameter: Organism Value: A. thaliana
  misc_feature: MA Experiment 20001906 PARAMETER Experiment Name: At_Drought_Reproduction_P Parameter: Plant Line Value: WS
  misc_feature: MA Experiment 20001906 PARAMETER Experiment Name: At_Drought_Reproduction_P Parameter: Timepoint (day) Value: 5
  misc_feature: MA Experiment 20001906 PARAMETER Experiment Name: At_Drought_Reproduction_P Parameter: Tissue Value: Siliques
  misc_feature: MA Experiment 20001906 PARAMETER Experiment Name: At_Drought_Reproduction_P Parameter: Treatment Value: Drought vs. No Drought
aagacaaagcgcagaaaatggtgggagcgactgtagttagtaaatggactcccctatgtgtggcttcgccgccggagagaaactcggcaagtctcaatccacactgttctccagccagggttaattttagaacagcgttggccgcatttcgtcctcagttccgtcttttctctcgcaattccgcgtctcgccgccgtcttcgcgcttccagctccgccgaatcgggaatcttccttcctcaccttgtagcttctatggaggacgttgaggagacttacattatggtgaaacctgatggcatacaacgaggccttgtaggagaaatcatttctcgctttgagaaaaaggggtttaaacttattgggctcaagatgtttcagtgcccaaaagaattggctgaggagcattataaggatcttagtgctaaatcattctttcctaacctgattgagtacatcacttcaggtccagttgtgtgtatggcttgggaaggtgttggtgttgttgcttcagccaggaagctaatagggaaaacagatccgcttcaagctgaacctggtactataagaggagatcttgctgtgcaaaccggaaggaacattgtgcatggtagtgacagccctgaaaacggcaagcgtgagattggtctgtggttcaaagagggcgagctatgcaagtgggattcggctctagctacatggctaagggagtgatccttgagaagacagagtcaattataatggtgtccttacttgttttcttgttaccgatgatgagctttggtgttttgttcctgattttgggcggcaatataatataactgccaatctatggcttgattcttctcatatctgtgatcacttgtcatgtaatcaaaactagttacagattcatctgcatttggttctacgttacagacacctcc

SEQ ID NO: 78249 - protein, 236 aa, Arabidopsis thaliana
  peptide (1)..(236): Ceres Seq. ID no. 12640128
  misc_feature (89)..(226): Pfam Name: Nucleoside diphosphate kinase Pfam Description: Nucleoside diphosphate kinase
  misc_feature (6)..(236): Homolog of NCBI NO: 30697820 NR Description: nucleotide diphosphate kinase Ia (emb|CAB58230.1) thaliana] >gi|12644076|sp|O64903|NDK2_ARATH Nucleoside kinase II, chloroplast precursor (NDK II) (NDP kinase II) (NDPK
  misc_feature (6)..(236): Homolog of NCBI NO: 3093480 NR Description: nucleoside diphosphate kinase type 2 [Arabidopsis
  misc_feature (6)..(236): Homolog of NCBI NO: 21832064 NR Description: nucloside diphosphate kinase 2 [Brassica rapa]
  misc_feature (85)..(236): Homolog of NCBI NO: 11260887 NR Description: nucleoside-diphosphate kinase (EC 2.7.4.6) Ia - Arabidopsis thaliana >gi|3063661|gb|AAC14280.1| nucleoside
  misc_feature (19)..(236): Homolog of NCBI NO: 266607 NR Description: Nucleoside diphosphate kinase II, chloroplast
  misc_feature (20)..(236): Homolog of NCBI NO: 27807824 NR Description: nucleoside diphosphate kinase [Nicotiana tabacum]
  misc_feature (46)..(236): Homolog of NCBI NO: 1346673 NR Description: Nucleoside diphosphate kinase II, chloroplast
  misc_feature (88)..(236): Homolog of NCBI NO: 22297811 NR Description: nucleoside diphosphate kinase
  misc_feature (88)..(236): Homolog of NCBI NO: 20138835 NR Description: Nucleoside diphosphate kinase (NDK) (NDP kinase)
  misc_feature (89)..(236): Homolog of NCBI NO: 9652119 NR Description: nucleoside diphosphate kinase [Lolium perenne]
DKAQKMVGATVVSKWTPLCVASPPERNSASLNPHCSPARVNFRTALAAFRPQFRLFSRNSASRRRLRASSSAESGIFLPHLVASMEDVEETYIMVKPDGIQRGLVGEIISRFEKKGFKLIGLKMFQCPKELAEEHYKDLSAKSFFPNLIEYITSGPVVCMAWEGVGVVASARKLIGKTDPLQAEPGTIRGDLAVQTGRNIVHGSDSPENGKREIGLWFKEGELCKWDSALATWLRE

SEQ ID NO: 78250 - protein, 231 aa, Arabidopsis thaliana; identical to SEQ ID NO: 25317
  peptide (1)..(231): Ceres Seq. ID no. 12640129
  misc_feature (84)..(221): Pfam Name: Nucleoside diphosphate kinase Pfam Description: Nucleoside diphosphate kinase
  misc_feature (1)..(231): Homolog of NCBI NO: 30697820 NR Description: nucleotide diphosphate kinase Ia (emb|CAB58230.1) thaliana] >gi|12644076|sp|O64903|NDK2_ARATH Nucleoside kinase II, chloroplast precursor (NDK II) (NDP kinase II) (NDPK
  misc_feature (1)..(231): Homolog of NCBI NO: 3093480 NR Description: nucleoside diphosphate kinase type 2 [Arabidopsis
  misc_feature (1)..(231): Homolog of NCBI NO: 21832064 NR Description: nucloside diphosphate kinase 2 [Brassica rapa]
  misc_feature (80)..(231): Homolog of NCBI NO: 11260887 NR Description: nucleoside-diphosphate kinase (EC 2.7.4.6) Ia - Arabidopsis thaliana >gi|3063661|gb|AAC14280.1| nucleoside
  misc_feature (14)..(231): Homolog of NCBI NO: 266607 NR Description: Nucleoside diphosphate kinase II, chloroplast
  misc_feature (15)..(231): Homolog of NCBI NO: 27807824 NR Description: nucleoside diphosphate kinase [Nicotiana tabacum]
  misc_feature (41)..(231): Homolog of NCBI NO: 1346673 NR Description: Nucleoside diphosphate kinase II, chloroplast
  misc_feature (83)..(231): Homolog of NCBI NO: 22297811 NR Description: nucleoside diphosphate kinase
  misc_feature (83)..(231): Homolog of NCBI NO: 20138835 NR Description: Nucleoside diphosphate kinase (NDK) (NDP kinase)
  misc_feature (84)..(231): Homolog of NCBI NO: 9652119 NR Description: nucleoside diphosphate kinase [Lolium perenne]

SEQ ID NO: 78251 - protein, 152 aa, Arabidopsis thaliana; identical to SEQ ID NO: 25318
  peptide (1)..(152): Ceres Seq. ID no. 12640130
  misc_feature (5)..(142): Pfam Name: Nucleoside diphosphate kinase Pfam Description: Nucleoside diphosphate kinase
  misc_feature (1)..(152): Homolog of NCBI NO: 30697820 NR Description: nucleotide diphosphate kinase Ia (emb|CAB58230.1) thaliana] >gi|12644076|sp|O64903|NDK2_ARATH Nucleoside kinase II, chloroplast precursor (NDK II) (NDP kinase II) (NDPK
  misc_feature (1)..(152): Homolog of NCBI NO: 3093480 NR Description: nucleoside diphosphate kinase type 2 [Arabidopsis
  misc_feature (1)..(152): Homolog of NCBI NO: 21832064 NR Description: nucloside diphosphate kinase 2 [Brassica rapa]
  misc_feature (1)..(152): Homolog of NCBI NO: 11260887 NR Description: nucleoside-diphosphate kinase (EC 2.7.4.6) Ia - Arabidopsis thaliana >gi|3063661|gb|AAC14280.1| nucleoside
  misc_feature (1)..(152): Homolog of NCBI NO: 266607 NR Description: Nucleoside diphosphate kinase II, chloroplast
  misc_feature (1)..(152): Homolog of NCBI NO: 27807824 NR Description: nucleoside diphosphate kinase [Nicotiana tabacum]
  misc_feature (1)..(152): Homolog of NCBI NO: 1346673 NR Description: Nucleoside diphosphate kinase II, chloroplast
  misc_feature (4)..(152): Homolog of NCBI NO: 22297811 NR Description: nucleoside diphosphate kinase
  misc_feature (4)..(152): Homolog of NCBI NO: 20138835 NR Description: Nucleoside diphosphate kinase (NDK) (NDP kinase)
  misc_feature (5)..(152): Homolog of NCBI NO: 9652119 NR Description: nucleoside diphosphate kinase [Lolium perenne]

SEQ ID NO: 78252 - DNA, 579 bp, Arabidopsis thaliana
  misc_feature (1)..(579): Ceres Seq. ID no. 12640157
  misc_feature: MA Experiment ID: 20000306 Result: Up-regulated in Transcription
  misc_feature: MA Experiment 20000306 PARAMETER Experiment Name: At_Germinating_Seeds_Sub_P Parameter: Age (hr) Value: 6 vs. 0
  misc_feature: MA Experiment 20000306 PARAMETER Experiment Name: At_Germinating_Seeds_Sub_P Parameter: Organism Value: A. thaliana
  misc_feature: MA Experiment 20000306 PARAMETER Experiment Name: At_Germinating_Seeds_Sub_P Parameter: Plant Line Value: WS
  misc_feature: MA Experiment 20000306 PARAMETER Experiment Name: At_Germinating_Seeds_Sub_P Parameter: Tissue Value: Germinating Seeds
  misc_feature: MA Experiment ID: 20000307 Result: Up-regulated in Transcription
  misc_feature: MA Experiment 20000307 PARAMETER Experiment Name: At_Germinating_Seeds_Sub_P Parameter: Age (hr) Value: 24 vs. 0
  misc_feature: MA Experiment 20000307 PARAMETER Experiment Name: At_Germinating_Seeds_Sub_P Parameter: Organism Value: A. thaliana
  misc_feature: MA Experiment 20000307 PARAMETER Experiment Name: At_Germinating_Seeds_Sub_P Parameter: Plant Line Value: WS
  misc_feature: MA Experiment 20000307 PARAMETER Experiment Name: At_Germinating_Seeds_Sub_P Parameter: Tissue Value: Germinating Seeds
  misc_feature: MA Experiment ID: 20000314 Result: Down-regulated in Transcription
  misc_feature: MA Experiment 20000314 PARAMETER Experiment Name: At_14day_Shoots-Roots_Sub_P Parameter: Age (day) Value: 14
  misc_feature: MA Experiment 20000314 PARAMETER Experiment Name: At_14day_Shoots-Roots_Sub_P Parameter: Organism Value: A. thaliana
  misc_feature: MA Experiment 20000314 PARAMETER Experiment Name: At_14day_Shoots-Roots_Sub_P Parameter: Plant Line Value: WS
  misc_feature: MA Experiment 20000314 PARAMETER Experiment Name: At_14day_Shoots-Roots_Sub_P Parameter: Tissue Value: Roots vs. Whole Plant
atgttctggacataccagagacaagagatcgaacaggtaaacgatttcaaaaaccatcagctccctctagctcgtatcaaaaaaatcatgaaagctgatgaagatgtgcgtatgatctccgccgaagcaccgattctcttcgcgaaagcttgtgagcttttcattctcgaacttacgattagatcttggcttcacgctgaagagaacaaacgtcgtacgcttcagaaaaacgatatcgctgctgcgattactagaaccgatatcttcgatttccttgttgatattgttcctagggaagagatcaaggaagaggaagatgcagcatcggctcttggtggaggaggtatggttgctcccgccgcgagcggtgttccttattattatccaccgatgggacaaccggcggttcctggagggatgatgattggaagaccggcgatggatcctagcggtgtttatgctcagcctccttctcaggcatggcaaagcgtttggcagaattcagctggtggtggtgatgatgtgtcttatggaagtggaggaagtagcggccatggtaatctcgatagccaagggtaa

SEQ ID NO: 78253 - protein, 192 aa, Arabidopsis thaliana
  peptide (1)..(192): Ceres Seq. ID no. 12640158
  misc_feature (1)..(192): Homolog of NCBI NO: 15242784 NR Description: transcription factor Hap5a-like protein; protein At5g63470.1, supported by cDNA: gi_18252934 [Arabidopsis
  misc_feature (1)..(192): Homolog of NCBI NO: 15228405 NR Description: transcription factor Hap5a; protein id: supported by cDNA: 21604., supported by cDNA: gi_20260195
  misc_feature (35)..(192): Homolog of NCBI NO: 2398531 NR Description: Transcription factor [Arabidopsis thaliana]
  misc_feature (2)..(162): Homolog of NCBI NO: 15221912 NR Description: heme activated protein, putative; protein id: [Arabidopsis thaliana] >gi|3776575|gb|AAC64892.1| Similar to
  misc_feature (2)..(169): Homolog of NCBI NO: 15223986 NR Description: putative transcription factor; protein id: supported by cDNA: 1911. [Arabidopsis thaliana] putative transcription factor [Arabidopsis thaliana]
  misc_feature (2)..(169): Homolog of NCBI NO: 25372763 NR Description: hypothetical protein [imported] - Arabidopsis
  misc_feature (2)..(169): Homolog of NCBI NO: 6289057 NR Description: heme activated protein [Arabidopsis thaliana]
  misc_feature (1)..(128): Homolog of NCBI NO: 15223482 NR Description: transcription factor, putative; protein id: supported by cDNA: 26157., supported by cDNA: gi_18252952 thaliana] >gi|18252953|gb|AAL62403.1| transcription putative
  misc_feature (1)..(128): Homolog of NCBI NO: 21554704 NR Description: transcription factor, putative [Arabidopsis
  misc_feature (8)..(128): Homolog of NCBI NO: 2398533 NR Description: Transcription factor [Arabidopsis thaliana]
MFWTYQRQEIEQVNDFKNHQLPLARIKKIMKADEDVRMISAEAPILFAKACELFILELTIRSWLHAEENKRRTLQKNDIAAAITRTDIFDFLVDIVPREEIKEEEDAASALGGGGMVAPAASGVPYYYPPMGQPAVPGGMMIGRPAMDPSGVYAQPPSQAWQSVWQNSAGGGDDVSYGSGGSSGHGNLDSQG

SEQ ID NO: 78254 - protein, 163 aa, Arabidopsis thaliana
  peptide (1)..(163): Ceres Seq. ID no. 12640159
  misc_feature (1)..(163): Homolog of NCBI NO: 15242784 NR Description: transcription factor Hap5a-like protein; protein At5g63470.1, supported by cDNA: gi_18252934 [Arabidopsis
  misc_feature (1)..(163): Homolog of NCBI NO: 15228405 NR Description: transcription factor Hap5a; protein id: supported by cDNA: 21604., supported by cDNA: gi_20260195
  misc_feature (6)..(163): Homolog of NCBI NO: 2398531 NR Description: Transcription factor [Arabidopsis thaliana]
  misc_feature (1)..(133): Homolog of NCBI NO: 15221912 NR Description: heme activated protein, putative; protein id: [Arabidopsis thaliana] >gi|3776575|gb|AAC64892.1| Similar to
  misc_feature (1)..(140): Homolog of NCBI NO: 15223986 NR Description: putative transcription factor; protein id: supported by cDNA: 1911. [Arabidopsis thaliana] putative transcription factor [Arabidopsis thaliana]
  misc_feature (1)..(140): Homolog of NCBI NO: 25372763 NR Description: hypothetical protein [imported] - Arabidopsis
  misc_feature (1)..(140): Homolog of NCBI NO: 6289057 NR Description: heme activated protein [Arabidopsis thaliana]
  misc_feature (1)..(99): Homolog of NCBI NO: 15223482 NR Description: transcription factor, putative; protein id: supported by cDNA: 26157., supported by cDNA: gi_18252952 thaliana] >gi|18252953|gb|AAL62403.1| transcription putative
  misc_feature (1)..(99): Homolog of NCBI NO: 21554704 NR Description: transcription factor, putative [Arabidopsis
  misc_feature (1)..(99): Homolog of NCBI NO: 2398533 NR Description: Transcription factor [Arabidopsis thaliana]
MKADEDVRMISAEAPILFAKACELFILELTIRSWLHAEENKRRTLQKNDIAAAITRTDIFDFLVDIVPREEIKEEEDAASALGGGGMVAPAASGVPYYYPPMGQPAVPGGMMIGRPAMDPSGVYAQPPSQAWQSVWQNSAGGGDDVSYGSGGSSGHGNLDSQG

SEQ ID NO: 78255 - protein, 155 aa, Arabidopsis thaliana
  peptide (1)..(155): Ceres Seq. ID no. 12640160
  misc_feature (1)..(155): Homolog of NCBI NO: 15242784 NR Description: transcription factor Hap5a-like protein; protein At5g63470.1, supported by cDNA: gi_18252934 [Arabidopsis
  misc_feature (1)..(155): Homolog of NCBI NO: 15228405 NR Description: transcription factor Hap5a; protein id: supported by cDNA: 21604., supported by cDNA: gi_20260195
  misc_feature (1)..(155): Homolog of NCBI NO: 2398531 NR Description: Transcription factor [Arabidopsis thaliana]
  misc_feature (1)..(125): Homolog of NCBI NO: 15221912 NR Description: heme activated protein, putative; protein id: [Arabidopsis thaliana] >gi|3776575|gb|AAC64892.1| Similar to
  misc_feature (1)..(132): Homolog of NCBI NO: 15223986 NR Description: putative transcription factor; protein id: supported by cDNA: 1911. [Arabidopsis thaliana] putative transcription factor [Arabidopsis thaliana]
  misc_feature (1)..(132): Homolog of NCBI NO: 25372763 NR Description: hypothetical protein [imported] - Arabidopsis
  misc_feature (1)..(132): Homolog of NCBI NO: 6289057 NR Description: heme activated protein [Arabidopsis thaliana]
  misc_feature (1)..(91): Homolog of NCBI NO: 15223482 NR Description: transcription factor, putative; protein id: supported by cDNA: 26157., supported by cDNA: gi_18252952 thaliana] >gi|18252953|gb|AAL62403.1| transcription putative
  misc_feature (1)..(91): Homolog of NCBI NO: 21554704 NR Description: transcription factor, putative [Arabidopsis
  misc_feature (1)..(91): Homolog of NCBI NO: 2398533 NR Description: Transcription factor [Arabidopsis thaliana]
MISAEAPILFAKACELFILELTIRSWLHAEENKRRTLQKNDIAAAITRTDIFDFLVDIVPREEIKEEEDAASALGGGGMVAPAASGVPYYYPPMGQPAVPGGMMIGRPAMDPSGVYAQPPSQAWQSVWQNSAGGGDDVSYGSGGSSGHGNLDSQG

SEQ ID NO: 78256 - DNA, 1117 bp, Arabidopsis thaliana
  misc_feature (1)..(1117): Ceres Seq. ID no. 12640179
  misc_feature: MA Experiment ID: 108434 Result: Down-regulated in Transcription
  misc_feature: MA Experiment 108434 PARAMETER Experiment Name: At_Root_Tips_cDNA_P Parameter: Tissue Value: Root Tips
  misc_feature: MA Experiment ID: 108461 Result: Up-regulated in Transcription
  misc_feature: MA Experiment 108461 PARAMETER Experiment Name: At_Germinating_Seeds_cDNA_P Parameter: Age (day) Value: 1 vs. 0
  misc_feature: MA Experiment 108461 PARAMETER Experiment Name: At_Germinating_Seeds_cDNA_P Parameter: Tissue Value: Germinating Seeds
  misc_feature: MA Experiment ID: 108462 Result: Up-regulated in Transcription
  misc_feature: MA Experiment 108462 PARAMETER Experiment Name: At_Germinating_Seeds_cDNA_P Parameter: Age (day) Value: 2 vs. 0
  misc_feature: MA Experiment 108462 PARAMETER Experiment Name: At_Germinating_Seeds_cDNA_P Parameter: Tissue Value: Germinating Seeds
  misc_feature: MA Experiment ID: 108463 Result: Up-regulated in Transcription
  misc_feature: MA Experiment 108463 PARAMETER Experiment Name: At_Germinating_Seeds_cDNA_P Parameter: Age (day) Value: 3 vs. 0
  misc_feature: MA Experiment 108463 PARAMETER Experiment Name: At_Germinating_Seeds_cDNA_P Parameter: Tissue Value: Germinating Seeds
  misc_feature: MA Experiment ID: 108464 Result: Up-regulated in Transcription
  misc_feature: MA Experiment 108464 PARAMETER Experiment Name: At_Germinating_Seeds_cDNA_P Parameter: Age (day) Value: 4 vs. 0
  misc_feature: MA Experiment 108464 PARAMETER Experiment Name: At_Germinating_Seeds_cDNA_P Parameter: Tissue Value: Germinating Seeds
  misc_feature: MA Experiment ID: 20000227 Result: Down-regulated in Transcription
  misc_feature: MA Experiment 20000227 PARAMETER Experiment Name: At_Root-Tips-vs-Tops_P Parameter: Tissue Value: Root Tips vs. Root Tops
  misc_feature: MA Experiment ID: 20000451 Result: Down-regulated in Transcription
  misc_feature: MA Experiment 20000451 PARAMETER Experiment Name: At_CS6879_Shoots-Roots_P Parameter: Age (day) Value: 14
  misc_feature: MA Experiment 20000451 PARAMETER Experiment Name: At_CS6879_Shoots-Roots_P Parameter: Organism Value: A. thaliana
  misc_feature: MA Experiment 20000451 PARAMETER Experiment Name: At_CS6879_Shoots-Roots_P Parameter: Plant Line Value: CS6879 vs. WS
  misc_feature: MA Experiment 20000451 PARAMETER Experiment Name: At_CS6879_Shoots-Roots_P Parameter: Tissue Value: Roots
  misc_feature: MA Experiment ID: 20001450 Result: Down-regulated in Transcription
  misc_feature: MA Experiment 20001450 PARAMETER Experiment Name: At_Far-red-induction_P Parameter: Age (day) Value: 7
  misc_feature: MA Experiment 20001450 PARAMETER Experiment Name: At_Far-red-induction_P Parameter: Light Value: Far-red vs. White
  misc_feature: MA Experiment 20001450 PARAMETER Experiment Name: At_Far-red-induction_P Parameter: Organism Value: A. thaliana
  misc_feature: MA Experiment 20001450 PARAMETER Experiment Name: At_Far-red-induction_P Parameter: Plant Line Value: Columbia
  misc_feature: MA Experiment 20001450 PARAMETER Experiment Name: At_Far-red-induction_P Parameter: Timepoint (hr) Value: 8
  misc_feature: MA Experiment 20001450 PARAMETER Experiment Name: At_Far-red-induction_P Parameter: Tissue Value: Whole Plant
  misc_feature: MA Experiment ID: 20001761 Result: Down-regulated in Transcription
  misc_feature: MA Experiment 20001761 PARAMETER Experiment Name: At_50mM_NH4NO3_L-to-H_P Parameter: Timepoint (hr) Value: 4
  misc_feature: MA Experiment 20001761 PARAMETER Experiment Name: At_50mM_NH4NO3_L-to-H_P Parameter: Tissue Value: Siliques
  misc_feature: MA Experiment 20001761 PARAMETER Experiment Name: At_50mM_NH4NO3_L-to-H_P Parameter: Treatment Value: 50mM NH4NO3 vs 100mM Mannitol
  misc_feature: MA Experiment ID: 20001906 Result: Up-regulated in Transcription
  misc_feature: MA Experiment 20001906 PARAMETER Experiment Name: At_Drought_Reproduction_P Parameter: Age (day) Value: 35
  misc_feature: MA Experiment 20001906 PARAMETER Experiment Name: At_Drought_Reproduction_P Parameter: Organism Value: A. thaliana
  misc_feature: MA Experiment 20001906 PARAMETER Experiment Name: At_Drought_Reproduction_P Parameter: Plant Line Value: WS
  misc_feature: MA Experiment 20001906 PARAMETER Experiment Name: At_Drought_Reproduction_P Parameter: Timepoint (day) Value: 5
  misc_feature: MA Experiment 20001906 PARAMETER Experiment Name: At_Drought_Reproduction_P Parameter: Tissue Value: Siliques
  misc_feature: MA Experiment 20001906 PARAMETER Experiment Name: At_Drought_Reproduction_P Parameter: Treatment Value: Drought vs. No Drought
aggaacgagtgaaactgaaaaccatggagatggagaaaaaccaacacatttcttcgctggacatccccgttattgatctaagtaatcccgatgaagagcttgtggcaagtgcggtggtcaaagcgagccaagagtggggaatatttcaggtggttaaccacggaatcccgaccgagctgatactgcggttgctacaagtgggaatggagtttttcgagctaccggagacagagaaggaagccgtagcgaagccagaagactccttggacatagaaggatacagaaccaagtaccagaaagatctagaaggtagaaacgcatgggtggatcatctctttcaccgcatctggccaccgtctagagtcaatcacaaattctggcctaagaatcctccagaatacattgaagtgaatgaagagtacgcaagtcacataaagaagctatcggagaaaatcatggaatggttatcagaaggactaggtttaaggcatgaggcgttgaaggaaggtctaggcggcgaaacgattgagtatctaatgaaaatcaattactatccgccgtgtccagatccggagttagtcgtgggagctcctgatcacactgatgtcaatggaatcacactcctagtcgctaatgaagctttagggcttcaagcattcaaagataaccaatggatcgacgcggagtataccacttccgggatcatcgtcatcatcggcgatcaattcttgagaatgagcaatgggaagtataagagtgtggagcatagggcgaagatggataaggagaagacgagaatctcgtggccggtttttgtggaatctagccttgatcaagtcttcggacctttgccggagctaattaccggtgatgagaacgttcccaagtttaagccttatgtctacaaagactacaaatttcgtaagcttaagaagcttcttctcgactgagaaaatctcataataacccataaacagaaaagagatcatgaataaaaaaaatatttgtttggtttgcttctgctttaattaataagttttatctatttatcaaattacagcattgtttgtatggtgcatgtacgtattttagtattaatctatttggattgtaacgt

SEQ ID NO: 78257 - protein, 315 aa, Arabidopsis thaliana
  peptide (1)..(315): Ceres Seq. ID no. 12640180
  misc_feature (175)..(274): Pfam Name: 2OG-Fe(II) oxygenase superfamily Pfam Description: 2OG-Fe(II) oxygenase superfamily
  misc_feature (8)..(315): Homolog of NCBI NO: 15242827 NR Description: flavonol synthase; protein id: At5g63590.1, by cDNA: 21505. [Arabidopsis thaliana] flavonol synthase [Arabidopsis thaliana]
  misc_feature (8)..(315): Homolog of NCBI NO: 21554244 NR Description: flavonol synthase [Arabidopsis thaliana]
  misc_feature (21)..(315): Homolog of NCBI NO: 15242339 NR Description: flavonol synthase (FLS) (sp Q96330); protein id: supported by cDNA: 23924., supported by cDNA: gi_16604339, by cDNA: gi_1805306, supported by cDNA: gi_1805308 [Arabidopsis
  misc_feature (8)..(315): Homolog of NCBI NO: 10177039 NR Description: flavonol synthase [Arabidopsis thaliana]
  misc_feature (17)..(315): Homolog of NCBI NO: 15242828 NR Description: 1-aminocyclopropane-1-carboxylic acid protein; protein id: At5g63600.1, supported by cDNA: gi_21281021
  misc_feature (15)..(312): Homolog of NCBI NO: 14916566 NR Description: Flavonol synthase (FLS) (CitFLS)
  misc_feature (19)..(312): Homolog of NCBI NO: 14916564 NR Description: Flavonol synthase (FLS)
  misc_feature (21)..(309): Homolog of NCBI NO: 6015164 NR Description: Flavonol synthase (FLS)
  misc_feature (20)..(312): Homolog of NCBI NO: 29123532 NR Description: flavonol synthase [Allium cepa]
  misc_feature (19)..(312): Homolog of NCBI NO: 1706822 NR Description: Flavonol synthase (FLS) >gi|421946|pir||S33510
ERVKLKTMEMEKNQHISSLDIPVIDLSNPDEELVASAVVKASQEWGIFQVVNHGIPTELILRLLQVGMEFFELPETEKEAVAKPEDSLDIEGYRTKYQKDLEGRNAWVDHLFHRIWPPSRVNHKFWPKNPPEYIEVNEEYASHIKKLSEKIMEWLSEGLGLRHEALKEGLGGETIEYLMKINYYPPCPDPELVVGAPDHTDVNGITLLVANEALGLQAFKDNQWIDAEYTTSGIIVIIGDQFLRMSNGKYKSVEHRAKMDKEKTRISWPVFVESSLDQVFGPLPELITGDENVPKFKPYVYKDYKFRKLKKLLLD

SEQ ID NO: 78258 - protein, 308 aa, Arabidopsis thaliana
  peptide (1)..(308): Ceres Seq. ID no. 12640181
  misc_feature (168)..(267): Pfam Name: 2OG-Fe(II) oxygenase superfamily Pfam Description: 2OG-Fe(II) oxygenase superfamily
  misc_feature (1)..(308): Homolog of NCBI NO: 15242827 NR Description: flavonol synthase; protein id: At5g63590.1, by cDNA: 21505. [Arabidopsis thaliana] flavonol synthase [Arabidopsis thaliana]
  misc_feature (1)..(308): Homolog of NCBI NO: 21554244 NR Description: flavonol synthase [Arabidopsis thaliana]
  misc_feature (14)..(308): Homolog of NCBI NO: 15242339 NR Description: flavonol synthase (FLS) (sp Q96330); protein id: supported by cDNA: 23924., supported by cDNA: gi_16604339, by cDNA: gi_1805306, supported by cDNA: gi_1805308 [Arabidopsis
  misc_feature (1)..(308): Homolog of NCBI NO: 10177039 NR Description: flavonol synthase [Arabidopsis thaliana]
  misc_feature (10)..(308): Homolog of NCBI NO: 15242828 NR Description: 1-aminocyclopropane-1-carboxylic acid protein; protein id: At5g63600.1, supported by cDNA: gi_21281021
  misc_feature (8)..(305): Homolog of NCBI NO: 14916566 NR Description: Flavonol synthase (FLS) (CitFLS)
  misc_feature (12)..(305): Homolog of NCBI NO: 14916564 NR Description: Flavonol synthase (FLS)
  misc_feature (14)..(302): Homolog of NCBI NO: 6015164 NR Description: Flavonol synthase (FLS)
  misc_feature (13)..(305): Homolog of NCBI NO: 29123532 NR Description: flavonol synthase [Allium cepa]
  misc_feature (12)..(305): Homolog of NCBI NO: 1706822 NR Description: Flavonol synthase (FLS) >gi|421946|pir||S33510
MEMEKNQHISSLDIPVIDLSNPDEELVASAVVKASQEWGIFQVVNHGIPTELILRLLQVGMEFFELPETEKEAVAKPEDSLDIEGYRTKYQKDLEGRNAWVDHLFHRIWPPSRVNHKFWPKNPPEYIEVNEEYASHIKKLSEKIMEWLSEGLGLRHEALKEGLGGETIEYLMKINYYPPCPDPELVVGAPDHTDVNGITLLVANEALGLQAFKDNQWIDAEYTTSGIIVIIGDQFLRMSNGKYKSVEHRAKMDKEKTRISWPVFVESSLDQVFGPLPELITGDENVPKFKPYVYKDYKFRKLKKLLLD

SEQ ID NO: 78259 - protein, 306 aa, Arabidopsis thaliana
  peptide (1)..(306): Ceres Seq. ID no. 12640182
  misc_feature (166)..(265): Pfam Name: 2OG-Fe(II) oxygenase superfamily Pfam Description: 2OG-Fe(II) oxygenase superfamily
  misc_feature (1)..(306): Homolog of NCBI NO: 15242827 NR Description: flavonol synthase; protein id: At5g63590.1, by cDNA: 21505. [Arabidopsis thaliana] flavonol synthase [Arabidopsis thaliana]
  misc_feature (1)..(306): Homolog of NCBI NO: 21554244 NR Description: flavonol synthase [Arabidopsis thaliana]
  misc_feature (12)..(306): Homolog of NCBI NO: 15242339 NR Description: flavonol synthase (FLS) (sp Q96330); protein id: supported by cDNA: 23924., supported by cDNA: gi_16604339, by cDNA: gi_1805306, supported by cDNA: gi_1805308 [Arabidopsis
  misc_feature (1)..(306): Homolog of NCBI NO: 10177039 NR Description: flavonol synthase [Arabidopsis thaliana]
  misc_feature (8)..(306): Homolog of NCBI NO: 15242828 NR Description: 1-aminocyclopropane-1-carboxylic acid protein; protein id: At5g63600.1, supported by cDNA: gi_21281021
  misc_feature (6)..(303): Homolog of NCBI NO: 14916566 NR Description: Flavonol synthase (FLS) (CitFLS)
  misc_feature (10)..(303): Homolog of NCBI NO: 14916564 NR Description: Flavonol synthase (FLS)
  misc_feature (12)..(300): Homolog of NCBI NO: 6015164 NR Description: Flavonol synthase (FLS)
  misc_feature (11)..(303): Homolog of NCBI NO: 29123532 NR Description: flavonol synthase [Allium cepa]
  misc_feature (10)..(303): Homolog of NCBI NO: 1706822 NR Description: Flavonol synthase (FLS) >gi|421946|pir||S33510
MEKNQHISSLDIPVIDLSNPDEELVASAVVKASQEWGIFQVVNHGIPTELILRLLQVGMEFFELPETEKEAVAKPEDSLDIEGYRTKYQKDLEGRNAWVDHLFHRIWPPSRVNHKFWPKNPPEYIEVNEEYASHIKKLSEKIMEWLSEGLGLRHEALKEGLGGETIEYLMKINYYPPCPDPELVVGAPDHTDVNGITLLVANEALGLQAFKDNQWIDAEYTTSGIIVIIGDQFLRMSNGKYKSVEHRAKMDKEKTRISWPVFVESSLDQVFGPLPELITGDENVPKFKPYVYKDYKFRKLKKLLLD

SEQ ID NO: 78260 - DNA, 1354 bp, Arabidopsis thaliana
  misc_feature (1)..(1354): Ceres Seq. ID no. 12640191
  misc_feature: MA Experiment ID: 108433 Result: Down-regulated in Transcription
  misc_feature: MA Experiment 108433 PARAMETER Experiment Name: At_rhl_Mutant2_cDNA_P Parameter: Age (day) Value: 7
  misc_feature: MA Experiment 108433 PARAMETER Experiment Name: At_rhl_Mutant2_cDNA_P Parameter: Organism Value: A. thaliana
  misc_feature: MA Experiment 108433 PARAMETER Experiment Name: At_rhl_Mutant2_cDNA_P Parameter: Plant Line Value: rhl Mutant vs. wt landsburg
  misc_feature: MA Experiment 108433 PARAMETER Experiment Name: At_rhl_Mutant2_cDNA_P Parameter: Tissue Value: Roots
  misc_feature: MA Experiment ID: 20000315 Result: Down-regulated in Transcription
  misc_feature: MA Experiment 20000315 PARAMETER Experiment Name: At_14day_Shoots-Roots_Sub_P Parameter: Age (day) Value: 14
  misc_feature: MA Experiment 20000315 PARAMETER Experiment Name: At_14day_Shoots-Roots_Sub_P Parameter: Organism Value: A. thaliana
  misc_feature: MA Experiment 20000315 PARAMETER Experiment Name: At_14day_Shoots-Roots_Sub_P Parameter: Plant Line Value: WS
  misc_feature: MA Experiment 20000315 PARAMETER Experiment Name: At_14day_Shoots-Roots_Sub_P Parameter: Tissue Value: Shoots vs. Whole Plant
  misc_feature: MA Experiment ID: 20000328 Result: Down-regulated in Transcription
  misc_feature: MA Experiment 20000328 PARAMETER Experiment Name: At_42deg_Heat_Sub_P Parameter: Age (day) Value: 14
  misc_feature: MA Experiment 20000328 PARAMETER Experiment Name: At_42deg_Heat_Sub_P Parameter: Organism Value: A. thaliana
  misc_feature: MA Experiment 20000328 PARAMETER Experiment Name: At_42deg_Heat_Sub_P Parameter: Plant Line Value: WS
  misc_feature: MA Experiment 20000328 PARAMETER Experiment Name: At_42deg_Heat_Sub_P Parameter: Temperature (deg C) Value: 42 vs. 22
  misc_feature: MA Experiment 20000328 PARAMETER Experiment Name: At_42deg_Heat_Sub_P Parameter: Timepoint (hr) Value: 6
  misc_feature: MA Experiment 20000328 PARAMETER Experiment Name: At_42deg_Heat_Sub_P Parameter: Tissue Value: Aerial
atggcgactgagaatctcaccgataagaatgttgttttcagaaagctgaaatcaaaatccgagaacaaggtttgctttgattgtagtgcgaagaatccaacatgggcttctgttccttatgggatcttcctatgcatcgattgttctgctgttcatcgaagtctaggtgttcatatcagcttcgtcaggtcaacgaacttagactcgtggagtcctgagcagctaagaacaatgatgtttggagggaacaatcgagctcaggtgttttttaagcaacatggatggaatgatggtggtaagattgaggctaagtatacttcaagagctgctgatatgtatagacagactcttgctaaagaagttgctaaagccatggctgaagaaactgttttaccgtcgttatcctctgttgctacttctcagccagtggaatcatctgaaaatgggtttacttctgaatctccgaaagagagttctttgaagcaagaagcagctgttgtctcttcaccaaaagcttctcagaaagttgttgctagtacgtttaagaaacctcttgtttcgcgaaagtctgggaagactggtggtcttggtgctcgtaagcttactactaagtcaaaggataacctctatgagcagaagcctgaagaacctgtacctgtgattcctgctgcttctccaaccaatgacacatcagcagctggatcatcatttgcctctcgatttgagtactttgatgatgagcaatctggtgggcaaagtggcacacgggtgcttagccatgttgctccaccaaagtcatcaaatttctttaatgaatttggaatggacagtgctttccccaagaagtcaagctcaagctcatccaaagctcaggttgaagaaacagatgaagcaagaaagaagttttcaaacgccaaatcgatttcctctgcccaatttttcggaaatcagaacagagatgccgatcttgactcaaaagctacccttcagaagttctcgggttcagcagctatttcaagttctgatctttttggccacggaccagatgattccaacatcgatatcactgcaagcgatctcatcaaccgaatttctttccaggcgcagcaagatatgtcatctattgctaacttagctgaggaaacaaagaataagctgggaacatttgcctctagtatattcagtgatcttcaggatagaatgctgtaagaaacatacaaaggatcttgtcttttgatttacagagaacaaattgttggatataaatgtcatttttatttttggtttgactttgtagttgaaagagtgatttttgaggtaaattgttaaatgtggaatttgataatttgatgtg

SEQ ID NO: 78261 - protein, 402 aa, Arabidopsis thaliana
  peptide (1)..(402): Ceres Seq. ID no. 12640192
  misc_feature (10)..(126): Pfam Name: Putative GTPase activating protein for Arf Pfam Description: Putative GTPase activating protein for Arf
  misc_feature (1)..(402): Homolog of NCBI NO: 15237500 NR Description: zinc finger protein Glo3-like; protein id:
  misc_feature (2)..(402): Homolog of NCBI NO: 7487780 NR Description: hypothetical protein T6K21.70 - Arabidopsis >gi|2894598|emb|CAA17132.1| putative protein [Arabidopsis >gi|7268541|emb|CAB78791.1| putative protein [Arabidopsis
  misc_feature (2)..(402): Homolog of NCBI NO: 18414983 NR Description: Expressed protein; protein id: At4g17890.1 thaliana] >gi|24030421|gb|AAN41368.1| unknown protein
  misc_feature (2)..(402): Homolog of NCBI NO: 13430530 NR Description: unknown protein [Arabidopsis thaliana]
  misc_feature (1)..(402): Homolog of NCBI NO: 37537094 NR Description: unknown protein [Oryza sativa (japonica
  misc_feature (1)..(394): Homolog of NCBI NO: 18403775 NR Description: expressed protein; protein id: At2g35210.1, by cDNA: 159093. [Arabidopsis thaliana] >gi|25408361|pir||H84765
  misc_feature (1)..(402): Homolog of NCBI NO: 29126345 NR Description: putative zinc finger protein [Oryza sativa
  misc_feature (151)..(400): Homolog of NCBI NO: 37362182 NR Description: ADP-ribosylation factor GTPase activating protein
  misc_feature (10)..(154): Homolog of NCBI NO: 37362182 NR Description: ADP-ribosylation factor GTPase activating protein
  misc_feature (1)..(165): Homolog of NCBI NO: 27695479 NR Description: Similar to ADP-ribosylation factor GTPase
MATENLTDKNVVFRKLKSKSENKVCFDCSAKNPTWASVPYGIFLCIDCSAVHRSLGVHISFVRSTNLDSWSPEQLRTMMFGGNNRAQVFFKQHGWNDGGKIEAKYTSRAADMYRQTLAKEVAKAMAEETVLPSLSSVATSQPVESSENGFTSESPKESSLKQEAAVVSSPKASQKVVASTFKKPLVSRKSGKTGGLGARKLTTKSKDNLYEQKPEEPVPVIPAASPTNDTSAAGSSFASRFEYFDDEQSGGQSGTRVLSHVAPPKSSNFFNEFGMDSAFPKKSSSSSSKAQVEETDEARKKFSNAKSISSAQFFGNQNRDADLDSKATLQKFSGSAAISSSDLFGHGPDDSNIDITASDLINRISFQAQQDMSSIANLAEETKNKLGTFASSIFSDLQDRML

SEQ ID NO: 78262 - protein, 325 aa, Arabidopsis thaliana
  peptide (1)..(325): Ceres Seq. ID no. 12640193
  misc_feature (1)..(325): Homolog of NCBI NO: 15237500 NR Description: zinc finger protein Glo3-like; protein id:
  misc_feature (1)..(325): Homolog of NCBI NO: 7487780 NR Description: hypothetical protein T6K21.70 - Arabidopsis >gi|2894598|emb|CAA17132.1| putative protein [Arabidopsis >gi|7268541|emb|CAB78791.1| putative protein [Arabidopsis
  misc_feature (1)..(325): Homolog of NCBI NO: 18414983 NR Description: Expressed protein; protein id: At4g17890.1 thaliana] >gi|24030421|gb|AAN41368.1| unknown protein
  misc_feature (1)..(325): Homolog of NCBI NO: 13430530 NR Description: unknown protein [Arabidopsis thaliana]
  misc_feature (1)..(325): Homolog of NCBI NO: 37537094 NR Description: unknown protein [Oryza sativa (japonica
  misc_feature (1)..(317): Homolog of NCBI NO: 18403775 NR Description: expressed protein; protein id: At2g35210.1, by cDNA: 159093. [Arabidopsis thaliana] >gi|25408361|pir||H84765
  misc_feature (1)..(325): Homolog of NCBI NO: 29126345 NR Description: putative zinc finger protein [Oryza sativa
  misc_feature (74)..(323): Homolog of NCBI NO: 37362182 NR Description: ADP-ribosylation factor GTPase activating protein
  misc_feature (1)..(77): Homolog of NCBI NO: 37362182 NR Description: ADP-ribosylation factor GTPase activating protein
  misc_feature (1)..(88): Homolog of NCBI NO: 27695479 NR Description: Similar to ADP-ribosylation factor GTPase
MMFGGNNRAQVFFKQHGWNDGGKIEAKYTSRAADMYRQTLAKEVAKAMAEETVLPSLSSVATSQPVESSENGFTSESPKESSLKQEAAVVSSPKASQKVVASTFKKPLVSRKSGKTGGLGARKLTTKSKDNLYEQKPEEPVPVIPAASPTNDTSAAGSSFASRFEYFDDEQSGGQSGTRVLSHVAPPKSSNFFNEFGMDSAFPKKSSSSSSKAQVEETDEARKKFSNAKSISSAQFFGNQNRDADLDSKATLQKFSGSAAISSSDLFGHGPDDSNIDITASDLINRISFQAQQDMSSIANLAEETKNKLGTFASSIFSDLQDRML

SEQ ID NO: 78263 - protein, 324 aa, Arabidopsis thaliana
  peptide (1)..(324): Ceres Seq. ID no. 12640194
  misc_feature (1)..(324): Homolog of NCBI NO: 15237500 NR Description: zinc finger protein Glo3-like; protein id:
  misc_feature (1)..(324): Homolog of NCBI NO: 7487780 NR Description: hypothetical protein T6K21.70 - Arabidopsis >gi|2894598|emb|CAA17132.1| putative protein [Arabidopsis >gi|7268541|emb|CAB78791.1| putative protein [Arabidopsis
  misc_feature (1)..(324): Homolog of NCBI NO: 18414983 NR Description: Expressed protein; protein id: At4g17890.1 thaliana] >gi|24030421|gb|AAN41368.1| unknown protein
  misc_feature (1)..(324): Homolog of NCBI NO: 13430530 NR Description: unknown protein [Arabidopsis thaliana]
  misc_feature (1)..(324): Homolog of NCBI NO: 37537094 NR Description: unknown protein [Oryza sativa (japonica
  misc_feature (1)..(316): Homolog of NCBI NO: 18403775 NR Description: expressed protein; protein id: At2g35210.1, by cDNA: 159093. [Arabidopsis thaliana] >gi|25408361|pir||H84765
  misc_feature (1)..(324): Homolog of NCBI NO: 29126345 NR Description: putative zinc finger protein [Oryza sativa
  misc_feature (73)..(322): Homolog of NCBI NO: 37362182 NR Description: ADP-ribosylation factor GTPase activating protein
  misc_feature (1)..(76): Homolog of NCBI NO: 37362182 NR Description: ADP-ribosylation factor GTPase activating protein
  misc_feature (1)..(87): Homolog of NCBI NO: 27695479 NR Description: Similar to ADP-ribosylation factor GTPase
MFGGNNRAQVFFKQHGWNDGGKIEAKYTSRAADMYRQTLAKEVAKAMAEETVLPSLSSVATSQPVESSENGFTSESPKESSLKQEAAVVSSPKASQKVVASTFKKPLVSRKSGKTGGLGARKLTTKSKDNLYEQKPEEPVPVIPAASPTNDTSAAGSSFASRFEYFDDEQSGGQSGTRVLSHVAPPKSSNFFNEFGMDSAFPKKSSSSSSKAQVEETDEARKKFSNAKSISSAQFFGNQNRDADLDSKATLQKFSGSAAISSSDLFGHGPDDSNIDITASDLINRISFQAQQDMSSIANLAEETKNKLGTFASSIFSDLQDRML

SEQ ID NO: 78264 - DNA, 963 bp, Arabidopsis thaliana
  misc_feature (1)..(963): Ceres Seq. ID no. 12640213
  misc_feature: MA Experiment ID: 20000355 Result: Up-regulated in Transcription
  misc_feature: MA Experiment 20000355 PARAMETER Experiment Name: At_Siliques_Sub_P Parameter: Age (day) Value: 21
  misc_feature: MA Experiment 20000355 PARAMETER Experiment Name: At_Siliques_Sub_P Parameter: Organism Value: A. thaliana
  misc_feature: MA Experiment 20000355 PARAMETER Experiment Name: At_Siliques_Sub_P Parameter: Plant Line Value: WS
  misc_feature: MA Experiment 20000355 PARAMETER Experiment Name: At_Siliques_Sub_P Parameter: Tissue Value: Less Than 5mm Siliques vs. Whole Plant
atggaaaggcctcaagaacctgagtacgaatgcgttgatatctacaaacaaccttcgctacaacaccctaaactccaaaatcaccaaatccaaatgagaccgagcgacgaagttctagccatgctatcaggagatacatcagcaaacgatgaaatggttgctgagtttgatataccagaagaaggatgtcctcaaggacaagctgcagtaatgaagaaaatcgatgccaccccatggcgtggagcatctgcatggtttagtatttaccaacctaaattgacaaataaagaccaatttagcatgagttttatgtggctcaatactgagtataatggcgaacgcaccaatgcccagtttggttgggctgtgattcctgcattatatggcgatgaccgtacaagacttacggcatactggagtccggataaaatcgaaaacggatgttacaatatacaatgtaaaggcttcgttcaaactgaccatagagtcgctcttggtaccggtttttcgaacacctctgtggtgggaggcaaccaatataaagctttctttgcaatcagtcaggatccaaaaacaaagaatttgtggctgacagtccagaagattaacatagggtattggccagaggaacttctaccttttttcaatgatggagcggagtcagttatatatggtggattcacgaatgctccatctgataacattcaactctttgaaatagttagcccacctatgggtaacgggaacaaaccgctggatgaggaagtggatctaaaacatacttgttatatgcactctcttaagtatgtgacaccagattacaagagtgtcgatgttgattccaacaaggtcgccgaagttgcggacgcaggtatatgttacgacgcgatttattttgataaacttgggcggtatggacaaacgtttaccttcggtggaccaggtggttattgtgatgtttga

SEQ ID NO: 78265 - protein, 320 aa, Arabidopsis thaliana
  peptide (1)..(320): Ceres Seq. ID no. 12640214
  misc_feature (79)..(278): Pfam Name: Arabidopsis proteins of unknown function Pfam Description: Arabidopsis proteins of unknown function
  misc_feature (68)..(320): Homolog of NCBI NO: 15237511 NR Description: putative protein; protein id: At5g46820.1
  misc_feature (1)..(72): Homolog of NCBI NO: 15237511 NR Description: putative protein; protein id: At5g46820.1
  misc_feature (66)..(320): Homolog of NCBI NO: 15237510 NR Description: putative protein; protein id: At5g46810.1
  misc_feature (3)..(72): Homolog of NCBI NO: 15237510 NR Description: putative protein; protein id: At5g46810.1
  misc_feature (69)..(318): Homolog of NCBI NO: 15237394 NR Description: putative protein; protein id: At5g46200.1
  misc_feature (5)..(73): Homolog of NCBI NO: 15237394 NR Description: putative protein; protein id: At5g46200.1
  misc_feature (127)..(320): Homolog of NCBI NO: 15236686 NR Description: putative protein; protein id: At4g17860.1
  misc_feature (5)..(70): Homolog of NCBI NO: 15236686 NR Description: putative protein; protein id: At4g17860.1
  misc_feature (8)..(320): Homolog of NCBI NO: 30687450 NR Description: expressed protein [Arabidopsis thaliana]
  misc_feature (8)..(318): Homolog of NCBI NO: 15226935 NR Description: hypothetical protein; protein id: At2g35250.1
MERPQEPEYECVDIYKQPSLQHPKLQNHQIQMRPSDEVLAMLSGDTSANDEMVAEFDIPEEGCPQGQAAVMKKIDATPWRGASAWFSIYQPKLTNKDQFSMSFMWLNTEYNGERTNAQFGWAVIPALYGDDRTRLTAYWSPDKIENGCYNIQCKGFVQTDHRVALGTGFSNTSVVGGNQYKAFFAISQDPKTKNLWLTVQKINIGYWPEELLPFFNDGAESVIYGGFTNAPSDNIQLFEIVSPPMGNGNKPLDEEVDLKHTCYMHSLKYVTPDYKSVDVDSNKVAEVADAGICYDAIYFDKLGRYGQTFTFGGPGGYCDV

SEQ ID NO: 78266 - protein, 289 aa, Arabidopsis thaliana
  peptide (1)..(289): Ceres Seq. ID no. 12640215
  misc_feature (48)..(247): Pfam Name: Arabidopsis proteins of unknown function Pfam Description: Arabidopsis proteins of unknown function
  misc_feature (37)..(289): Homolog of NCBI NO: 15237511 NR Description: putative protein; protein id: At5g46820.1
  misc_feature (1)..(41): Homolog of NCBI NO: 15237511 NR Description: putative protein; protein id: At5g46820.1
  misc_feature (35)..(289): Homolog of NCBI NO: 15237510 NR Description: putative protein; protein id: At5g46810.1
  misc_feature (1)..(41): Homolog of NCBI NO: 15237510 NR Description: putative protein; protein id: At5g46810.1
  misc_feature (38)..(287): Homolog of NCBI NO: 15237394 NR Description: putative protein; protein id: At5g46200.1
  misc_feature (1)..(42): Homolog of NCBI NO: 15237394 NR Description: putative protein; protein id: At5g46200.1
  misc_feature (96)..(289): Homolog of NCBI NO: 15236686 NR Description: putative protein; protein id: At4g17860.1
  misc_feature (1)..(39): Homolog of NCBI NO: 15236686 NR Description: putative protein; protein id: At4g17860.1
  misc_feature (1)..(289): Homolog of NCBI NO: 30687450 NR Description: expressed protein [Arabidopsis thaliana]
  misc_feature (1)..(287): Homolog of NCBI NO: 15226935 NR Description: hypothetical protein; protein id: At2g35250.1
MRPSDEVLAMLSGDTSANDEMVAEFDIPEEGCPQGQAAVMKKIDATPWRGASAWFSIYQPKLTNKDQFSMSFMWLNTEYNGERTNAQFGWAVIPALYGDDRTRLTAYWSPDKIENGCYNIQCKGFVQTDHRVALGTGFSNTSVVGGNQYKAFFAISQDPKTKNLWLTVQKINIGYWPEELLPFFNDGAESVIYGGFTNAPSDNIQLFEIVSPPMGNGNKPLDEEVDLKHTCYMHSLKYVTPDYKSVDVDSNKVAEVADAGICYDAIYFDKLGRYGQTFTFGGPGGYCDV

SEQ ID NO: 78267 - protein, 280 aa, Arabidopsis thaliana
  peptide (1)..(280): Ceres Seq. ID no. 12640216
  misc_feature (39)..(238): Pfam Name: Arabidopsis proteins of unknown function Pfam Description: Arabidopsis proteins of unknown function
  misc_feature (28)..(280): Homolog of NCBI NO: 15237511 NR Description: putative protein; protein id: At5g46820.1
  misc_feature (1)..(32): Homolog of NCBI NO: 15237511 NR Description: putative protein; protein id: At5g46820.1
  misc_feature (26)..(280): Homolog of NCBI NO: 15237510 NR Description: putative protein; protein id: At5g46810.1
  misc_feature (1)..(32): Homolog of NCBI NO: 15237510 NR Description: putative protein; protein id: At5g46810.1
  misc_feature (29)..(278): Homolog of NCBI NO: 15237394 NR Description: putative protein; protein id: At5g46200.1
  misc_feature (1)..(33): Homolog of NCBI NO: 15237394 NR Description: putative protein; protein id: At5g46200.1
  misc_feature (87)..(280): Homolog of NCBI NO: 15236686 NR Description: putative protein; protein id: At4g17860.1
  misc_feature (1)..(30): Homolog of NCBI NO: 15236686 NR Description: putative protein; protein id: At4g17860.1
  misc_feature (1)..(280): Homolog of NCBI NO: 30687450 NR Description: expressed protein [Arabidopsis thaliana]
  misc_feature (1)..(278): Homolog of NCBI NO: 15226935 NR Description: hypothetical protein; protein id: At2g35250.1
MLSGDTSANDEMVAEFDIPEEGCPQGQAAVMKKIDATPWRGASAWFSIYQPKLTNKDQFSMSFMWLNTEYNGERTNAQFGWAVIPALYGDDRTRLTAYWSPDKIENGCYNIQCKGFVQTDHRVALGTGFSNTSVVGGNQYKAFFAISQDPKTKNLWLTVQKINIGYWPEELLPFFNDGAESVIYGGFTNAPSDNIQLFEIVSPPMGNGNKPLDEEVDLKHTCYMHSLKYVTPDYKSVDVDSNKVAEVADAGICYDAIYFDKLGRYGQTFTFGGPGGYCDV

SEQ ID NO: 78268 - DNA, 1272 bp, Arabidopsis thaliana
  misc_feature (1)..(1272): Ceres Seq. ID no. 12640234
  misc_feature: MA Experiment ID: 108577 Result: Down-regulated in Transcription
  misc_feature: MA Experiment 108577 PARAMETER Experiment Name: At_42deg_Heat_cDNA_P Parameter: Temperature (deg C) Value: 42 vs. 22
  misc_feature: MA Experiment 108577 PARAMETER Experiment Name: At_42deg_Heat_cDNA_P Parameter: Timepoint (hr) Value: 6
  misc_feature: MA Experiment 108577 PARAMETER Experiment Name: At_42deg_Heat_cDNA_P Parameter: Tissue Value: Aerial
  misc_feature: MA Experiment ID: 20000069 Result: Up-regulated in Transcription
  misc_feature: MA Experiment 20000069 PARAMETER Experiment Name: At_100uM_ABA_Mutants_cDNA_P Parameter: Plant Line Value: CS23
  misc_feature: MA Experiment 20000069 PARAMETER Experiment Name: At_100uM_ABA_Mutants_cDNA_P Parameter: Timepoint (hr) Value: 6
  misc_feature: MA Experiment 20000069 PARAMETER Experiment Name: At_100uM_ABA_Mutants_cDNA_P Parameter: Tissue Value: Aerial
  misc_feature: MA Experiment 20000069 PARAMETER Experiment Name: At_100uM_ABA_Mutants_cDNA_P Parameter: Treatment Value: 100uM ABA vs. No Treatment
  misc_feature: MA Experiment ID: 20000070 Result: Up-regulated in Transcription
  misc_feature: MA Experiment 20000070 PARAMETER Experiment Name: At_100uM_ABA_Mutants_cDNA_P Parameter: Plant Line Value: CS24
  misc_feature: MA Experiment 20000070 PARAMETER Experiment Name: At_100uM_ABA_Mutants_cDNA_P Parameter: Timepoint (hr) Value: 6
  misc_feature: MA Experiment 20000070 PARAMETER Experiment Name: At_100uM_ABA_Mutants_cDNA_P Parameter: Tissue Value: Aerial
  misc_feature: MA Experiment 20000070 PARAMETER Experiment Name: At_100uM_ABA_Mutants_cDNA_P Parameter: Treatment Value: 100uM ABA vs. No Treatment
  misc_feature: MA Experiment ID: 20000071 Result: Up-regulated in Transcription
  misc_feature: MA Experiment 20000071 PARAMETER Experiment Name: At_100uM_ABA_Mutants_cDNA_P Parameter: Plant Line Value: CS8104
  misc_feature: MA Experiment 20000071 PARAMETER Experiment Name: At_100uM_ABA_Mutants_cDNA_P Parameter: Timepoint (hr) Value: 6
  misc_feature: MA Experiment 20000071 PARAMETER Experiment Name: At_100uM_ABA_Mutants_cDNA_P Parameter: Tissue Value: Aerial
  misc_feature: MA Experiment 20000071 PARAMETER Experiment Name: At_100uM_ABA_Mutants_cDNA_P Parameter: Treatment Value: 100uM ABA vs. No Treatment
  misc_feature: MA Experiment ID: 20000072 Result: Up-regulated in Transcription
  misc_feature: MA Experiment 20000072 PARAMETER Experiment Name: At_100uM_ABA_Mutants_cDNA_P Parameter: Plant Line Value: CS8105
  misc_feature: MA Experiment 20000072 PARAMETER Experiment Name: At_100uM_ABA_Mutants_cDNA_P Parameter: Timepoint (hr) Value: 6
  misc_feature: MA Experiment 20000072 PARAMETER Experiment Name: At_100uM_ABA_Mutants_cDNA_P Parameter: Tissue Value: Aerial
  misc_feature: MA Experiment 20000072 PARAMETER Experiment Name: At_100uM_ABA_Mutants_cDNA_P Parameter: Treatment Value: 100uM ABA vs. No Treatment
  misc_feature: MA Experiment ID: 20000088 Result: Up-regulated in Transcription
  misc_feature: MA Experiment 20000088 PARAMETER Experiment Name: At_100uM_ABA_Mutants_cDNA_P Parameter: Plant Line Value: Landsberg
  misc_feature: MA Experiment 20000088 PARAMETER Experiment Name: At_100uM_ABA_Mutants_cDNA_P Parameter: Timepoint (hr) Value: 6
  misc_feature: MA Experiment 20000088 PARAMETER Experiment Name: At_100uM_ABA_Mutants_cDNA_P Parameter: Tissue Value: Aerial
  misc_feature: MA Experiment 20000088 PARAMETER Experiment Name: At_100uM_ABA_Mutants_cDNA_P Parameter: Treatment Value: 100uM ABA vs. No Treatment
  misc_feature: MA Experiment ID: 20000089 Result: Up-regulated in Transcription
  misc_feature: MA Experiment ID: 20000090 Result: Up-regulated in Transcription
  misc_feature: MA Experiment ID: 20000224 Result: Down-regulated in Transcription
agtttgggattttttcgaaaacgcttttcaatcttcgtctatctgtctccacgatccacgccttgaccttcgttttttttttctcagagattagagaaaactccgataaccaatttctcaatctttttgtagatccaatttttccaggaaaaaaagaggtttcgcgaagaagatgagttttcaagatttagaatcaggaagaggaagatcaacgaggaaattcaatggtggtcgacaagattcgacacaagccgttgcttctggaatattccagatcaataccggagtctccacgtttcagcgactcgttaacacacttggtactcccaaagatacaccggagctccgggagaagctgcacaagacaaggttgcatattggacagcttgtgaaggatacttcagctaaacttaaagaagctagtgaaactgatcatcaaagcggtgtcaatccaagtaagaagattgcagatgctaagcttgcaagggactttcaagctgttttaaaagagtttcagaaagctcaacaaactgctgctgaaagagaaaccacttatactcctttcgtgcctcaatctgctcttccctctagctatacggcgggtgaggtggataaggtaccggaacagcgggcacaacttcaggagtcgaaaagacaagaacttgtattgttagacaacgagattgcattcaacgaggctgtgattgaagaaagagagcaaggaatacaagaaatccatcagcaaattggtgaggttaacgagatattcaaagatcttgcggttctggttaacgatcaaggagtcatgatagatgatattggtactcacattgacaactcccgtgctgcaacttcacaaggaaaatctcagcttgtgcaagccgcgaaaacacaaaaatcaaactcctctctgacatgcttgctcttggtgatatttggcattgttctcctgatcgtgattatagtactcgcagcttgatttcgaacagcaagaacatttcgtttgtgtgtgttcattgatcttaaggcatcaatgactggaactacttggtatatattatatgttgaagagaacacttagaagttggttttgtgtttgtttgggttggttcagttcggtttgaggttctattggttaatgtaatagtgtgtgcgtgtgtggcttttttgttgtgcaaacattttgttggagatgacagaaactctgttttgtttgtgattctcctatgttctcctaaatctttgttgagaggaaacaaaaactatttgctc

SEQ ID NO: 78269 - protein, 268 aa, Arabidopsis thaliana; identical to SEQ ID NO: 29132
  peptide (1)..(268): Ceres Seq. ID no. 12640235
  misc_feature (180)..(242): Pfam Name: SNARE domain Pfam Description: SNARE domain
  misc_feature (1)..(268): Homolog of NCBI NO: 18422725 NR Description: syntaxin SYP22 (VAM3); protein id: At5g46860.1, by cDNA: 13184., supported by cDNA: gi_14326484, supported by gi_18086568, supported by cDNA: gi_1850545 [Arabidopsis thaliana]

SEQ ID NO: 78270 - DNA, 996 bp, Arabidopsis thaliana
  misc_feature (1)..(996): Ceres Seq. ID no. 12640272
  misc_feature: MA Experiment ID: 20000173 Result: Down-regulated in Transcription
  misc_feature: MA Experiment 20000173 PARAMETER Experiment Name: At_42deg_Heat_P Parameter: Age (day) Value: 14
  misc_feature: MA Experiment 20000173 PARAMETER Experiment Name: At_42deg_Heat_P Parameter: Organism Value: A. thaliana
  misc_feature: MA Experiment 20000173 PARAMETER Experiment Name: At_42deg_Heat_P Parameter: Plant Line Value: WS
  misc_feature: MA Experiment 20000173 PARAMETER Experiment Name: At_42deg_Heat_P Parameter: Temperature (deg C) Value: 42 vs. 22
  misc_feature: MA Experiment 20000173 PARAMETER Experiment Name: At_42deg_Heat_P Parameter: Timepoint (hr) Value: 6
  misc_feature: MA Experiment 20000173 PARAMETER Experiment Name: At_42deg_Heat_P Parameter: Tissue Value: Aerial
  misc_feature: MA Experiment ID: 20001247 Result: Down-regulated in Transcription
  misc_feature: MA Experiment 20001247 PARAMETER Experiment Name: At_Far-red-induction_P Parameter: Age (day) Value: 7
  misc_feature: MA Experiment 20001247 PARAMETER Experiment Name: At_Far-red-induction_P Parameter: Light Value: Far-red vs. White
  misc_feature: MA Experiment 20001247 PARAMETER Experiment Name: At_Far-red-induction_P Parameter: Organism Value: A. thaliana
  misc_feature: MA Experiment 20001247 PARAMETER Experiment Name: At_Far-red-induction_P Parameter: Plant Line Value: Columbia
  misc_feature: MA Experiment 20001247 PARAMETER Experiment Name: At_Far-red-induction_P Parameter: Timepoint (hr) Value: 1
  misc_feature: MA Experiment 20001247 PARAMETER Experiment Name: At_Far-red-induction_P Parameter: Tissue Value: Whole Plant
  misc_feature: MA Experiment ID: 20001554 Result: Down-regulated in Transcription
  misc_feature: MA Experiment 20001554 PARAMETER Experiment Name: At_Drought_Soil_Dry_P Parameter: Age (day) Value: 21
  misc_feature: MA Experiment 20001554 PARAMETER Experiment Name: At_Drought_Soil_Dry_P Parameter: Organism Value: A. thaliana
  misc_feature: MA Experiment 20001554 PARAMETER Experiment Name: At_Drought_Soil_Dry_P Parameter: Plant Line Value: WS
  misc_feature: MA Experiment 20001554 PARAMETER Experiment Name: At_Drought_Soil_Dry_P Parameter: Post Timepoint (hr) Value: None
  misc_feature: MA Experiment 20001554 PARAMETER Experiment Name: At_Drought_Soil_Dry_P Parameter: Post-Treatment Value: None
  misc_feature: MA Experiment 20001554 PARAMETER Experiment Name: At_Drought_Soil_Dry_P Parameter: Timepoint (day) Value: 7
  misc_feature: MA Experiment 20001554 PARAMETER Experiment Name: At_Drought_Soil_Dry_P Parameter: Treatment Value: Drought vs. No Drought
  misc_feature: MA Experiment ID: 20001560 Result: Up-regulated in Transcription
  misc_feature: MA Experiment 20001560 PARAMETER Experiment Name: At_Drought_Soil_Dry_P Parameter: Age (day) Value: 28
  misc_feature: MA Experiment 20001560 PARAMETER Experiment Name: At_Drought_Soil_Dry_P Parameter: Organism Value: A. thaliana
  misc_feature: MA Experiment 20001560 PARAMETER Experiment Name: At_Drought_Soil_Dry_P Parameter: Plant Line Value: WS
  misc_feature: MA Experiment 20001560 PARAMETER Experiment Name: At_Drought_Soil_Dry_P Parameter: Post Timepoint (hr) Value: None
  misc_feature: MA Experiment 20001560 PARAMETER Experiment Name: At_Drought_Soil_Dry_P Parameter: Post-Treatment Value: None
  misc_feature: MA Experiment 20001560 PARAMETER Experiment Name: At_Drought_Soil_Dry_P Parameter: Timepoint (day) Value: 14
  misc_feature: MA Experiment 20001560 PARAMETER Experiment Name: At_Drought_Soil_Dry_P Parameter: Treatment Value: Drought vs. No Drought
atgccttcgatgccagaggaaccaatcctaacaccaacaccagatcgattctgtatgttcccaatccaatacccacagatttgggagatgtacaagaaagccgaagcatccttctggacagccgaagaagtcgatctctctcaagacaatcgcgactgggaaaactcactaaccaacgacgaacgtcacttcattaaacacgtcctcgccttcttcgccgcatcagacggaatcgttctcgagaatctctcaactagattcatgtccgatgttcagatctcagaagctcgtgccttctacggattccaaatcgcgattgagaatattcactccgagatgtatagtctccttctcgacacgtatatcaaagacaacaaagagagagatcatctttttcgtgcaatcgaaaccattccttgtgacgaaaaaaaatgggctatgaaatggatcaacggatctcaaagcttcgctgagagaatcgtagcgtttgcttgcgttgaaggtatattcttctccggtagcttttgttcgatattctggttgaagaaacgaggtttaatgcctggactcactttttcaaacgaattgatttcgagagacgaaggtcttcactgtgatttcgcttgtttgatatatagtcttcttagaactaagtttgatgaagatcgtttgaaagcgattgtttgtgatgctgttgagattgagagagagtttgtttgtgacgcgctttcttgtgccttggttgggatgaatcgtgagttgatgagtcagtacattgagttcgttgctgataggttgttggctgcgcttgggtgtggtaaggtgtatggtgtgactaatccttttgattggatggaattgatttcgcttcagggtaagaccaacttttttgagaagagagttggtgagtatcagaaagcttctgttatgtctagtgttcatggaaacgctgcgtttaatgatgatcatgtcttcaagcttgacgaggatttttag

SEQ ID NO: 78271 - protein, 331 aa, Arabidopsis thaliana
  peptide (1)..(331): Ceres Seq. ID no. 12640273
  misc_feature (7)..(286): Pfam Name: Ribonucleotide reductase, small chain Pfam Description: Ribonucleotide reductase, small chain
  misc_feature (1)..(331): Homolog of NCBI NO: 15232077 NR Description: ribonucleotide reductase small subunit, putative; id: At3g27060.1, supported by cDNA: gi_17380725 [Arabidopsis >gi|9279629|dbj|BAB01087.1| ribonucleotide reductase [Arabidopsis
  misc_feature (1)..(331): Homolog of NCBI NO: 1710401 NR Description: RIBONUCLEOSIDE-DIPHOSPHATE REDUCTASE SMALL CHAIN
  misc_feature (6)..(331): Homolog of NCBI NO: 34898038 NR Description: putative ribonucleoside-diphosphate reductase
MPSMPEEPILTPTPDRFCMFPIQYPQIWEMYKKAEASFWTAEEVDLSQDNRDWENSLTNDERHFIKHVLAFFAASDGIVLENLSTRFMSDVQISEARAFYGFQIAIENIHSEMYSLLLDTYIKDNKERDHLFRAIETIPCDEKKWAMKWINGSQSFAERIVAFACVEGIFFSGSFCSIFWLKKRGLMPGLTFSNELISRDEGLHCDFACLIYSLLRTKFDEDRLKAIVCDAVEIEREFVCDALSCALVGMNRELMSQYIEFVADRLLAALGCGKVYGVTNPFDWMELISLQGKTNFFEKRVGEYQKASVMSSVHGNAAFNDDHVFKLDEDF

SEQ ID NO: 78272 - protein, 328 aa, Arabidopsis thaliana
  peptide (1)..(328): Ceres Seq. ID no. 12640274
  misc_feature (4)..(283): Pfam Name: Ribonucleotide reductase, small chain Pfam Description: Ribonucleotide reductase, small chain
  misc_feature (1)..(328): Homolog of NCBI NO: 15232077 NR Description: ribonucleotide reductase small subunit, putative; id: At3g27060.1, supported by cDNA: gi_17380725 [Arabidopsis >gi|9279629|dbj|BAB01087.1| ribonucleotide reductase [Arabidopsis
  misc_feature (1)..(328): Homolog of NCBI NO: 1710401 NR Description: RIBONUCLEOSIDE-DIPHOSPHATE REDUCTASE SMALL CHAIN
  misc_feature (3)..(328): Homolog of NCBI NO: 34898038 NR Description: putative ribonucleoside-diphosphate reductase
MPEEPILTPTPDRFCMFPIQYPQIWEMYKKAEASFWTAEEVDLSQDNRDWENSLTNDERHFIKHVLAFFAASDGIVLENLSTRFMSDVQISEARAFYGFQIAIENIHSEMYSLLLDTYIKDNKERDHLFRAIETIPCDEKKWAMKWINGSQSFAERIVAFACVEGIFFSGSFCSIFWLKKRGLMPGLTFSNELISRDEGLHCDFACLIYSLLRTKFDEDRLKAIVCDAVEIEREFVCDALSCALVGMNRELMSQYIEFVADRLLAALGCGKVYGVTNPFDWMELISLQGKTNFFEKRVGEYQKASVMSSVHGNAAFNDDHVFKLDEDF

SEQ ID NO: 78273 - protein, 313 aa, Arabidopsis thaliana
  peptide (1)..(313): Ceres Seq. ID no. 12640275
  misc_feature (1)..(268): Pfam Name: Ribonucleotide reductase, small chain Pfam Description: Ribonucleotide reductase, small chain
  misc_feature (1)..(313): Homolog of NCBI NO: 15232077 NR Description: ribonucleotide reductase small subunit, putative; id: At3g27060.1, supported by cDNA: gi_17380725 [Arabidopsis >gi|9279629|dbj|BAB01087.1| ribonucleotide reductase [Arabidopsis
  misc_feature (1)..(313): Homolog of NCBI NO: 1710401 NR Description: RIBONUCLEOSIDE-DIPHOSPHATE REDUCTASE SMALL CHAIN
  misc_feature (1)..(313): Homolog of NCBI NO: 34898038 NR Description: putative ribonucleoside-diphosphate reductase
MFPIQYPQIWEMYKKAEASFWTAEEVDLSQDNRDWENSLTNDERHFIKHVLAFFAASDGIVLENLSTRFMSDVQISEARAFYGFQIAIENIHSEMYSLLLDTYIKDNKERDHLFRAIETIPCDEKKWAMKWINGSQSFAERIVAFACVEGIFFSGSFCSIFWLKKRGLMPGLTFSNELISRDEGLHCDFACLIYSLLRTKFDEDRLKAIVCDAVEIEREFVCDALSCALVGMNRELMSQYIEFVADRLLAALGCGKVYGVTNPFDWMELISLQGKTNFFEKRVGEYQKASVMSSVHGNAAFNDDHVFKLDEDF

SEQ ID NO: 78274 - DNA, 1470 bp, Arabidopsis thaliana
  misc_feature (1)..(1470): Ceres Seq. ID no. 12640300
  misc_feature: MA Experiment ID: 20001807 Result: Down-regulated in Transcription
  misc_feature: MA Experiment 20001807 PARAMETER Experiment Name: At_50mM_NH4NO3_L-to-H_Sub_P Parameter: Timepoint (hr) Value: 6
  misc_feature: MA Experiment 20001807 PARAMETER Experiment Name: At_50mM_NH4NO3_L-to-H_Sub_P Parameter: Tissue Value: Leaf
  misc_feature: MA Experiment 20001807 PARAMETER Experiment Name: At_50mM_NH4NO3_L-to-H_Sub_P Parameter: Treatment Value: 50mM NH4NO3 vs 100mM Mannitol
atggcgatgagattttttcaacttcaccgaaatcgtcttgtgaaaggtaattctggaaaagctctctcctttagccgccttttagatcttagtttctgggttcgagctttttgtaattaccgagagattttgagaaatggtcttcactctcttcagtttaatgaagctctcgatttgttcactcacatggttgagtctcgtcctcttccttcaattatcgatttcactaagttattgaatgttattgccaaaatgaagaagtttgatgttgtgatcaatctctgcgaccatctgcagataatgggagtttcacatgatctctatacttgcaatcttttgatgaattgtttctgccaatcttctcagccttatcttgcctcatcttttcttgggaagatgatgaaacttggttttgagcctgatattgtcacgtttacttctctgatcaatgggttctgtctcgggaatagaatggaggaggctatgtctatggtgaatcagatggtggagatggggattaaacctgatgttgtaatgtatacaacaatcattgatagtctttgcaaaaacgggcatgtgaattacgcgttgagccttttcgatcaaatggaaaactacgggattagaccggatgttgttatgtacacctctctcgtgaacggtctttgtaactctggtagatggagagatgctgattcattgctgaggggtatgacgaagaggaaaatcaaacctgatgtaatcactttcaatgcattgatcgatgcgtttgtgaaagaaggaaagtttttggatgctgaagaattgtacaatgagatgattcgtatgtctatagctcctaatattttcacctatacttcattgatcaatgggttttgcatggaaggttgtgtagatgaggccagacaaatgttttatttgatggaaaccaagggttgttttccagatgtagtggcttatacttctctcataaacgggttttgcaagtgtaagaaggtagatgatgcgatgaaaatcttctacgagatgtcccaaaaaggattgactgggaacactatcacttacactactcttatccaaggttttggtcaagtgggcaaacctaatgtcgcccaagaagtttttagtcatatggtttctcgtggcgtgcctcccaatattaggacctataatgttttgttacattgtctatgttataacgggaagctagagaaagccttgatggtattcgaggatatgcgaaagagagagatggatattggaattattacatataccatcatcattcaagggatgtgcaaggctggtaaagtgaaaaatgctgttaatttattttgtagccttccttcaaaaggagtgaagcctaatgttgtaacatatactacaatgatatcaggattgtttagggaagggttaaagcatgaagctcatgtgttgtttaggaaaatgaaagaagatggggtttcataa

SEQ ID NO: 78275 - protein, 489 aa, Arabidopsis thaliana
  peptide (1)..(489): Ceres Seq. ID no. 12640301
  misc_feature (283)..(317): Pfam Name: PPR repeat Pfam Description: PPR repeat
  misc_feature (1)..(488): Homolog of NCBI NO: 15237575 NR Description: salt-inducible protein-like; protein id:
  misc_feature (9)..(487): Homolog of NCBI NO: 11994626 NR Description: contains similarity to salt-inducible
  misc_feature (63)..(487): Homolog of NCBI NO: 15228287 NR Description: hypothetical protein; protein id: At3g16710.1
  misc_feature (8)..(488): Homolog of NCBI NO: 15237384 NR Description: putative protein; protein id: At5g16640.1 thaliana] >gi|10176973|dbj|BAB10191.1|
  misc_feature (2)..(488): Homolog of NCBI NO: 6630464 NR Description: F23N19.4 [Arabidopsis thaliana]
  misc_feature (2)..(488): Homolog of NCBI NO: 15221550 NR Description: PPR-repeat protein; protein id: At1g62680.1
  misc_feature (5)..(487): Homolog of NCBI NO: 15217683 NR Description: hypothetical protein; protein id: At1g64580.1
  misc_feature (5)..(487): Homolog of NCBI NO: 25404938 NR Description: protein F1N19.15 [imported] - Arabidopsis >gi|6633829|gb|AAF19688.1|AC009519_22 F1N19.15 [Arabidopsis
  misc_feature (32)..(488): Homolog of NCBI NO: 6630449 NR Description: F23N19.8 [Arabidopsis thaliana]
  misc_feature (63)..(488): Homolog of NCBI NO: 15221558 NR Description: PPR-repeat protein; protein id: At1g62720.1
MAMRFFQLHRNRLVKGNSGKALSFSRLLDLSFWVRAFCNYREILRNGLHSLQFNEALDLFTHMVESRPLPSIIDFTKLLNVIAKMKKFDVVINLCDHLQIMGVSHDLYTCNLLMNCFCQSSQPYLASSFLGKMMKLGFEPDIVTFTSLINGFCLGNRMEEAMSMVNQMVEMGIKPDVVMYTTIIDSLCKNGHVNYALSLFDQMENYGIRPDVVMYTSLVNGLCNSGRWRDADSLLRGMTKRKIKPDVITFNALIDAFVKEGKFLDAEELYNEMIRMSIAPNIFTYTSLINGFCMEGCVDEARQMFYLMETKGCFPDVVAYTSLINGFCKCKKVDDAMKIFYEMSQKGLTGNTITYTTLIQGFGQVGKPNVAQEVFSHMVSRGVPPNIRTYNVLLHCLCYNGKLEKALMVFEDMRKREMDIGIITYTIIIQGMCKAGKVKNAVNLFCSLPSKGVKPNVVTYTTMISGLFREGLKHEAHVLFRKMKEDGVS

SEQ ID NO: 78276 - protein, 487 aa, Arabidopsis thaliana
  peptide (1)..(487): Ceres Seq. ID no. 12640302
  misc_feature (281)..(315): Pfam Name: PPR repeat Pfam Description: PPR repeat
  misc_feature (1)..(486): Homolog of NCBI NO: 15237575 NR Description: salt-inducible protein-like; protein id:
  misc_feature (7)..(485): Homolog of NCBI NO: 11994626 NR Description: contains similarity to salt-inducible
  misc_feature (61)..(485): Homolog of NCBI NO: 15228287 NR Description: hypothetical protein; protein id: At3g16710.1
  misc_feature (6)..(486): Homolog of NCBI NO: 15237384 NR Description: putative protein; protein id: At5g16640.1 thaliana] >gi|10176973|dbj|BAB10191.1|
  misc_feature (1)..(486): Homolog of NCBI NO: 6630464 NR Description: F23N19.4 [Arabidopsis thaliana]
  misc_feature (1)..(486): Homolog of NCBI NO: 15221550 NR Description: PPR-repeat protein; protein id: At1g62680.1
  misc_feature (3)..(485): Homolog of NCBI NO: 15217683 NR Description: hypothetical protein; protein id: At1g64580.1
  misc_feature (3)..(485): Homolog of NCBI NO: 25404938 NR Description: protein F1N19.15 [imported] - Arabidopsis >gi|6633829|gb|AAF19688.1|AC009519_22 F1N19.15 [Arabidopsis
  misc_feature (30)..(486): Homolog of NCBI NO: 6630449 NR Description: F23N19.8 [Arabidopsis thaliana]
  misc_feature (61)..(486): Homolog of NCBI NO: 15221558 NR Description: PPR-repeat protein; protein id: At1g62720.1
MRFFQLHRNRLVKGNSGKALSFSRLLDLSFWVRAFCNYREILRNGLHSLQFNEALDLFTHMVESRPLPSIIDFTKLLNVIAKMKKFDVVINLCDHLQIMGVSHDLYTCNLLMNCFCQSSQPYLASSFLGKMMKLGFEPDIVTFTSLINGFCLGNRMEEAMSMVNQMVEMGIKPDVVMYTTIIDSLCKNGHVNYALSLFDQMENYGIRPDVVMYTSLVNGLCNSGRWRDADSLLRGMTKRKIKPDVITFNALIDAFVKEGKFLDAEELYNEMIRMSIAPNIFTYTSLINGFCMEGCVDEARQMFYLMETKGCFPDVVAYTSLINGFCKCKKVDDAMKIFYEMSQKGLTGNTITYTTLIQGFGQVGKPNVAQEVFSHMVSRGVPPNIRTYNVLLHCLCYNGKLEKALMVFEDMRKREMDIGIITYTIIIQGMCKAGKVKNAVNLFCSLPSKGVKPNVVTYTTMISGLFREGLKHEAHVLFRKMKEDGVS

SEQ ID NO: 78277 - protein, 427 aa, Arabidopsis thaliana
  peptide (1)..(427): Ceres Seq. ID no. 12640303
  misc_feature (221)..(255): Pfam Name: PPR repeat Pfam Description: PPR repeat
  misc_feature (1)..(426): Homolog of NCBI NO: 15237575 NR Description: salt-inducible protein-like; protein id:
  misc_feature (1)..(425): Homolog of NCBI NO: 11994626 NR Description: contains similarity to salt-inducible
  misc_feature (1)..(425): Homolog of NCBI NO: 15228287 NR Description: hypothetical protein; protein id: At3g16710.1
  misc_feature (1)..(426): Homolog of NCBI NO: 15237384 NR Description: putative protein; protein id: At5g16640.1 thaliana] >gi|10176973|dbj|BAB10191.1|
  misc_feature (1)..(426): Homolog of NCBI NO: 6630464 NR Description: F23N19.4 [Arabidopsis thaliana]
  misc_feature (1)..(426): Homolog of NCBI NO: 15221550 NR Description: PPR-repeat protein; protein id: At1g62680.1
  misc_feature (1)..(425): Homolog of NCBI NO: 15217683 NR Description: hypothetical protein; protein id: At1g64580.1
  misc_feature (1)..(425): Homolog of NCBI NO: 25404938 NR Description: protein F1N19.15 [imported] - Arabidopsis >gi|6633829|gb|AAF19688.1|AC009519_22 F1N19.15 [Arabidopsis
  misc_feature (1)..(426): Homolog of NCBI NO: 6630449 NR Description: F23N19.8 [Arabidopsis thaliana]
  misc_feature (1)..(426): Homolog of NCBI NO: 15221558 NR Description: PPR-repeat protein; protein id: At1g62720.1
MVESRPLPSIIDFTKLLNVIAKMKKFDVVINLCDHLQIMGVSHDLYTCNLLMNCFCQSSQPYLASSFLGKMMKLGFEPDIVTFTSLINGFCLGNRMEEAMSMVNQMVEMGIKPDVVMYTTIIDSLCKNGHVNYALSLFDQMENYGIRPDVVMYTSLVNGLCNSGRWRDADSLLRGMTKRKIKPDVITFNALIDAFVKEGKFLDAEELYNEMIRMSIAPNIFTYTSLINGFCMEGCVDEARQMFYLMETKGCFPDVVAYTSLINGFCKCKKVDDAMKIFYEMSQKGLTGNTITYTTLIQGFGQVGKPNVAQEVFSHMVSRGVPPNIRTYNVLLHCLCYNGKLEKALMVFEDMRKREMDIGIITYTIIIQGMCKAGKVKNAVNLFCSLPSKGVKPNVVTYTTMISGLFREGLKHEAHVLFRKMKEDGVS

SEQ ID NO: 78278 - DNA, 735 bp, Arabidopsis thaliana
  misc_feature (1)..(735): Ceres Seq. ID no. 12640316
  misc_feature: MA Experiment ID: 20000307 Result: Up-regulated in Transcription
  misc_feature: MA Experiment 20000307 PARAMETER Experiment Name: At_Germinating_Seeds_Sub_P Parameter: Age (hr) Value: 24 vs. 0
  misc_feature: MA Experiment 20000307 PARAMETER Experiment Name: At_Germinating_Seeds_Sub_P Parameter: Organism Value: A. thaliana
  misc_feature: MA Experiment 20000307 PARAMETER Experiment Name: At_Germinating_Seeds_Sub_P Parameter: Plant Line Value: WS
  misc_feature: MA Experiment 20000307 PARAMETER Experiment Name: At_Germinating_Seeds_Sub_P Parameter: Tissue Value: Germinating Seeds
  misc_feature: MA Experiment ID: 20000315 Result: Down-regulated in Transcription
  misc_feature: MA Experiment 20000315 PARAMETER Experiment Name: At_14day_Shoots-Roots_Sub_P Parameter: Age (day) Value: 14
  misc_feature: MA Experiment 20000315 PARAMETER Experiment Name: At_14day_Shoots-Roots_Sub_P Parameter: Organism Value: A. thaliana
  misc_feature: MA Experiment 20000315 PARAMETER Experiment Name: At_14day_Shoots-Roots_Sub_P Parameter: Plant Line Value: WS
  misc_feature: MA Experiment 20000315 PARAMETER Experiment Name: At_14day_Shoots-Roots_Sub_P Parameter: Tissue Value: Shoots vs. Whole Plant
  misc_feature: MA Experiment ID: 20000328 Result: Down-regulated in Transcription
  misc_feature: MA Experiment 20000328 PARAMETER Experiment Name: At_42deg_Heat_Sub_P Parameter: Age (day) Value: 14
  misc_feature: MA Experiment 20000328 PARAMETER Experiment Name: At_42deg_Heat_Sub_P Parameter: Organism Value: A. thaliana
  misc_feature: MA Experiment 20000328 PARAMETER Experiment Name: At_42deg_Heat_Sub_P Parameter: Plant Line Value: WS
  misc_feature: MA Experiment 20000328 PARAMETER Experiment Name: At_42deg_Heat_Sub_P Parameter: Temperature (deg C) Value: 42 vs. 22
  misc_feature: MA Experiment 20000328 PARAMETER Experiment Name: At_42deg_Heat_Sub_P Parameter: Timepoint (hr) Value: 6
  misc_feature: MA Experiment 20000328 PARAMETER Experiment Name: At_42deg_Heat_Sub_P Parameter: Tissue Value: Aerial
atgaagctcaaagtgtatgcagatcgaatgtcacagccatcacgtgctgttatcatattctgcaaggttaatggaatccaattcgatgaggtcttgatttccttggcgaagcgtcaacaattatctcctgaattcaaagatattaacccattggggaaagttccagctattgttgatggcaggcttaagctctttgagagtcacgcaatcctgatatatctatcctcggcgtttccaagtgttgctgatcattggtatccaaatgatctatccaaaagagccaagattcactcagttttggattggcatcacaccaatttacgtcgtggtgcagctggatatgttctgaatagtgtactaggtccagctctcggtcttcctctgaatccgaaagcagctgctgaagctgagcagttactaacaaagtctctgtccactctagagactttttggcttaagggcaatgctaaattcttgctcggaagcaaccaaccatctatagctgatctcagccttgtatgcgaacttatgcagctgcaggttttggatgacaaagatcgtcttagattgctcagcactcataagaaagttgaacaatggattgagaatacgaaaaaagcaacaatgcctcactttgatgagacccatgagatccttttcaaagtcaaagaaggattccagaagcggcgagagatgggaaccttatctaaaccgggtcttcaatccaagatctaa

SEQ ID NO: 78279 - protein, 244 aa, Arabidopsis thaliana; identical to SEQ ID NO: 50719
  peptide (1)..(244): Ceres Seq. ID no. 12640317
  misc_feature (1)..(244): Homolog of NCBI NO: 15237583 NR Description: glutathione transferase, putative; protein id: supported by cDNA: gi_15451157 [Arabidopsis thaliana]
  misc_feature (1)..(244): Homolog of NCBI NO: 15237595 NR Description: glutathione transferase, putative; protein id: supported by cDNA: 37349. [Arabidopsis thaliana]
  misc_feature (1)..(244): Homolog of NCBI NO: 30693769 NR Description: glutathione transferase, putative [Arabidopsis >gi|22655095|gb|AAM98138.1| glutathione transferase [Arabidopsis
  misc_feature (1)..(244): Homolog of NCBI NO: 25453559 NR Description: glutathione transferase (EC 2.5.1.18) GST 10b - Arabidopsis thaliana >gi|4218144|emb|CAA10662.1| glutathione
  misc_feature (1)..(244): Homolog of NCBI NO: 10177768 NR Description: glutathione transferase [Arabidopsis thaliana]

SEQ ID NO: 78280 - protein, 235 aa, Arabidopsis thaliana
  peptide (1)..(235): Ceres Seq. ID no. 12640318
  misc_feature (1)..(235): Homolog of NCBI NO: 15237583 NR Description: glutathione transferase, putative; protein id: supported by cDNA: gi_15451157 [Arabidopsis thaliana]
  misc_feature (1)..(235): Homolog of NCBI NO: 15237595 NR Description: glutathione transferase, putative; protein id: supported by cDNA: 37349. [Arabidopsis thaliana]
  misc_feature (1)..(235): Homolog of NCBI NO: 30693769 NR Description: glutathione transferase, putative [Arabidopsis >gi|22655095|gb|AAM98138.1| glutathione transferase [Arabidopsis
  misc_feature (1)..(235): Homolog of NCBI NO: 25453559 NR Description: glutathione transferase (EC 2.5.1.18) GST 10b - Arabidopsis thaliana >gi|4218144|emb|CAA10662.1| glutathione
  misc_feature (1)..(235): Homolog of NCBI NO: 10177768 NR Description: glutathione transferase [Arabidopsis thaliana]
MSQPSRAVIIFCKVNGIQFDEVLISLAKRQQLSPEFKDINPLGKVPAIVDGRLKLFESHAILIYLSSAFPSVADHWYPNDLSKRAKIHSVLDWHHTNLRRGAAGYVLNSVLGPALGLPLNPKAAAEAEQLLTKSLSTLETFWLKGNAKFLLGSNQPSIADLSLVCELMQLQVLDDKDRLRLLSTHKKVEQWIENTKKATMPHFDETHEILFKVKEGFQKRREMGTLSKPGLQSKI

SEQ ID NO: 78281 - DNA, 1962 bp, Arabidopsis thaliana
  misc_feature (1)..(1962): Ceres Seq. ID no. 12640319
  misc_feature: MA Experiment ID: 20000171 Result: Down-regulated in Transcription
  misc_feature: MA Experiment 20000171 PARAMETER Experiment Name: At_42deg_Heat_P Parameter: Age (day) Value: 14
  misc_feature: MA Experiment 20000171 PARAMETER Experiment Name: At_42deg_Heat_P Parameter: Organism Value: A. thaliana
  misc_feature: MA Experiment 20000171 PARAMETER Experiment Name: At_42deg_Heat_P Parameter: Plant Line Value: WS
  misc_feature: MA Experiment 20000171 PARAMETER Experiment Name: At_42deg_Heat_P Parameter: Temperature (deg C) Value: 42 vs. 22
  misc_feature: MA Experiment 20000171 PARAMETER Experiment Name: At_42deg_Heat_P Parameter: Timepoint (hr) Value: 1
  misc_feature: MA Experiment 20000171 PARAMETER Experiment Name: At_42deg_Heat_P Parameter: Tissue Value: Aerial
  misc_feature: MA Experiment ID: 20000173 Result: Down-regulated in Transcription
  misc_feature: MA Experiment 20000173 PARAMETER Experiment Name: At_42deg_Heat_P Parameter: Age (day) Value: 14
  misc_feature: MA Experiment 20000173 PARAMETER Experiment Name: At_42deg_Heat_P Parameter: Organism Value: A. thaliana
  misc_feature: MA Experiment 20000173 PARAMETER Experiment Name: At_42deg_Heat_P Parameter: Plant Line Value: WS
  misc_feature: MA Experiment 20000173 PARAMETER Experiment Name: At_42deg_Heat_P Parameter: Temperature (deg C) Value: 42 vs. 22
  misc_feature: MA Experiment 20000173 PARAMETER Experiment Name: At_42deg_Heat_P Parameter: Timepoint (hr) Value: 6
  misc_feature: MA Experiment 20000173 PARAMETER Experiment Name: At_42deg_Heat_P Parameter: Tissue Value: Aerial
  misc_feature: MA Experiment ID: 20000184 Result: Down-regulated in Transcription
  misc_feature: MA Experiment 20000184 PARAMETER Experiment Name: At_Shoots__P Parameter: Age (day) Value: 7
  misc_feature: MA Experiment 20000184 PARAMETER Experiment Name: At_Shoots__P Parameter: Tissue Value: Shoots vs. Whole Plant
  misc_feature: MA Experiment ID: 20000224 Result: Up-regulated in Transcription
  misc_feature: MA Experiment ID: 20000495 Result: Up-regulated in Transcription
  misc_feature: MA Experiment 20000495 PARAMETER Experiment Name: At_Guard_Cells_P Parameter: Harvest Date Value: 8/2/2002
  misc_feature: MA Experiment 20000495 PARAMETER Experiment Name: At_Guard_Cells_P Parameter: Organism Value: A. thaliana
  misc_feature: MA Experiment 20000495 PARAMETER Experiment Name: At_Guard_Cells_P Parameter: Tissue Value: Guard Cells vs. Leaves
  misc_feature: MA Experiment ID: 20000794 Result: Up-regulated in Transcription
  misc_feature: MA Experiment 20000794 PARAMETER Experiment Name: At_Petals_P Parameter: Age (day) Value: 23-25 days
  misc_feature: MA Experiment 20000794 PARAMETER Experiment Name: At_Petals_P Parameter: Plant Line Value: WS
  misc_feature: MA Experiment 20000794 PARAMETER Experiment Name: At_Petals_P Parameter: Tissue Value: Petals vs. Whole plant
  misc_feature: MA Experiment ID: 20001451 Result: Up-regulated in Transcription
  misc_feature: MA Experiment 20001451 PARAMETER Experiment Name: At_Far-red-induction_P Parameter: Age (day) Value: 7
  misc_feature: MA Experiment 20001451 PARAMETER Experiment Name: At_Far-red-induction_P Parameter: Light Value: Far-red vs. White
  misc_feature: MA Experiment 20001451 PARAMETER Experiment Name: At_Far-red-induction_P Parameter: Organism Value: A. thaliana
  misc_feature: MA Experiment 20001451 PARAMETER Experiment Name: At_Far-red-induction_P Parameter: Plant Line Value: Columbia
  misc_feature: MA Experiment 20001451 PARAMETER Experiment Name: At_Far-red-induction_P Parameter: Timepoint (hr) Value: 24
  misc_feature: MA Experiment 20001451 PARAMETER Experiment Name: At_Far-red-induction_P Parameter: Tissue Value: Whole Plant
gccagattatcgccgttcgttcagagaaaactttttccgatacacaaaatcggaggaagaagaagatgaagctcaaagtgtatgcggatcgaatgtcacagccatctcgtgctgtcctcatattctgcaaggttaatgaaatccaattcgatgagatattgatttacttggcgaatcgtcaacaattatcccctgaatttaaagatattaacccaatggggaaagttccagctattgttgatggcaaacttaagctctctgagagtcacgctatcttgatatatctttcctcagcatacccaagtgtagttgatcattggtacccgactgatctttccaaaagggccagaattcactctgttttggattggcatcacaccaatttacgccctggtgcagctggatacgttctgaatagtgtactaggtccagctctcggtcttcctctgaatccgaaagcagctgctgaagctgagcagttactaacaaagtctctgaccactctagacactttttggcttaagggcaatgccatgttcttgctcggaagcaaccaaccatctatagctgatctgagccttgtatgtgaactaacgcagctgcaggttttggatgataaagatcgtcttagattgctcagccctcataaaaatgttgaacaatggattgagaatacgagaaaagcgacgatgcctcactttgatgaggtccatgaggtccttttcagagccaaagatagatgtcagaagcagcgagagatggcaaccgcatctaaaccgggtcctcaatctaagattatccaatttagtactattggtgagaagagtgatgatccaaacctcgttcaaaacacaaccgatcgtagaaaacatagacgcaaatggagtcgagctgaagatgccattcttattagtgcttggttaaatactagcaaggatccaattgtcgataatgaacataaagcatgcgctttttggaagagaattggtgcatattttaacaatagcgcttcacttgcaaatctgccaaagcgagagccgagtcactgcaagcaaagatggagtaaacttaacgacaaagtctgcaaatttgttggatgttatgatcaagctttgaatcaaagaagtagtggtcaatctgaagatgatgttttccaagttgcataccaagtctacacgaacaattacaagagtaattttacacttgagcatgcatggagggagctccgacacagtaaaaaatggtgtagtttgtacccctttgaaaattctaagggtggtggaagctcaaagagaacaaagttgaataatggagatcgtgtatattcttcaagctctaatccggagagtgtgcctatagctctagatgaagaggagcaagtcatggatcttcctcttggtgtgaagtcatcgaagcagaaagagaagaaagttgctactattataacgattgaagaaagggaggccgattctggatcaagacttgagaacttgtgggtactagatgaagaggagcaagttatggatcgtcctcttggtgtgaagtcattagagcaaaaagagaataaagttgctcctaaaccaacgattgaagaaagggaggcggccgattctcgatcaagacttgagaacttgtgggcactaaaggagaaagaagaaagggaggcagattcccgatcaagacttgagaacttgtgggcactgaaggagaaagacatagaagagcaaaagaaactaacaaggatggaagtccttaaaagtcttcttggaagaacaactgatcaactttctgaaaaagaagacattttgaagaacaagctcattgatgagatgctctaatctctatgttcatctctgtattttagctatgtttcattgtatttatctctgtattttctctaggtttatctcactatctatgttcaacatttgtttcactttccaattcacatcatgaaacgtt

SEQ ID NO: 78282 - protein, 611 aa, Arabidopsis thaliana
  peptide (1)..(611): Ceres Seq. ID no. 12640320
  misc_feature (22)..(611): Homolog of NCBI NO: 30693769 NR Description: glutathione transferase, putative [Arabidopsis >gi|22655095|gb|AAM98138.1| glutathione transferase [Arabidopsis
  misc_feature (22)..(265): Homolog of NCBI NO: 25453559 NR Description: glutathione transferase (EC 2.5.1.18) GST 10b - Arabidopsis thaliana >gi|4218144|emb|CAA10662.1| glutathione
  misc_feature (22)..(265): Homolog of NCBI NO: 10177768 NR Description: glutathione transferase [Arabidopsis thaliana]
  misc_feature (22)..(265): Homolog of NCBI NO: 15237583 NR Description: glutathione transferase, putative; protein id: supported by cDNA: gi_15451157 [Arabidopsis thaliana]
QIIAVRSEKTFSDTQNRRKKKMKLKVYADRMSQPSRAVLIFCKVNEIQFDEILIYLANRQQLSPEFKDINPMGKVPAIVDGKLKLSESHAILIYLSSAYPSVVDHWYPTDLSKRARIHSVLDWHHTNLRPGAAGYVLNSVLGPALGLPLNPKAAAEAEQLLTKSLTTLDTFWLKGNAMFLLGSNQPSIADLSLVCELTQLQVLDDKDRLRLLSPHKNVEQWIENTRKATMPHFDEVHEVLFRAKDRCQKQREMATASKPGPQSKIIQFSTIGEKSDDPNLVQNTTDRRKHRRKWSRAEDAILISAWLNTSKDPIVDNEHKACAFWKRIGAYFNNSASLANLPKREPSHCKQRWSKLNDKVCKFVGCYDQALNQRSSGQSEDDVFQVAYQVYTNNYKSNFTLEHAWRELRHSKKWCSLYPFENSKGGGSSKRTKLNNGDRVYSSSSNPESVPIALDEEEQVMDLPLGVKSSKQKEKKVATIITIEEREADSGSRLENLWVLDEEEQVMDRPLGVKSLEQKENKVAPKPTIEEREAADSRSRLENLWALKEKEEREADSRSRLENLWALKEKDIEEQKKLTRMEVLKSLLGRTTDQLSEKEDILKNKLIDEML

SEQ ID NO: 78283 - protein, 590 aa, Arabidopsis thaliana
  peptide (1)..(590): Ceres Seq. ID no. 12640321
  misc_feature (1)..(590): Homolog of NCBI NO: 30693769 NR Description: glutathione transferase, putative [Arabidopsis >gi|22655095|gb|AAM98138.1| glutathione transferase [Arabidopsis
  misc_feature (1)..(244): Homolog of NCBI NO: 25453559 NR Description: glutathione transferase (EC 2.5.1.18) GST 10b - Arabidopsis thaliana >gi|4218144|emb|CAA10662.1| glutathione
  misc_feature (1)..(244): Homolog of NCBI NO: 10177768 NR Description: glutathione transferase [Arabidopsis thaliana]
  misc_feature (1)..(244): Homolog of NCBI NO: 15237583 NR Description: glutathione transferase, putative; protein id: supported by cDNA: gi_15451157 [Arabidopsis thaliana]
MKLKVYADRMSQPSRAVLIFCKVNEIQFDEILIYLANRQQLSPEFKDINPMGKVPAIVDGKLKLSESHAILIYLSSAYPSVVDHWYPTDLSKRARIHSVLDWHHTNLRPGAAGYVLNSVLGPALGLPLNPKAAAEAEQLLTKSLTTLDTFWLKGNAMFLLGSNQPSIADLSLVCELTQLQVLDDKDRLRLLSPHKNVEQWIENTRKATMPHFDEVHEVLFRAKDRCQKQREMATASKPGPQSKIIQFSTIGEKSDDPNLVQNTTDRRKHRRKWSRAEDAILISAWLNTSKDPIVDNEHKACAFWKRIGAYFNNSASLANLPKREPSHCKQRWSKLNDKVCKFVGCYDQALNQRSSGQSEDDVFQVAYQVYTNNYKSNFTLEHAWRELRHSKKWCSLYPFENSKGGGSSKRTKLNNGDRVYSSSSNPESVPIALDEEEQVMDLPLGVKSSKQKEKKVATIITIEEREADSGSRLENLWVLDEEEQVMDRPLGVKSLEQKENKVAPKPTIEEREAADSRSRLENLWALKEKEEREADSRSRLENLWALKEKDIEEQKKLTRMEVLKSLLGRTTDQLSEKEDILKNKLIDEML

SEQ ID NO: 78284 - protein, 581 aa, Arabidopsis thaliana
  peptide (1)..(581): Ceres Seq. ID no. 12640322
  misc_feature (1)..(581): Homolog of NCBI NO: 30693769 NR Description: glutathione transferase, putative [Arabidopsis >gi|22655095|gb|AAM98138.1| glutathione transferase [Arabidopsis
  misc_feature (1)..(235): Homolog of NCBI NO: 25453559 NR Description: glutathione transferase (EC 2.5.1.18) GST 10b - Arabidopsis thaliana >gi|4218144|emb|CAA10662.1| glutathione
  misc_feature (1)..(235): Homolog of NCBI NO: 10177768 NR Description: glutathione transferase [Arabidopsis thaliana]
  misc_feature (1)..(235): Homolog of NCBI NO: 15237583 NR Description: glutathione transferase, putative; protein id: supported by cDNA: gi_15451157 [Arabidopsis thaliana]
MSQPSRAVLIFCKVNEIQFDEILIYLANRQQLSPEFKDINPMGKVPAIVDGKLKLSESHAILIYLSSAYPSVVDHWYPTDLSKRARIHSVLDWHHTNLRPGAAGYVLNSVLGPALGLPLNPKAAAEAEQLLTKSLTTLDTFWLKGNAMFLLGSNQPSIADLSLVCELTQLQVLDDKDRLRLLSPHKNVEQWIENTRKATMPHFDEVHEVLFRAKDRCQKQREMATASKPGPQSKIIQFSTIGEKSDDPNLVQNTTDRRKHRRKWSRAEDAILISAWLNTSKDPIVDNEHKACAFWKRIGAYFNNSASLANLPKREPSHCKQRWSKLNDKVCKFVGCYDQALNQRSSGQSEDDVFQVAYQVYTNNYKSNFTLEHAWRELRHSKKWCSLYPFENSKGGGSSKRTKLNNGDRVYSSSSNPESVPIALDEEEQVMDLPLGVKSSKQKEKKVATIITIEEREADSGSRLENLWVLDEEEQVMDRPLGVKSLEQKENKVAPKPTIEEREAADSRSRLENLWALKEKEEREADSRSRLENLWALKEKDIEEQKKLTRMEVLKSLLGRTTDQLSEKEDILKNKLIDEML

SEQ ID NO: 78285 - DNA, 1054 bp, Arabidopsis thaliana
  misc_feature (1)..(1054): Ceres Seq. ID no. 12640345
  misc_feature: MA Experiment ID: 108434 Result: Up-regulated in Transcription
  misc_feature: MA Experiment 108434 PARAMETER Experiment Name: At_Root_Tips_cDNA_P Parameter: Tissue Value: Root Tips
  misc_feature: MA Experiment ID: 108461 Result: Up-regulated in Transcription
  misc_feature: MA Experiment 108461 PARAMETER Experiment Name: At_Germinating_Seeds_cDNA_P Parameter: Age (day) Value: 1 vs. 0
  misc_feature: MA Experiment 108461 PARAMETER Experiment Name: At_Germinating_Seeds_cDNA_P Parameter: Tissue Value: Germinating Seeds
  misc_feature: MA Experiment ID: 108608 Result: Up-regulated in Transcription
  misc_feature: MA Experiment 108608 PARAMETER Experiment Name: At_100uM_ABA_cDNA_P Parameter: Timepoint (hr) Value: 1
  misc_feature: MA Experiment 108608 PARAMETER Experiment Name: At_100uM_ABA_cDNA_P Parameter: Tissue Value: Aerial
  misc_feature: MA Experiment 108608 PARAMETER Experiment Name: At_100uM_ABA_cDNA_P Parameter: Treatment Value: 100uM ABA vs. No Treatment
  misc_feature: MA Experiment ID: 20000166 Result: Up-regulated in Transcription
  misc_feature: MA Experiment 20000166 PARAMETER Experiment Name: At_100uM_ABA_P Parameter: Age (day) Value: 14
  misc_feature: MA Experiment 20000166 PARAMETER Experiment Name: At_100uM_ABA_P Parameter: Organism Value: A. thaliana
  misc_feature: MA Experiment 20000166 PARAMETER Experiment Name: At_100uM_ABA_P Parameter: Plant Line Value: WS
  misc_feature: MA Experiment 20000166 PARAMETER Experiment Name: At_100uM_ABA_P Parameter: Timepoint (hr) Value: 1
  misc_feature: MA Experiment 20000166 PARAMETER Experiment Name: At_100uM_ABA_P Parameter: Tissue Value: Aerial
  misc_feature: MA Experiment 20000166 PARAMETER Experiment Name: At_100uM_ABA_P Parameter: Treatment Value: 100uM ABA vs. No Treatment
  misc_feature: MA Experiment ID: 20000794 Result: Down-regulated in Transcription
  misc_feature: MA Experiment 20000794 PARAMETER Experiment Name: At_Petals_P Parameter: Age (day) Value: 23-25 days
  misc_feature: MA Experiment 20000794 PARAMETER Experiment Name: At_Petals_P Parameter: Plant Line Value: WS
  misc_feature: MA Experiment 20000794 PARAMETER Experiment Name: At_Petals_P Parameter: Tissue Value: Petals vs. Whole plant
tcttcaatcagtaaagagttttaggtttttttttcttcttctcggaggtttgtagaatcaacaaaaatggtggaagaccacaagcacgaggaatcgatcttggagaagattgttgagaagatccatggccacggtgactcgtcttctctgtccgattccgacgacgataagaaatctacatcgtcttcgtcgtcgtccttcaagtcaaagatttaccgacttttcggaagggagaaacctgttcacaaggttctcggtggtggaaaacctgctgatatattcctttggaggaacaagaaggtatctggtggagtcttgggtgctgtaactgcgtcttgggtcttattcgagttattcgaataccatctcctcgcttttctctgtcactttgcgatttttgctcttgcagcattgttcttgtggtctaatgcttgtacattcatccacaagtcaactcctcacatcccggaagttcacatccctgaagatcctattcttcaacttgtttctggattaaggattgaaatcaatcgtggtttgacccttcttaggaacattgcatcaggaaaagatgtcaagaaatttatcctggtaattgctggcttgtgggttttgtccattattggcagctgctacaacttcttgacattgttctacactgctactgtccttctcttcaccattcctgtactctacgagaagtatgaggacaaagtagatgcctatggggagaaggcgatgagggagatcaaaaagcaatatgcagtacttgatgagaaggtattgcgtaaggtcataagcaagattccaagaggagctctgaacaagaagaaggattaaggaatgtgagttactctctcattggaatcgtagtaatggttcaagacatgttttgttagaagctgttggttgataaaccctttgatctcttgttattattatgttcattataaatttgggggttttaactaaaaatatttagattatgagagaacacggatggatgataattattgttgttagttatttgtcttagttaatttctcatcctttt

SEQ ID NO: 78286 - protein, 257 aa, Arabidopsis thaliana; identical to SEQ ID NO: 28439
  peptide (1)..(257): Ceres Seq. ID no. 12640346
  misc_feature (1)..(257): Homolog of NCBI NO: 15238125 NR Description: putative protein; protein id: At5g41600.1, by cDNA: gi_14334529, supported by cDNA: gi_16323068 [Arabidopsis >gi|10178014|dbj|BAB11466.1| contains similarity to 24 kDa seed
  misc_feature (1)..(257): Homolog of NCBI NO: 15222616 NR Description: hypothetical protein; protein id: At1g64090.1, by cDNA: gi_17381217 [Arabidopsis thaliana] F22C12.15 [Arabidopsis thaliana] >gi|17381218|gb|AAL36421.1|
  misc_feature (9)..(257): Homolog of NCBI NO: 15237093 NR Description: putative protein; protein id: At4g11220.1, by cDNA: 23536., supported by cDNA: gi_14334419, supported by gi_15081760, supported by cDNA: gi_16209686 [Arabidopsis
  misc_feature (9)..(257): Homolog of NCBI NO: 15236556 NR Description: putative protein; protein id: At4g23630.1, by cDNA: 39185., supported by cDNA: gi_15215585 [Arabidopsis
  misc_feature (4)..(256): Homolog of NCBI NO: 34909318 NR Description: OSJNBb0021A09.5 [Oryza sativa (japonica
  misc_feature (8)..(255): Homolog of NCBI NO: 18406991 NR Description: expressed protein; protein id: At2g46170.1, by cDNA: gi_15450758, supported by cDNA: gi_18491130 [Arabidopsis >gi|25408969|pir||E84899 hypothetical protein At2g46170
  misc_feature (37)..(256): Homolog of NCBI NO: 34904202 NR Description: P0492F05.25 [Oryza sativa (japonica
  misc_feature (5)..(255): Homolog of NCBI NO: 15233147 NR Description: putative protein; protein id: At3g61560.1
  misc_feature (8)..(243): Homolog of NCBI NO: 15234108 NR Description: hypothetical protein; protein id: At4g01230.1
  misc_feature (13)..(256): Homolog of NCBI NO: 18398810 NR Description: expressed protein; protein id: At3g10260.1, by cDNA: 15153., supported by cDNA: gi_20259182 [Arabidopsis >gi|6056199|gb|AAF02816.1|AC009400_12 unknown protein

SEQ ID NO: 78287 - DNA, 1110 bp, Arabidopsis thaliana
  misc_feature (1)..(1110): Ceres Seq. ID no. 12640409
  misc_feature: MA Experiment ID: 108501 Result: Down-regulated in Transcription
  misc_feature: MA Experiment 108501 PARAMETER Experiment Name: At_ap2_floral_buds_cDNA_P Parameter: Plant Line Value: ap2 (Ler.)
  misc_feature: MA Experiment 108501 PARAMETER Experiment Name: At_ap2_floral_buds_cDNA_P Parameter: Tissue Value: Closed Flower
  misc_feature: MA Experiment ID: 108576 Result: Up-regulated in Transcription
  misc_feature: MA Experiment 108576 PARAMETER Experiment Name: At_42deg_Heat_cDNA_P Parameter: Temperature (deg C) Value: 42 vs. 22
  misc_feature: MA Experiment 108576 PARAMETER Experiment Name: At_42deg_Heat_cDNA_P Parameter: Timepoint (hr) Value: 1
  misc_feature: MA Experiment 108576 PARAMETER Experiment Name: At_42deg_Heat_cDNA_P Parameter: Tissue Value: Aerial
atgtgcacacaagacgaaacaatttttgtgttacacgaccaacaaagtaataatagtgctgctcaatcgttcacaaacttcatatttggagactcattggtagatgttggaaacaacaactatatcttcacattgtcaaaagctgattcttcgccttatggcatcgattttgcaccttccaacggccaacccacgggaagattcactaatggtcgaaccatttccgatattgtgggtgaagccttaggagcaaaatcaccaccaccaccatatcttgaaccaaacactgaggctaacacaattcgcaatggaatcaactatgcttctggtgctgctggaatcttggacgacactggacttctgttcatcgggcgagttccgctgagagaacaagtgagtaattttgagaagagtagagaatatatggtaagagtgattggtgaaaatggtacaaaagagatgttgaagaatgcaatgttcacaatcacaattggatcaaatgatattttgaattatattcaaccatcaatacctttcttctctcaagacaagctccccactgatgtcctacaagattctatggtcctccatttaaccacacatcttaagcgattgcatcagctaggaggtaggaagttcgtggtggttggagtagggccactcggttgcataccctttgctcgagcgttgaatttaataccagccggaaaatgctccgaacaagtcaaccaagtagtccgaggttataacatgaagcttatacactctcttaagacattgaacaatgagttaagatccgaagattacaacactacatttgtctacgccaactcttacgacctattcttgaaactagttttgaactatcaactatttggcttgaagaacgcagacaagccgtgttgtggcggctactttccaccgtttgcatgctttaagggacctaaccagaactcaagccaagcagcttgtgaggacaggtccaagtttgtcttctgggacgcgtatcacccaaccgaagctgcaaatctcattgttgccaaagcacttcttgatggtgaccaaactgtggctacccctttcaacatccgctatcttaacgatctttaa

SEQ ID NO: 78288 - protein, 369 aa, Arabidopsis thaliana
  peptide (1)..(369): Ceres Seq. ID no. 12640410
  misc_feature (27)..(350): Pfam Name: GDSL-like Lipase/Acylhydrolase Pfam Description: GDSL-like Lipase/Acylhydrolase
  misc_feature (1)..(369): Homolog of NCBI NO: 15238210 NR Description: GDSL-motif lipase/hydrolase-like protein; protein
  misc_feature (18)..(366): Homolog of NCBI NO: 38345537 NR Description: OSJNBa0020J04.12 [Oryza sativa (japonica
  misc_feature (26)..(369): Homolog of NCBI NO: 15229742 NR Description: putative protein; protein id: At3g50400.1 thaliana] >gi|7630026|emb|CAB88323.1| putative protein thaliana] >gi|26450386|dbj|BAC42308.1| unknown protein
  misc_feature (26)..(369): Homolog of NCBI NO: 15227849 NR Description: putative GDSL-motif lipase/hydrolase; protein id:
  misc_feature (23)..(369): Homolog of NCBI NO: 34899288 NR Description: similar to GDSL-motif lipase/hydrolase [Oryza
  misc_feature (27)..(369): Homolog of NCBI NO: 18409881 NR Description: hypothetical protein; protein id: At1g71691.1
  misc_feature (8)..(351): Homolog of NCBI NO: 15221260 NR Description: putative lipase/acylhydrolase; protein id: supported by cDNA: 30001. [Arabidopsis thaliana]
  misc_feature (8)..(369): Homolog of NCBI NO: 15241626 NR Description: GDSL-motif lipase acylhydrolase-like protein;
  misc_feature (220)..(369): Homolog of NCBI NO: 15234857 NR Description: proline-rich, APG like protein; protein id:
  misc_feature (26)..(122): Homolog of NCBI NO: 15234857 NR Description: proline-rich, APG like protein; protein id:
MCTQDETIFVLHDQQSNNSAAQSFTNFIFGDSLVDVGNNNYIFTLSKADSSPYGIDFAPSNGQPTGRFTNGRTISDIVGEALGAKSPPPPYLEPNTEANTIRNGINYASGAAGILDDTGLLFIGRVPLREQVSNFEKSREYMVRVIGENGTKEMLKNAMFTITIGSNDILNYIQPSIPFFSQDKLPTDVLQDSMVLHLTTHLKRLHQLGGRKFVVVGVGPLGCIPFARALNLIPAGKCSEQVNQVVRGYNMKLIHSLKTLNNELRSEDYNTTFVYANSYDLFLKLVLNYQLFGLKNADKPCCGGYFPPFACFKGPNQNSSQAACEDRSKFVFWDAYHPTEAANLIVAKALLDGDQTVATPFNIRYLNDL

SEQ ID NO: 78289 - protein, 228 aa, Arabidopsis thaliana
  peptide (1)..(228): Ceres Seq. ID no. 12640411
  misc_feature (1)..(209): Pfam Name: GDSL-like Lipase/Acylhydrolase Pfam Description: GDSL-like Lipase/Acylhydrolase
  misc_feature (1)..(228): Homolog of NCBI NO: 15238210 NR Description: GDSL-motif lipase/hydrolase-like protein; protein
  misc_feature (1)..(225): Homolog of NCBI NO: 38345537 NR Description: OSJNBa0020J04.12 [Oryza sativa (japonica
  misc_feature (1)..(228): Homolog of NCBI NO: 15229742 NR Description: putative protein; protein id: At3g50400.1 thaliana] >gi|7630026|emb|CAB88323.1| putative protein thaliana] >gi|26450386|dbj|BAC42308.1| unknown protein
  misc_feature (1)..(228): Homolog of NCBI NO: 15227849 NR Description: putative GDSL-motif lipase/hydrolase; protein id:
  misc_feature (1)..(228): Homolog of NCBI NO: 34899288 NR Description: similar to GDSL-motif lipase/hydrolase [Oryza
  misc_feature (1)..(228): Homolog of NCBI NO: 18409881 NR Description: hypothetical protein; protein id: At1g71691.1
  misc_feature (1)..(210): Homolog of NCBI NO: 15221260 NR Description: putative lipase/acylhydrolase; protein id: supported by cDNA: 30001. [Arabidopsis thaliana]
  misc_feature (1)..(228): Homolog of NCBI NO: 15241626 NR Description: GDSL-motif lipase acylhydrolase-like protein;
  misc_feature (79)..(228): Homolog of NCBI NO: 15234857 NR Description: proline-rich, APG like protein; protein id:
  misc_feature (1)..(228): Homolog of NCBI NO: 18417760 NR Description: putative protein; protein id: At5g15720.1, by cDNA: 118296. [Arabidopsis thaliana]
MVRVIGENGTKEMLKNAMFTITIGSNDILNYIQPSIPFFSQDKLPTDVLQDSMVLHLTTHLKRLHQLGGRKFVVVGVGPLGCIPFARALNLIPAGKCSEQVNQVVRGYNMKLIHSLKTLNNELRSEDYNTTFVYANSYDLFLKLVLNYQLFGLKNADKPCCGGYFPPFACFKGPNQNSSQAACEDRSKFVFWDAYHPTEAANLIVAKALLDGDQTVATPFNIRYLNDL

SEQ ID NO: 78290 - protein, 216 aa, Arabidopsis thaliana
  peptide (1)..(216): Ceres Seq. ID no. 12640412
  misc_feature (1)..(197): Pfam Name: GDSL-like Lipase/Acylhydrolase Pfam Description: GDSL-like Lipase/Acylhydrolase
  misc_feature (1)..(216): Homolog of NCBI NO: 15238210 NR Description: GDSL-motif lipase/hydrolase-like protein; protein
  misc_feature (1)..(213): Homolog of NCBI NO: 38345537 NR Description: OSJNBa0020J04.12 [Oryza sativa (japonica
  misc_feature (1)..(216): Homolog of NCBI NO: 15229742 NR Description: putative protein; protein id: At3g50400.1 thaliana] >gi|7630026|emb|CAB88323.1| putative protein thaliana] >gi|26450386|dbj|BAC42308.1| unknown protein
  misc_feature (1)..(216): Homolog of NCBI NO: 15227849 NR Description: putative GDSL-motif lipase/hydrolase; protein id:
  misc_feature (1)..(216): Homolog of NCBI NO: 34899288 NR Description: similar to GDSL-motif lipase/hydrolase [Oryza
  misc_feature (1)..(216): Homolog of NCBI NO: 18409881 NR Description: hypothetical protein; protein id: At1g71691.1
  misc_feature (1)..(198): Homolog of NCBI NO: 15221260 NR Description: putative lipase/acylhydrolase; protein id: supported by cDNA: 30001. [Arabidopsis thaliana]
  misc_feature (1)..(216): Homolog of NCBI NO: 15241626 NR Description: GDSL-motif lipase acylhydrolase-like protein;
  misc_feature (67)..(216): Homolog of NCBI NO: 15234857 NR Description: proline-rich, APG like protein; protein id:
  misc_feature (1)..(216): Homolog of NCBI NO: 18417760 NR Description: putative protein; protein id: At5g15720.1, by cDNA: 118296. [Arabidopsis thaliana]
MLKNAMFTITIGSNDILNYIQPSIPFFSQDKLPTDVLQDSMVLHLTTHLKRLHQLGGRKFVVVGVGPLGCIPFARALNLIPAGKCSEQVNQVVRGYNMKLIHSLKTLNNELRSEDYNTTFVYANSYDLFLKLVLNYQLFGLKNADKPCCGGYFPPFACFKGPNQNSSQAACEDRSKFVFWDAYHPTEAANLIVAKALLDGDQTVATPFNIRYLNDL

SEQ ID NO: 78291 - DNA, 477 bp, Arabidopsis thaliana
  misc_feature (1)..(477): Ceres Seq. ID no. 12640427
  misc_feature: MA Experiment ID: 20000184 Result: Down-regulated in Transcription
  misc_feature: MA Experiment 20000184 PARAMETER Experiment Name: At_Shoots__P Parameter: Age (day) Value: 7
  misc_feature: MA Experiment 20000184 PARAMETER Experiment Name: At_Shoots__P Parameter: Tissue Value: Shoots vs. Whole Plant
  misc_feature: MA Experiment ID: 20001451 Result: Up-regulated in Transcription
  misc_feature: MA Experiment 20001451 PARAMETER Experiment Name: At_Far-red-induction_P Parameter: Age (day) Value: 7
  misc_feature: MA Experiment 20001451 PARAMETER Experiment Name: At_Far-red-induction_P Parameter: Light Value: Far-red vs. White
  misc_feature: MA Experiment 20001451 PARAMETER Experiment Name: At_Far-red-induction_P Parameter: Organism Value: A. thaliana
  misc_feature: MA Experiment 20001451 PARAMETER Experiment Name: At_Far-red-induction_P Parameter: Plant Line Value: Columbia
  misc_feature: MA Experiment 20001451 PARAMETER Experiment Name: At_Far-red-induction_P Parameter: Timepoint (hr) Value: 24
  misc_feature: MA Experiment 20001451 PARAMETER Experiment Name: At_Far-red-induction_P Parameter: Tissue Value: Whole Plant
atgagtaaagcacggcataatttccggttagacgaggttggaatcaggcggcaactctcaatggtatcgaaaatcataaaattcaaagacattcacttgtaccgacacttggagaaccttgaagcagaagactgcttctttgtataccgtatggttgtagttctgttcagacgagaactaacctttgagcagacgttgtgtctctgggaagtaatgtgggcggatcaagctgcaatacgaactgggattgcgaaggcgacatgggggagaatccggttacgagcaccaccgacagaagatttgttgctttacgcgatagctgcaagcgtgctgcagaggaggaagacgataatagagaaatacagtgggatggatgagataatgaaggaatgtaacagcatggctggtcatcttgatgtttggaaacttctagacgatgctcatgacttagtcgtcaatcttcacgacaagatctaa

SEQ ID NO: 78292 - protein, 158 aa, Arabidopsis thaliana
  peptide (1)..(158): Ceres Seq. ID no. 12640428
  misc_feature (1)..(158): Homolog of NCBI NO: 15238237 NR Description: GTPase activator protein of Rab-like small
  misc_feature (1)..(158): Homolog of NCBI NO: 37536102 NR Description: putative GTPase activating protein [Oryza sativa
  misc_feature (1)..(158): Homolog of NCBI NO: 15229125 NR Description: GTPase activating -like protein; protein id:
  misc_feature (1)..(158): Homolog of NCBI NO: 9759196 NR Description: GTPase activator protein of Rab-like small
  misc_feature (1)..(158): Homolog of NCBI NO: 15238777 NR Description: GTPase activator protein of Rab-like small protein; protein id: At5g53570.1, supported by cDNA: gi_14517421, by cDNA: gi_20908079 [Arabidopsis thaliana]
  misc_feature (1)..(158): Homolog of NCBI NO: 15238518 NR Description: GTPase activator-like protein of Rab-like small protein id: At5g24390.1 [Arabidopsis thaliana]
  misc_feature (1)..(74): Homolog of NCBI NO: 34893986 NR Description: P0672D08.1 [Oryza sativa (japonica
  misc_feature (1)..(74): Homolog of NCBI NO: 30688016 NR Description: expressed protein [Arabidopsis thaliana]
  misc_feature (1)..(74): Homolog of NCBI NO: 25407604 NR Description: hypothetical protein AT4g28550 [imported] - thaliana >gi|5701787|emb|CAB52161.1| putative protein thaliana] >gi|7269710|emb|CAB81443.1| putative protein
  misc_feature (1)..(75): Homolog of NCBI NO: 83635 NR Description: hypothetical protein - yeast (Yarrowia
MSKARHNFRLDEVGIRRQLSMVSKIIKFKDIHLYRHLENLEAEDCFFVYRMVVVLFRRELTFEQTLCLWEVMWADQAAIRTGIAKATWGRIRLRAPPTEDLLLYAIAASVLQRRKTIIEKYSGMDEIMKECNSMAGHLDVWKLLDDAHDLVVNLHDKI

SEQ ID NO: 78293 - protein, 138 aa, Arabidopsis thaliana
  peptide (1)..(138): Ceres Seq. ID no. 12640429
  misc_feature (1)..(138): Homolog of NCBI NO: 15238237 NR Description: GTPase activator protein of Rab-like small
  misc_feature (1)..(138): Homolog of NCBI NO: 37536102 NR Description: putative GTPase activating protein [Oryza sativa
  misc_feature (1)..(138): Homolog of NCBI NO: 15229125 NR Description: GTPase activating -like protein; protein id:
  misc_feature (1)..(138): Homolog of NCBI NO: 9759196 NR Description: GTPase activator protein of Rab-like small
  misc_feature (1)..(138): Homolog of NCBI NO: 15238777 NR Description: GTPase activator protein of Rab-like small protein; protein id: At5g53570.1, supported by cDNA: gi_14517421, by cDNA: gi_20908079 [Arabidopsis thaliana]
  misc_feature (1)..(138): Homolog of NCBI NO: 15238518 NR Description: GTPase activator-like protein of Rab-like small protein id: At5g24390.1 [Arabidopsis thaliana]
  misc_feature (1)..(54): Homolog of NCBI NO: 34893986 NR Description: P0672D08.1 [Oryza sativa (japonica
  misc_feature (1)..(54): Homolog of NCBI NO: 30688016 NR Description: expressed protein [Arabidopsis thaliana]
  misc_feature (1)..(54): Homolog of NCBI NO: 25407604 NR Description: hypothetical protein AT4g28550 [imported] - thaliana >gi|5701787|emb|CAB52161.1| putative protein thaliana] >gi|7269710|emb|CAB81443.1| putative protein
  misc_feature (1)..(55): Homolog of NCBI NO: 83635 NR Description: hypothetical protein - yeast (Yarrowia
MVSKIIKFKDIHLYRHLENLEAEDCFFVYRMVVVLFRRELTFEQTLCLWEVMWADQAAIRTGIAKATWGRIRLRAPPTEDLLLYAIAASVLQRRKTIIEKYSGMDEIMKECNSMAGHLDVWKLLDDAHDLVVNLHDKI

SEQ ID NO: 78294 - protein, 108 aa, Arabidopsis thaliana
  peptide (1)..(108): Ceres Seq. ID no. 12640430
  misc_feature (1)..(108): Homolog of NCBI NO: 15238237 NR Description: GTPase activator protein of Rab-like small
  misc_feature (1)..(108): Homolog of NCBI NO: 37536102 NR Description: putative GTPase activating protein [Oryza sativa
  misc_feature (1)..(108): Homolog of NCBI NO: 15229125 NR Description: GTPase activating -like protein; protein id:
  misc_feature (1)..(108): Homolog of NCBI NO: 9759196 NR Description: GTPase activator protein of Rab-like small
  misc_feature (1)..(108): Homolog of NCBI NO: 15238777 NR Description: GTPase activator protein of Rab-like small protein; protein id: At5g53570.1, supported by cDNA: gi_14517421, by cDNA: gi_20908079 [Arabidopsis thaliana]
  misc_feature (1)..(108): Homolog of NCBI NO: 15238518 NR Description: GTPase activator-like protein of Rab-like small protein id: At5g24390.1 [Arabidopsis thaliana]
  misc_feature (1)..(24): Homolog of NCBI NO: 34893986 NR Description: P0672D08.1 [Oryza sativa (japonica
  misc_feature (1)..(24): Homolog of NCBI NO: 30688016 NR Description: expressed protein [Arabidopsis thaliana]
  misc_feature (1)..(24): Homolog of NCBI NO: 25407604 NR Description: hypothetical protein AT4g28550 [imported] - thaliana >gi|5701787|emb|CAB52161.1| putative protein thaliana] >gi|7269710|emb|CAB81443.1| putative protein
  misc_feature (1)..(25): Homolog of NCBI NO: 83635 NR Description: hypothetical protein - yeast (Yarrowia
MVVVLFRRELTFEQTLCLWEVMWADQAAIRTGIAKATWGRIRLRAPPTEDLLLYAIAASVLQRRKTIIEKYSGMDEIMKECNSMAGHLDVWKLLDDAHDLVVNLHDKI

SEQ ID NO: 78295 - DNA, 1422 bp, Arabidopsis thaliana
  misc_feature (1)..(1422): Ceres Seq. ID no. 12640504
  misc_feature: MA Experiment ID: 108434 Result: Up-regulated in Transcription
  misc_feature: MA Experiment 108434 PARAMETER Experiment Name: At_Root_Tips_cDNA_P Parameter: Tissue Value: Root Tips
  misc_feature: MA Experiment ID: 108462 Result: Down-regulated in Transcription
  misc_feature: MA Experiment 108462 PARAMETER Experiment Name: At_Germinating_Seeds_cDNA_P Parameter: Age (day) Value: 2 vs. 0
  misc_feature: MA Experiment 108462 PARAMETER Experiment Name: At_Germinating_Seeds_cDNA_P Parameter: Tissue Value: Germinating Seeds
  misc_feature: MA Experiment ID: 108463 Result: Down-regulated in Transcription
  misc_feature: MA Experiment 108463 PARAMETER Experiment Name: At_Germinating_Seeds_cDNA_P Parameter: Age (day) Value: 3 vs. 0
  misc_feature: MA Experiment 108463 PARAMETER Experiment Name: At_Germinating_Seeds_cDNA_P Parameter: Tissue Value: Germinating Seeds
  misc_feature: MA Experiment ID: 108464 Result: Down-regulated in Transcription
  misc_feature: MA Experiment 108464 PARAMETER Experiment Name: At_Germinating_Seeds_cDNA_P Parameter: Age (day) Value: 4 vs. 0
  misc_feature: MA Experiment 108464 PARAMETER Experiment Name: At_Germinating_Seeds_cDNA_P Parameter: Tissue Value: Germinating Seeds
  misc_feature: MA Experiment ID: 20000069 Result: Down-regulated in Transcription
  misc_feature: MA Experiment 20000069 PARAMETER Experiment Name: At_100uM_ABA_Mutants_cDNA_P Parameter: Plant Line Value: CS23
  misc_feature: MA Experiment 20000069 PARAMETER Experiment Name: At_100uM_ABA_Mutants_cDNA_P Parameter: Timepoint (hr) Value: 6
  misc_feature: MA Experiment 20000069 PARAMETER Experiment Name: At_100uM_ABA_Mutants_cDNA_P Parameter: Tissue Value: Aerial
  misc_feature: MA Experiment 20000069 PARAMETER Experiment Name: At_100uM_ABA_Mutants_cDNA_P Parameter: Treatment Value: 100uM ABA vs. No Treatment
  misc_feature: MA Experiment ID: 20000070 Result: Down-regulated in Transcription
  misc_feature: MA Experiment 20000070 PARAMETER Experiment Name: At_100uM_ABA_Mutants_cDNA_P Parameter: Plant Line Value: CS24
  misc_feature: MA Experiment 20000070 PARAMETER Experiment Name: At_100uM_ABA_Mutants_cDNA_P Parameter: Timepoint (hr) Value: 6
  misc_feature: MA Experiment 20000070 PARAMETER Experiment Name: At_100uM_ABA_Mutants_cDNA_P Parameter: Tissue Value: Aerial
  misc_feature: MA Experiment 20000070 PARAMETER Experiment Name: At_100uM_ABA_Mutants_cDNA_P Parameter: Treatment Value: 100uM ABA vs. No Treatment
  misc_feature: MA Experiment ID: 20000113 Result: Down-regulated in Transcription
  misc_feature: MA Experiment 20000113 PARAMETER Experiment Name: At_42deg_Heat_cDNA_P Parameter: Temperature (deg C) Value: 42 vs. 22
  misc_feature: MA Experiment 20000113 PARAMETER Experiment Name: At_42deg_Heat_cDNA_P Parameter: Timepoint (hr) Value: 8
  misc_feature: MA Experiment 20000113 PARAMETER Experiment Name: At_42deg_Heat_cDNA_P Parameter: Tissue Value: Aerial
  misc_feature: MA Experiment ID: 20000117 Result: Down-regulated in Transcription
  misc_feature: MA Experiment 20000117 PARAMETER Experiment Name: At_100uM_ABA_Mutants_cDNA_P Parameter: Plant Line Value: Columbia
  misc_feature: MA Experiment 20000117 PARAMETER Experiment Name: At_100uM_ABA_Mutants_cDNA_P Parameter: Timepoint (hr) Value: 6
  misc_feature: MA Experiment 20000117 PARAMETER Experiment Name: At_100uM_ABA_Mutants_cDNA_P Parameter: Tissue Value: Aerial
  misc_feature: MA Experiment 20000117 PARAMETER Experiment Name: At_100uM_ABA_Mutants_cDNA_P Parameter: Treatment Value: 100uM ABA vs. No Treatment
atggcgagtgtgtcgtggcgggctgtggctgtagctatggtggtggtgttgctgtcattgcagtggtttgcaaaagggtacccggaagaagatttggtggtgaggctgccaggtcaaccaactgttgggttcaaacaatacgcaggttatgtcgatgtcgatgtgaaagctggtcggagtctgttctattactatgtggaggctgtgaaacaacctgactcaaagccattgaccctttggctcaatggaggtccaggttgttcttcaattggtggaggagctttcactgagttgggtccattttaccccactggcgatggccgtggccttcgtgttaactccatgtcttggaacaaagcgtcgcacctgctttttgtggagtcacctgctggagtaggatggtcttactctaataaaagctctgattacaacaccggggataagtctactgcaaacgatatgcttgtgttcttgttgagatggtttgagaagttcccaaagttgaagtctcgggatctctttcttactggcgaaagctatgcaggacattacatacctcaactggctgatgcgattctcagctacaattcacactcaagtggattcaaattcaacatcaaaggcgttgctattgggaatccacttctgaagcttgacagagacagtccagctacctacgagttcttctggtcgcatggcatgatctctgatgaactaaaactcacaatcacgagtcaatgtgactttgatgattacacatttgctagcccccataacgtaagcacggcctgcaatgaagctattagtgaaactgaaaacattatcactgagtatgtcaacaactatgatgttctcctcgatgtatgttatccgtctatcgtccagcaagagctgaggctcaagaaaatggctactaaaatgagcatgggagtggatgtgtgtatgacctatgaaagacggttctactttaatcttccagaggtacaaaaggcgcttcatgcgaaccgtactcatctgccttattcatggtcaatgtgcagcggcgtgttaaactactctgatatcgatgggaacatcgacatgcttccgattctgaagagaattatactgaacaaaactcctatttggatcttcagtggagatcaagattctgtagttccattcgggggttcaagaactctcgtaagagaacttgctcaagatctcaacttcaagacaacagttccctatggagcctggttccacaaaagccaggttggaggctgggccatagagtatggaaaactactgacgtttgcaacggtgagaggagcggctcatatggtaccgtatgcacagccctcacgagctctacatttgttcagtagctttgtaagtggccggagattacccaacaacacacattcttctactgatgaatga

SEQ ID NO: 78296 - protein, 473 aa, Arabidopsis thaliana; identical to SEQ ID NO: 77387
  peptide (1)..(473): Ceres Seq. ID no. 12640505
  misc_feature (1)..(473): Homolog of NCBI NO: 15238328 NR Description: serine carboxypeptidase II-like; protein id:
  misc_feature (4)..(473): Homolog of NCBI NO: 15224454 NR Description: putative serine carboxypeptidase II; protein id: [Arabidopsis thaliana] >gi|25289797|pir||D84503 probable serine
  misc_feature (1)..(467): Homolog of NCBI NO: 15238327 NR Description: serine carboxypeptidase-II like; protein id:
  misc_feature (4)..(303): Homolog of NCBI NO: 28393789 NR Description: putative serine carboxypeptidase II [Arabidopsis
  misc_feature (287)..(473): Homolog of NCBI NO: 28393789 NR Description: putative serine carboxypeptidase II [Arabidopsis
  misc_feature (1)..(467): Homolog of NCBI NO: 15218514 NR Description: serine carboxypeptidase II, putative; protein id:
  misc_feature (9)..(464): Homolog of NCBI NO: 30685740 NR Description: serine carboxypeptidase -related [Arabidopsis >gi|18377727|gb|AAL67013.1| putative serine carboxypeptidase II
  misc_feature (1)..(464): Homolog of NCBI NO: 18396647 NR Description: serine carboxypeptidase II, putative; protein id: supported by cDNA: gi_16648968 [Arabidopsis thaliana]
  misc_feature (9)..(464): Homolog of NCBI NO: 25289793 NR Description: probable serine carboxypeptidase II [imported] - thaliana >gi|2459435|gb|AAB80670.1| putative serine
  misc_feature (1)..(464): Homolog of NCBI NO: 25289785 NR Description: probable serine carboxypeptidase II [imported] - thaliana >gi|12322985|gb|AAG51475.1|AC069471_6 serine

SEQ ID NO: 78297 - protein, 461 aa, Arabidopsis thaliana; identical to SEQ ID NO: 77388
  peptide (1)..(461): Ceres Seq. ID no. 12640506
  misc_feature (1)..(461): Homolog of NCBI NO: 15238328 NR Description: serine carboxypeptidase II-like; protein id:
  misc_feature (1)..(461): Homolog of NCBI NO: 15224454 NR Description: putative serine carboxypeptidase II; protein id: [Arabidopsis thaliana] >gi|25289797|pir||D84503 probable serine
  misc_feature (1)..(455): Homolog of NCBI NO: 15238327 NR Description: serine carboxypeptidase-II like; protein id:
  misc_feature (1)..(291): Homolog of NCBI NO: 28393789 NR Description: putative serine carboxypeptidase II [Arabidopsis
  misc_feature (275)..(461): Homolog of NCBI NO: 28393789 NR Description: putative serine carboxypeptidase II [Arabidopsis
  misc_feature (1)..(455): Homolog of NCBI NO: 15218514 NR Description: serine carboxypeptidase II, putative; protein id:
  misc_feature (1)..(452): Homolog of NCBI NO: 30685740 NR Description: serine carboxypeptidase -related [Arabidopsis >gi|18377727|gb|AAL67013.1| putative serine carboxypeptidase II
  misc_feature (1)..(452): Homolog of NCBI NO: 18396647 NR Description: serine carboxypeptidase II, putative; protein id: supported by cDNA: gi_16648968 [Arabidopsis thaliana]
  misc_feature (1)..(452): Homolog of NCBI NO: 25289793 NR Description: probable serine carboxypeptidase II [imported] - thaliana >gi|2459435|gb|AAB80670.1| putative serine
  misc_feature (1)..(452): Homolog of NCBI NO: 25289785 NR Description: probable serine carboxypeptidase II [imported] - thaliana >gi|12322985|gb|AAG51475.1|AC069471_6 serine

SEQ ID NO: 78298 - protein, 359 aa, Arabidopsis thaliana; identical to SEQ ID NO: 77389
  peptide (1)..(359): Ceres Seq. ID no. 12640507
  misc_feature (1)..(359): Homolog of NCBI NO: 15238328 NR Description: serine carboxypeptidase II-like; protein id:
  misc_feature (1)..(359): Homolog of NCBI NO: 15224454 NR Description: putative serine carboxypeptidase II; protein id: [Arabidopsis thaliana] >gi|25289797|pir||D84503 probable serine
  misc_feature (1)..(353): Homolog of NCBI NO: 15238327 NR Description: serine carboxypeptidase-II like; protein id:
  misc_feature (1)..(189): Homolog of NCBI NO: 28393789 NR Description: putative serine carboxypeptidase II [Arabidopsis
  misc_feature (173)..(359): Homolog of NCBI NO: 28393789 NR Description: putative serine carboxypeptidase II [Arabidopsis
  misc_feature (1)..(353): Homolog of NCBI NO: 15218514 NR Description: serine carboxypeptidase II, putative; protein id:
  misc_feature (1)..(350): Homolog of NCBI NO: 30685740 NR Description: serine carboxypeptidase -related [Arabidopsis >gi|18377727|gb|AAL67013.1| putative serine carboxypeptidase II
  misc_feature (1)..(350): Homolog of NCBI NO: 18396647 NR Description: serine carboxypeptidase II, putative; protein id: supported by cDNA: gi_16648968 [Arabidopsis thaliana]
  misc_feature (1)..(350): Homolog of NCBI NO: 25289793 NR Description: probable serine carboxypeptidase II [imported] - thaliana >gi|2459435|gb|AAB80670.1| putative serine
  misc_feature (1)..(350): Homolog of NCBI NO: 25289785 NR Description: probable serine carboxypeptidase II [imported] - thaliana >gi|12322985|gb|AAG51475.1|AC069471_6 serine

SEQ ID NO: 78299 - DNA, 795 bp, Arabidopsis thaliana
  misc_feature (1)..(795): Ceres Seq. ID no. 12640567
  misc_feature: MA Experiment ID: 20000307 Result: Down-regulated in Transcription
  misc_feature: MA Experiment 20000307 PARAMETER Experiment Name: At_Germinating_Seeds_Sub_P Parameter: Age (hr) Value: 24 vs. 0
  misc_feature: MA Experiment 20000307 PARAMETER Experiment Name: At_Germinating_Seeds_Sub_P Parameter: Organism Value: A. thaliana
  misc_feature: MA Experiment 20000307 PARAMETER Experiment Name: At_Germinating_Seeds_Sub_P Parameter: Plant Line Value: WS
  misc_feature: MA Experiment 20000307 PARAMETER Experiment Name: At_Germinating_Seeds_Sub_P Parameter: Tissue Value: Germinating Seeds
  misc_feature: MA Experiment ID: 20000355 Result: Down-regulated in Transcription
  misc_feature: MA Experiment 20000355 PARAMETER Experiment Name: At_Siliques_Sub_P Parameter: Age (day) Value: 21
  misc_feature: MA Experiment 20000355 PARAMETER Experiment Name: At_Siliques_Sub_P Parameter: Organism Value: A. thaliana
  misc_feature: MA Experiment 20000355 PARAMETER Experiment Name: At_Siliques_Sub_P Parameter: Plant Line Value: WS
  misc_feature: MA Experiment 20000355 PARAMETER Experiment Name: At_Siliques_Sub_P Parameter: Tissue Value: Less Than 5mm Siliques vs. Whole Plant
atgaagaagaagctccagacacgttttccagcgacaaggattaagaagattatgcaaactgatgaggaagttggcaaaatagcaatggcagtccctcttcttgtttctaaagctttggagctgtttttacaagacttgtgtaatcacacgtatgatgtaactctaagccgaggtgctaaaactgtcaacgcctttcatttgaagcagtgtgtgcaagcgactaatgtctttgattttctaagagacactgtcgctaaagttcctgatttgggtggctcagacactgaagaccaatcagctaccaaaagaaggaaagttgttgatggaagtagttgcaacgatgaagatatgataaagaccactcaaatgcatgaggtcaaacatactagctgtggcagaggaaggcgaggtagaggccgcggacgaagtagtggaagaacaggaagtgggctgtctctaaaatttgaagaagatttagaagacggttctcccgaaagcagcaggaccccgtctcccgaaaacgggagcctttctcacgacgatacatcttggaagaaagttgcatcacacaacaatcatcatagtagtaactcagaggtaaaagtaaggaacttcgatcttaatgttgaattagatgagaatggagacaatgctacatggctggaaacacagctagagagaagtccagattacccgttggagattaacgaaatgaaaatagatcctgatgatcaacaacaggctagtgctagtgacgaggaagattatgatgaagaaagcatagaccaagagtga

SEQ ID NO: 78300 - protein, 264 aa, Arabidopsis thaliana
  peptide (1)..(264): Ceres Seq. ID no. 12640568
  misc_feature (7)..(71): Pfam Name: Histone-like transcription factor (CBF/NF-Y) and Pfam Description: Histone-like transcription factor (CBF/NF-Y)
  misc_feature (29)..(264): Homolog of NCBI NO: 15239766 NR Description: putative protein; protein id: At5g19490.1
  misc_feature (1)..(225): Homolog of NCBI NO: 30682195 NR Description: transcription factor Hap5a, putative [Arabidopsis >gi|15795167|dbj|BAB03155.1| gene_id:MQC3.30~unknown protein thaliana] >gi|18087597|gb|AAL58929.1|AF462841_1 At3g12480/MQC3.32
  misc_feature (1)..(259): Homolog of NCBI NO: 18481624 NR Description: repressor protein [Oryza sativa]
  misc_feature (1)..(176): Homolog of NCBI NO: 18481626 NR Description: repressor protein [Zea mays]
  misc_feature (7)..(225): Homolog of NCBI NO: 12321975 NR Description: unknown protein; 69004-67516 [Arabidopsis
  misc_feature (2)..(179): Homolog of NCBI NO: 21313424 NR Description: RIKEN cDNA 2310074H19 [Mus musculus]
  misc_feature (2)..(99): Homolog of NCBI NO: 28279647 NR Description: Similar to Dr1 associated protein 1 (negative
  misc_feature (2)..(179): Homolog of NCBI NO: 18426973 NR Description: DR1-associated protein 1; negative cofactor 2 DR1- associated corepressor [Homo sapiens]
  misc_feature (2)..(97): Homolog of NCBI NO: 27661225 NR Description: similar to RIKEN cDNA 2310074H19 [Mus musculus]
  misc_feature (2)..(208): Homolog of NCBI NO: 10242351 NR Description: NC2alpha [Drosophila melanogaster]
MKKKLQTRFPATRIKKIMQTDEEVGKIAMAVPLLVSKALELFLQDLCNHTYDVTLSRGAKTVNAFHLKQCVQATNVFDFLRDTVAKVPDLGGSDTEDQSATKRRKVVDGSSCNDEDMIKTTQMHEVKHTSCGRGRRGRGRGRSSGRTGSGLSLKFEEDLEDGSPESSRTPSPENGSLSHDDTSWKKVASHNNHHSSNSEVKVRNFDLNVELDENGDNATWLETQLERSPDYPLEINEMKIDPDDQQQASASDEEDYDEESIDQE

SEQ ID NO: 78301 - protein, 247 aa, Arabidopsis thaliana
  peptide (1)..(247): Ceres Seq. ID no. 12640569
  misc_feature (1)..(54): Pfam Name: Histone-like transcription factor (CBF/NF-Y) and Pfam Description: Histone-like transcription factor (CBF/NF-Y)
  misc_feature (12)..(247): Homolog of NCBI NO: 15239766 NR Description: putative protein; protein id: At5g19490.1
  misc_feature (1)..(208): Homolog of NCBI NO: 30682195 NR Description: transcription factor Hap5a, putative [Arabidopsis >gi|15795167|dbj|BAB03155.1| gene_id:MQC3.30~unknown protein thaliana] >gi|18087597|gb|AAL58929.1|AF462841_1 At3g12480/MQC3.32
  misc_feature (1)..(242): Homolog of NCBI NO: 18481624 NR Description: repressor protein [Oryza sativa]
  misc_feature (1)..(159): Homolog of NCBI NO: 18481626 NR Description: repressor protein [Zea mays]
  misc_feature (1)..(208): Homolog of NCBI NO: 12321975 NR Description: unknown protein; 69004-67516 [Arabidopsis
  misc_feature (1)..(162): Homolog of NCBI NO: 21313424 NR Description: RIKEN cDNA 2310074H19 [Mus musculus]
  misc_feature (1)..(82): Homolog of NCBI NO: 28279647 NR Description: Similar to Dr1 associated protein 1 (negative
  misc_feature (1)..(162): Homolog of NCBI NO: 18426973 NR Description: DR1-associated protein 1; negative cofactor 2 DR1- associated corepressor [Homo sapiens]
  misc_feature (1)..(80): Homolog of NCBI NO: 27661225 NR Description: similar to RIKEN cDNA 2310074H19 [Mus musculus]
  misc_feature (1)..(191): Homolog of NCBI NO: 10242351 NR Description: NC2alpha [Drosophila melanogaster]
MQTDEEVGKIAMAVPLLVSKALELFLQDLCNHTYDVTLSRGAKTVNAFHLKQCVQATNVFDFLRDTVAKVPDLGGSDTEDQSATKRRKVVDGSSCNDEDMIKTTQMHEVKHTSCGRGRRGRGRGRSSGRTGSGLSLKFEEDLEDGSPESSRTPSPENGSLSHDDTSWKKVASHNNHHSSNSEVKVRNFDLNVELDENGDNATWLETQLERSPDYPLEINEMKIDPDDQQQASASDEEDYDEESIDQE

SEQ ID NO: 78302 - protein, 236 aa, Arabidopsis thaliana; identical to SEQ ID NO: 73694
  peptide (1)..(236): Ceres Seq. ID no. 12640570
  misc_feature (1)..(236): Homolog of NCBI NO: 15239766 NR Description: putative protein; protein id: At5g19490.1
  misc_feature (1)..(197): Homolog of NCBI NO: 30682195 NR Description: transcription factor Hap5a, putative [Arabidopsis >gi|15795167|dbj|BAB03155.1| gene_id:MQC3.30~unknown protein thaliana] >gi|18087597|gb|AAL58929.1|AF462841_1 At3g12480/MQC3.32
  misc_feature (1)..(231): Homolog of NCBI NO: 18481624 NR Description: repressor protein [Oryza sativa]
  misc_feature (1)..(148): Homolog of NCBI NO: 18481626 NR Description: repressor protein [Zea mays]
  misc_feature (1)..(197): Homolog of NCBI NO: 12321975 NR Description: unknown protein; 69004-67516 [Arabidopsis
  misc_feature (1)..(151): Homolog of NCBI NO: 21313424 NR Description: RIKEN cDNA 2310074H19 [Mus musculus]
  misc_feature (1)..(71): Homolog of NCBI NO: 28279647 NR Description: Similar to Dr1 associated protein 1 (negative
  misc_feature (1)..(151): Homolog of NCBI NO: 18426973 NR Description: DR1-associated protein 1; negative cofactor 2 DR1- associated corepressor [Homo sapiens]
  misc_feature (1)..(69): Homolog of NCBI NO: 27661225 NR Description: similar to RIKEN cDNA 2310074H19 [Mus musculus]
  misc_feature (1)..(180): Homolog of NCBI NO: 10242351 NR Description: NC2alpha [Drosophila melanogaster]

SEQ ID NO: 78303 - DNA, 2589 bp, Arabidopsis thaliana
  misc_feature (1)..(2589): Ceres Seq. ID no. 12640574
  misc_feature: MA Experiment ID: 20000306 Result: Up-regulated in Transcription
  misc_feature: MA Experiment 20000306 PARAMETER Experiment Name: At_Germinating_Seeds_Sub_P Parameter: Age (hr) Value: 6 vs. 0
  misc_feature: MA Experiment 20000306 PARAMETER Experiment Name: At_Germinating_Seeds_Sub_P Parameter: Organism Value: A. thaliana
  misc_feature: MA Experiment 20000306 PARAMETER Experiment Name: At_Germinating_Seeds_Sub_P Parameter: Plant Line Value: WS
  misc_feature: MA Experiment 20000306 PARAMETER Experiment Name: At_Germinating_Seeds_Sub_P Parameter: Tissue Value: Germinating Seeds
  misc_feature: MA Experiment ID: 20000307 Result: Up-regulated in Transcription
  misc_feature: MA Experiment 20000307 PARAMETER Experiment Name: At_Germinating_Seeds_Sub_P Parameter: Age (hr) Value: 24 vs. 0
  misc_feature: MA Experiment 20000307 PARAMETER Experiment Name: At_Germinating_Seeds_Sub_P Parameter: Organism Value: A. thaliana
  misc_feature: MA Experiment 20000307 PARAMETER Experiment Name: At_Germinating_Seeds_Sub_P Parameter: Plant Line Value: WS
  misc_feature: MA Experiment 20000307 PARAMETER Experiment Name: At_Germinating_Seeds_Sub_P Parameter: Tissue Value: Germinating Seeds
cttacggctttcttcagaaaattggttggttttaaagagtactcatttacttagaaaaaatgttctttcttgcagatctcttttctagccttgtaggatttggtttaggttttaaggtttagcttagatttggtgtaaaattttgtcaatagtcattagtcaactaagtccaaagtcggtgtcaagcatgtgttatgtcaaatctcgttgtatctaattgtgtaaagagtttgtgattaatgtaatcactgatgcacttctactctcgtgttcttaggatttggtccaacttctaggctcttttgggagccattggagtcaaacagcaccgcaaacttattggttggaagtgacttagggatggctgagaggagagtcagtaacggagaagaagttgttattaatgtttcagataaagaagattcaaaagatccaagagcatctccttctttcaatccattggcttcaccagactccgatgctgggattgagaaatcgaaaccagtgccgcccataagcattcctactcctgaaatctataagttctctggtagcgttcataagccacctaaaattccaagtcctgaaggtctagttcggaggaagtctctttcgaggtcaatttactccaagcctaagtcaaggtttggggagcaacagtcttttcgatacgatagcactagagaggaaaatggtggaaggtcccttagggaacagtttggtgctggttcatttgcaaggggttcttttgacagggcttctcctaataacaaatccaataggagcgttgcgtcagcagcactgagtaaagttgctgaggaggaaccggatgaaaatgaagaaatctacaaaaaggttaagctacaccgagtgaagcgtagcggaatgaaacctctggcctttcttgagttggtagtgtttatggccattttgggggctttaattgtgagtttaaccattgatgtggtgaacaagcataccatttgggggttggaattttggaaatggtgtgtgcttgtgatggttacactcagcggcatgttggtgacaaattggttcatgcattttgtggtgttcatcatagaaaagaactatcttcttcggaaaaaagttttgtactttgtgcatgggttgaagaagaatgttcaagtcttcatttggtttagtctggttctgattgcttggatatgtctgttcgatggtgatgttaaacgtactcgtaagaccaagagatttctagacttcatcacttggactattgtctctcttctcgtagggtcaatccttttcttggtgaagacgtttgccttgaaagttcttgcttcaaagttcaacgtcagaaacttctttgagaggattcaagagtctgttttccaccaatacgttcttcagactctctcgggacctccgcttatcgaagaggcagagaacgttgggcgcgtgccaagcacaggtcacctaagtttcacaagaaccaaagatggaaaggtgaaagacaagaaagtgatcgatatgggaaaggttcacaggatgaaacaagagaaggtctctgcttggacaatgcgtgttttgatcgaagccgtgggaacttcaggtatatcaaccatatccagcactctagacgaggtcaacaataagaaagagagaacagataaagagataacaaatgagatggaggctgttgctgctgcttatgacgtcttcaacaatgtcgctaagccaaaccacaattacatagaagaagatgacttattgaggttcatgataaaggaagaagtagaccttgtactcccattaatagaagatgccgacaccggaaaaatcacacgcaagacttttacagaatgggtggttaatgtatacacaagtcggaaaactatagggcattcactgaacgacacaaaaacagcggttaagcagttggacaaacttataactggaatcttgaccgttatcacattcattgtttggatggtacttctggatatagcatcgaccaagcttttattggtcttctcctcacaatttttgggtcttgctttcatgatcggaagtacttgtaagaatatcttcgaatcctttatgttcgtctttgtgatgcatccttatgacgtcggagatcgttgcgttgtcgacggtgttatgttgttggttgaagaaatagatcttttaacaaccgtgttcctcaagattgacaacgagaaagtgttctacccaaattcggttttaatatcgaaaccgataagcaacttctacagaagtccagatatgggagattatgtcgacttcggcatcgcattctcaacaccggccgagaaaatcggctgtctcaagggaaaaatcggagaatacttggtggcaaactcacaacattggtatccagaagcacaggtgatggtgagggcaattgagaatatgaacaagctggtattgaatatactggtccaacacacgataaatttccaagtatatgtagagaagagtttaagaagaaccgcgctgatcatcgcaatcaagcgaattctcgaggatcttgagatcgattacactctccttcctcaagatgtcaatctcactggtcacaaatga

SEQ ID NO: 78304 - protein, 742 aa, Arabidopsis thaliana
  peptide (1)..(742): Ceres Seq. ID no. 12640575
  misc_feature (522)..(730): Pfam Name: Mechanosensitive ion channel Pfam Description: Mechanosensitive ion channel
  misc_feature (1)..(739): Homolog of NCBI NO: 15239859 NR Description: putative protein; protein id: At5g12080.1, by cDNA: gi_18700072 [Arabidopsis thaliana]
  misc_feature (50)..(739): Homolog of NCBI NO: 18390104 NR Description: putative protein T30F21.6 [Sorghum bicolor]
  misc_feature (1)..(365): Homolog of NCBI NO: 38345847 NR Description: OSJNBa0084K11.11 [Oryza sativa (japonica
  misc_feature (383)..(738): Homolog of NCBI NO: 38345847 NR Description: OSJNBa0084K11.11 [Oryza sativa (japonica
  misc_feature (343)..(738): Homolog of NCBI NO: 11994592 NR Description: gb|AAD30575.1~gene_id:T21E2.7~strong similarity
  misc_feature (80)..(353): Homolog of NCBI NO: 11994592 NR Description: gb|AAD30575.1~gene_id:T21E2.7~strong similarity
  misc_feature (359)..(738): Homolog of NCBI NO: 15218429 NR Description: hypothetical protein; protein id: At1g78610.1
  misc_feature (153)..(357): Homolog of NCBI NO: 15218429 NR Description: hypothetical protein; protein id: At1g78610.1
  misc_feature (310)..(738): Homolog of NCBI NO: 15227342 NR Description: hypothetical protein; protein id: At2g17000.1
  misc_feature (153)..(353): Homolog of NCBI NO: 15227342 NR Description: hypothetical protein; protein id: At2g17000.1
MAERRVSNGEEVVINVSDKEDSKDPRASPSFNPLASPDSDAGIEKSKPVPPISIPTPEIYKFSGSVHKPPKIPSPEGLVRRKSLSRSIYSKPKSRFGEQQSFRYDSTREENGGRSLREQFGAGSFARGSFDRASPNNKSNRSVASAALSKVAEEEPDENEEIYKKVKLHRVKRSGMKPLAFLELVVFMAILGALIVSLTIDVVNKHTIWGLEFWKWCVLVMVTLSGMLVTNWFMHFVVFIIEKNYLLRKKVLYFVHGLKKNVQVFIWFSLVLIAWICLFDGDVKRTRKTKRFLDFITWTIVSLLVGSILFLVKTFALKVLASKFNVRNFFERIQESVFHQYVLQTLSGPPLIEEAENVGRVPSTGHLSFTRTKDGKVKDKKVIDMGKVHRMKQEKVSAWTMRVLIEAVGTSGISTISSTLDEVNNKKERTDKEITNEMEAVAAAYDVFNNVAKPNHNYIEEDDLLRFMIKEEVDLVLPLIEDADTGKITRKTFTEWVVNVYTSRKTIGHSLNDTKTAVKQLDKLITGILTVITFIVWMVLLDIASTKLLLVFSSQFLGLAFMIGSTCKNIFESFMFVFVMHPYDVGDRCVVDGVMLLVEEIDLLTTVFLKIDNEKVFYPNSVLISKPISNFYRSPDMGDYVDFGIAFSTPAEKIGCLKGKIGEYLVANSQHWYPEAQVMVRAIENMNKLVLNILVQHTINFQVYVEKSLRRTALIIAIKRILEDLEIDYTLLPQDVNLTGHK

SEQ ID NO: 78305 - protein, 567 aa, Arabidopsis thaliana
  peptide (1)..(567): Ceres Seq. ID no. 12640576
  misc_feature (347)..(555): Pfam Name: Mechanosensitive ion channel Pfam Description: Mechanosensitive ion channel
  misc_feature (1)..(564): Homolog of NCBI NO: 15239859 NR Description: putative protein; protein id: At5g12080.1, by cDNA: gi_18700072 [Arabidopsis thaliana]
  misc_feature (1)..(564): Homolog of NCBI NO: 18390104 NR Description: putative protein T30F21.6 [Sorghum bicolor]
  misc_feature (1)..(190): Homolog of NCBI NO: 38345847 NR Description: OSJNBa0084K11.11 [Oryza sativa (japonica
  misc_feature (208)..(563): Homolog of NCBI NO: 38345847 NR Description: OSJNBa0084K11.11 [Oryza sativa (japonica
  misc_feature (168)..(563): Homolog of NCBI NO: 11994592 NR Description: gb|AAD30575.1~gene_id:T21E2.7~strong similarity
  misc_feature (1)..(178): Homolog of NCBI NO: 11994592 NR Description: gb|AAD30575.1~gene_id:T21E2.7~strong similarity
  misc_feature (184)..(563): Homolog of NCBI NO: 15218429 NR Description: hypothetical protein; protein id: At1g78610.1
  misc_feature (1)..(182): Homolog of NCBI NO: 15218429 NR Description: hypothetical protein; protein id: At1g78610.1
  misc_feature (135)..(563): Homolog of NCBI NO: 15227342 NR Description: hypothetical protein; protein id: At2g17000.1
  misc_feature (1)..(178): Homolog of NCBI NO: 15227342 NR Description: hypothetical protein; protein id: At2g17000.1
MKPLAFLELVVFMAILGALIVSLTIDVVNKHTIWGLEFWKWCVLVMVTLSGMLVTNWFMHFVVFIIEKNYLLRKKVLYFVHGLKKNVQVFIWFSLVLIAWICLFDGDVKRTRKTKRFLDFITWTIVSLLVGSILFLVKTFALKVLASKFNVRNFFERIQESVFHQYVLQTLSGPPLIEEAENVGRVPSTGHLSFTRTKDGKVKDKKVIDMGKVHRMKQEKVSAWTMRVLIEAVGTSGISTISSTLDEVNNKKERTDKEITNEMEAVAAAYDVFNNVAKPNHNYIEEDDLLRFMIKEEVDLVLPLIEDADTGKITRKTFTEWVVNVYTSRKTIGHSLNDTKTAVKQLDKLITGILTVITFIVWMVLLDIASTKLLLVFSSQFLGLAFMIGSTCKNIFESFMFVFVMHPYDVGDRCVVDGVMLLVEEIDLLTTVFLKIDNEKVFYPNSVLISKPISNFYRSPDMGDYVDFGIAFSTPAEKIGCLKGKIGEYLVANSQHWYPEAQVMVRAIENMNKLVLNILVQHTINFQVYVEKSLRRTALIIAIKRILEDLEIDYTLLPQDVNLTGHK

SEQ ID NO: 78306 - protein, 555 aa, Arabidopsis thaliana
  peptide (1)..(555): Ceres Seq. ID no. 12640577
  misc_feature (335)..(543): Pfam Name: Mechanosensitive ion channel Pfam Description: Mechanosensitive ion channel
  misc_feature (1)..(552): Homolog of NCBI NO: 15239859 NR Description: putative protein; protein id: At5g12080.1, by cDNA: gi_18700072 [Arabidopsis thaliana]
  misc_feature (1)..(552): Homolog of NCBI NO: 18390104 NR Description: putative protein T30F21.6 [Sorghum bicolor]
  misc_feature (1)..(178): Homolog of NCBI NO: 38345847 NR Description: OSJNBa0084K11.11 [Oryza sativa (japonica
  misc_feature (196)..(551): Homolog of NCBI NO: 38345847 NR Description: OSJNBa0084K11.11 [Oryza sativa (japonica
  misc_feature (156)..(551): Homolog of NCBI NO: 11994592 NR Description: gb|AAD30575.1~gene_id:T21E2.7~strong similarity
  misc_feature (1)..(166): Homolog of NCBI NO: 11994592 NR Description: gb|AAD30575.1~gene_id:T21E2.7~strong similarity
  misc_feature (172)..(551): Homolog of NCBI NO: 15218429 NR Description: hypothetical protein; protein id: At1g78610.1
  misc_feature (1)..(170): Homolog of NCBI NO: 15218429 NR Description: hypothetical protein; protein id: At1g78610.1
  misc_feature (123)..(551): Homolog of NCBI NO: 15227342 NR Description: hypothetical protein; protein id: At2g17000.1
  misc_feature (1)..(166): Homolog of NCBI NO: 15227342 NR Description: hypothetical protein; protein id: At2g17000.1
MAILGALIVSLTIDVVNKHTIWGLEFWKWCVLVMVTLSGMLVTNWFMHFVVFIIEKNYLLRKKVLYFVHGLKKNVQVFIWFSLVLIAWICLFDGDVKRTRKTKRFLDFITWTIVSLLVGSILFLVKTFALKVLASKFNVRNFFERIQESVFHQYVLQTLSGPPLIEEAENVGRVPSTGHLSFTRTKDGKVKDKKVIDMGKVHRMKQEKVSAWTMRVLIEAVGTSGISTISSTLDEVNNKKERTDKEITNEMEAVAAAYDVFNNVAKPNHNYIEEDDLLRFMIKEEVDLVLPLIEDADTGKITRKTFTEWVVNVYTSRKTIGHSLNDTKTAVKQLDKLITGILTVITFIVWMVLLDIASTKLLLVFSSQFLGLAFMIGSTCKNIFESFMFVFVMHPYDVGDRCVVDGVMLLVEEIDLLTTVFLKIDNEKVFYPNSVLISKPISNFYRSPDMGDYVDFGIAFSTPAEKIGCLKGKIGEYLVANSQHWYPEAQVMVRAIENMNKLVLNILVQHTINFQVYVEKSLRRTALIIAIKRILEDLEIDYTLLPQDVNLTGHK

SEQ ID NO: 78307 - DNA, 1308 bp, Arabidopsis thaliana
  misc_feature (1)..(1308): Ceres Seq. ID no. 12640578
  misc_feature: MA Experiment ID: 108461 Result: Up-regulated in Transcription
  misc_feature: MA Experiment 108461 PARAMETER Experiment Name: At_Germinating_Seeds_cDNA_P Parameter: Age (day) Value: 1 vs. 0
  misc_feature: MA Experiment 108461 PARAMETER Experiment Name: At_Germinating_Seeds_cDNA_P Parameter: Tissue Value: Germinating Seeds
  misc_feature: MA Experiment ID: 20000180 Result: Up-regulated in Transcription
  misc_feature: MA Experiment 20000180 PARAMETER Experiment Name: At_Germinating_Seeds_P Parameter: Age (hr) Value: 24 vs. 0
  misc_feature: MA Experiment 20000180 PARAMETER Experiment Name: At_Germinating_Seeds_P Parameter: Tissue Value: Germinating Seeds
  misc_feature: MA Experiment ID: 20000227 Result: Down-regulated in Transcription
  misc_feature: MA Experiment 20000227 PARAMETER Experiment Name: At_Root-Tips-vs-Tops_P Parameter: Tissue Value: Root Tips vs. Root Tops
  misc_feature: MA Experiment ID: 20000264 Result: Down-regulated in Transcription
  misc_feature: MA Experiment 20000264 PARAMETER Experiment Name: At_Open_Flower_P Parameter: Age (day) Value: 21
  misc_feature: MA Experiment 20000264 PARAMETER Experiment Name: At_Open_Flower_P Parameter: Plant Line Value: WS
  misc_feature: MA Experiment 20000264 PARAMETER Experiment Name: At_Open_Flower_P Parameter: Tissue Value: Open Flower vs. Whole Plant
  misc_feature: MA Experiment ID: 20000265 Result: Down-regulated in Transcription
  misc_feature: MA Experiment 20000265 PARAMETER Experiment Name: At_Open_Flower_P Parameter: Age (day) Value: 21
  misc_feature: MA Experiment 20000265 PARAMETER Experiment Name: At_Open_Flower_P Parameter: Plant Line Value: WS
  misc_feature: MA Experiment 20000265 PARAMETER Experiment Name: At_Open_Flower_P Parameter: Tissue Value: Closed Flower vs. Whole Plant
  misc_feature: MA Experiment ID: 20000286 Result: Down-regulated in Transcription
  misc_feature: MA Experiment 20000286 PARAMETER Experiment Name: At_Open_Flower_P Parameter: Age (day) Value: 21
  misc_feature: MA Experiment 20000286 PARAMETER Experiment Name: At_Open_Flower_P Parameter: Plant Line Value: WS
  misc_feature: MA Experiment 20000286 PARAMETER Experiment Name: At_Open_Flower_P Parameter: Tissue Value: Half Open vs. Whole Plant
  misc_feature: MA Experiment ID: 20000438 Result: Down-regulated in Transcription
  misc_feature: MA Experiment 20000438 PARAMETER Experiment Name: At_Shoots__P Parameter: Age (day) Value: 14
  misc_feature: MA Experiment 20000438 PARAMETER Experiment Name: At_Shoots__P Parameter: Tissue Value: Shoots vs. Whole Plant
  misc_feature: MA Experiment ID: 20000444 Result: Up-regulated in Transcription
  misc_feature: MA Experiment 20000444 PARAMETER Experiment Name: At_100uM_NAA__P Parameter: Age (day) Value: 14
  misc_feature: MA Experiment 20000444 PARAMETER Experiment Name: At_100uM_NAA__P Parameter: Organism Value: A. thaliana
  misc_feature: MA Experiment 20000444 PARAMETER Experiment Name: At_100uM_NAA__P Parameter: Plant Line Value: WS
  misc_feature: MA Experiment 20000444 PARAMETER Experiment Name: At_100uM_NAA__P Parameter: Timepoint (hr) Value: 1
  misc_feature: MA Experiment 20000444 PARAMETER Experiment Name: At_100uM_NAA__P Parameter: Tissue Value: Aerial
  misc_feature: MA Experiment 20000444 PARAMETER Experiment Name: At_100uM_NAA__P Parameter: Treatment Value: 100uM NAA vs. No Treatment
  misc_feature: MA Experiment ID: 20000451 Result: Down-regulated in Transcription
  misc_feature: MA Experiment 20000451 PARAMETER Experiment Name: At_CS6879_Shoots-Roots_P Parameter: Age (day) Value: 14
  misc_feature: MA Experiment 20000451 PARAMETER Experiment Name: At_CS6879_Shoots-Roots_P Parameter: Organism Value: A. thaliana
  misc_feature: MA Experiment 20000451 PARAMETER Experiment Name: At_CS6879_Shoots-Roots_P Parameter: Plant Line Value: CS6879 vs. WS
  misc_feature: MA Experiment 20000451 PARAMETER Experiment Name: At_CS6879_Shoots-Roots_P Parameter: Tissue Value: Roots
  misc_feature: MA Experiment ID: 20000495 Result: Up-regulated in Transcription
  misc_feature: MA Experiment 20000495 PARAMETER Experiment Name: At_Guard_Cells_P Parameter: Harvest Date Value: 8/2/2002
  misc_feature: MA Experiment 20000495 PARAMETER Experiment Name: At_Guard_Cells_P Parameter: Organism Value: A. thaliana
  misc_feature: MA Experiment 20000495 PARAMETER Experiment Name: At_Guard_Cells_P Parameter: Tissue Value: Guard Cells vs. Leaves
  misc_feature: MA Experiment ID: 20000794 Result: Down-regulated in Transcription
  misc_feature: MA Experiment 20000794 PARAMETER Experiment Name: At_Petals_P Parameter: Age (day) Value: 23-25 days
  misc_feature: MA Experiment 20000794 PARAMETER Experiment Name: At_Petals_P Parameter: Plant Line Value: WS
  misc_feature: MA Experiment 20000794 PARAMETER Experiment Name: At_Petals_P Parameter: Tissue Value: Petals vs. Whole plant
  misc_feature: MA Experiment ID: 20001247 Result: Up-regulated in Transcription
  misc_feature: MA Experiment 20001247 PARAMETER Experiment Name: At_Far-red-induction_P Parameter: Age (day) Value: 7
  misc_feature: MA Experiment 20001247 PARAMETER Experiment Name: At_Far-red-induction_P Parameter: Light Value: Far-red vs. White
  misc_feature: MA Experiment 20001247 PARAMETER Experiment Name: At_Far-red-induction_P Parameter: Organism Value: A. thaliana
  misc_feature: MA Experiment 20001247 PARAMETER Experiment Name: At_Far-red-induction_P Parameter: Plant Line Value: Columbia
  misc_feature: MA Experiment 20001247 PARAMETER Experiment Name: At_Far-red-induction_P Parameter: Timepoint (hr) Value: 1
  misc_feature: MA Experiment 20001247 PARAMETER Experiment Name: At_Far-red-induction_P Parameter: Tissue Value: Whole Plant
  misc_feature: MA Experiment ID: 20001248 Result: Up-regulated in Transcription
  misc_feature: MA Experiment 20001248 PARAMETER Experiment Name: At_Far-red-induction_P Parameter: Age (day) Value: 7
  misc_feature: MA Experiment 20001248 PARAMETER Experiment Name: At_Far-red-induction_P Parameter: Light Value: Far-red vs. White
  misc_feature: MA Experiment 20001248 PARAMETER Experiment Name: At_Far-red-induction_P Parameter: Organism Value: A. thaliana
  misc_feature: MA Experiment 20001248 PARAMETER Experiment Name: At_Far-red-induction_P Parameter: Plant Line Value: Columbia
  misc_feature: MA Experiment 20001248 PARAMETER Experiment Name: At_Far-red-induction_P Parameter: Timepoint (hr) Value: 4
  misc_feature: MA Experiment 20001248 PARAMETER Experiment Name: At_Far-red-induction_P Parameter: Tissue Value: Whole Plant
  misc_feature: MA Experiment ID: 20001450 Result: Up-regulated in Transcription
  misc_feature: MA Experiment 20001450 PARAMETER Experiment Name: At_Far-red-induction_P Parameter: Age (day) Value: 7
  misc_feature: MA Experiment 20001450 PARAMETER Experiment Name: At_Far-red-induction_P Parameter: Light Value: Far-red vs. White
  misc_feature: MA Experiment 20001450 PARAMETER Experiment Name: At_Far-red-induction_P Parameter: Organism Value: A. thaliana
  misc_feature: MA Experiment 20001450 PARAMETER Experiment Name: At_Far-red-induction_P Parameter: Plant Line Value: Columbia
  misc_feature: MA Experiment 20001450 PARAMETER Experiment Name: At_Far-red-induction_P Parameter: Timepoint (hr) Value: 8
  misc_feature: MA Experiment 20001450 PARAMETER Experiment Name: At_Far-red-induction_P Parameter: Tissue Value: Whole Plant
  misc_feature: MA Experiment ID: 20001556 Result: Down-regulated in Transcription
  misc_feature: MA Experiment 20001556 PARAMETER Experiment Name: At_Drought_Soil_Dry_P Parameter: Age (day) Value: 26
  misc_feature: MA Experiment 20001556 PARAMETER Experiment Name: At_Drought_Soil_Dry_P Parameter: Organism Value: A. thaliana
  misc_feature: MA Experiment 20001556 PARAMETER Experiment Name: At_Drought_Soil_Dry_P Parameter: Plant Line Value: WS
  misc_feature: MA Experiment 20001556 PARAMETER Experiment Name: At_Drought_Soil_Dry_P Parameter: Post Timepoint (hr) Value: None
  misc_feature: MA Experiment 20001556 PARAMETER Experiment Name: At_Drought_Soil_Dry_P Parameter: Post-Treatment Value: None
  misc_feature: MA Experiment 20001556 PARAMETER Experiment Name: At_Drought_Soil_Dry_P Parameter: Timepoint (day) Value: 12
  misc_feature: MA Experiment 20001556 PARAMETER Experiment Name: At_Drought_Soil_Dry_P Parameter: Treatment Value: Drought vs. No Drought
  misc_feature: MA Experiment ID: 20001904 Result: Down-regulated in Transcription
  misc_feature: MA Experiment 20001904 PARAMETER Experiment Name: At_Drought_Reproduction_P Parameter: Age (day) Value: 37
  misc_feature: MA Experiment 20001904 PARAMETER Experiment Name: At_Drought_Reproduction_P Parameter: Organism Value: A. thaliana
  misc_feature: MA Experiment 20001904 PARAMETER Experiment Name: At_Drought_Reproduction_P Parameter: Plant Line Value: WS
  misc_feature: MA Experiment 20001904 PARAMETER Experiment Name: At_Drought_Reproduction_P Parameter: Timepoint (day) Value: 7
  misc_feature: MA Experiment 20001904 PARAMETER Experiment Name: At_Drought_Reproduction_P Parameter: Tissue Value: Rosettes
  misc_feature: MA Experiment 20001904 PARAMETER Experiment Name: At_Drought_Reproduction_P Parameter: Treatment Value: Drought vs. No Drought
  misc_feature: MA Experiment ID: 20001905 Result: Down-regulated in Transcription
  misc_feature: MA Experiment 20001905 PARAMETER Experiment Name: At_Drought_Reproduction_P Parameter: Age (day) Value: 40
  misc_feature: MA Experiment 20001905 PARAMETER Experiment Name: At_Drought_Reproduction_P Parameter: Organism Value: A. thaliana
  misc_feature: MA Experiment 20001905 PARAMETER Experiment Name: At_Drought_Reproduction_P Parameter: Plant Line Value: WS
  misc_feature: MA Experiment 20001905 PARAMETER Experiment Name: At_Drought_Reproduction_P Parameter: Timepoint (day) Value: 10
  misc_feature: MA Experiment 20001905 PARAMETER Experiment Name: At_Drought_Reproduction_P Parameter: Tissue Value: Rosettes
  misc_feature: MA Experiment 20001905 PARAMETER Experiment Name: At_Drought_Reproduction_P Parameter: Treatment Value: Drought vs. No Drought
gtcccatcaccaaacattaagtagcactctttttcctctctatatctctcactcacactttttctctatatcttctcctcaacttggatatgggtgaagccgtagaggtcatgttcggaaatgggttcccggagattcacaaagccacatcacccactcaaaccctccactctaaccagcaagactgccattggtatgaagaaaccatcgatgatgatctcaagtggtcttttgccctcaacagtgttctccatcaaggaactagtgagtaccaagatattgctctgttggacaccaaacgttttggaaaggtgcttgtgattgatgggaaaatgcaaagtgctgagagagatgagtttatctaccatgaatgtttgatccatcccgctctccttttccatcccaaccccaagactgtgtttataatgggaggaggtgaaggctctgctgcaagagaaatactaaaacacacgacgatcgagaaagttgttatgtgtgatattgatcaggaagttgttgatttttgcagaagatttctgaccgttaacagcgatgctttctgtaacaaaaagcttgaacttgtgatcaaagatgcaaaggctgaattagagaaaagggaagagaagtttgatatcatagtgggagatttagctgatccagtggaaggtggaccttgttatcagctctacaccaaatccttctaccaaaacattctcaaacccaagcttagccctaatggcatttttgtcacccaggctggaccagcaggaatattcactcataaggaagtcttcacatcaatctacaacaccatgaagcaagtcttcaagtacgtgaaggcttacacagcacatgtgccatcatttgcggacacatggggatgggtgatggcatcggaccacgagtttgacgttgaagttgatgaaatggatcgaagaatcgaagagagagttaacggagaattgatgtatctaaacgctccttctttcgtctctgctgctactctcaacaaaaccatctctctcgcgctagagaaggagactgaagtttatagtgaagagaatgcgagattcattcatggtcatggtgtggcgtaccggcatatttaaagacgaaccggtttcagtttcagtgttattaccaaacccatgtcacaaaaacaaaaggccggtttcttttctccgcacagaaccgggtgttgtcttgaatcttgattactttggttcggttttattttctacattgctttttgttttcttgttcttccctcaagttattccggtttaacaagactatattgcttactaa

SEQ ID NO: 78308 - protein, 339 aa, Arabidopsis thaliana; identical to SEQ ID NO: 26797
  peptide (1)..(339): Ceres Seq. ID no. 12640579
  misc_feature (34)..(279): Pfam Name: Spermine/spermidine synthase Pfam Description: Spermine/spermidine synthase
  misc_feature (1)..(339): Homolog of NCBI NO: 18419941 NR Description: spermine synthase (ACL5); protein id: supported by cDNA: 3968., supported by cDNA: gi_6013268 thaliana] >gi|6013267|gb|AAF01311.1|AF184093_1 spermine synthase
  misc_feature (1)..(339): Homolog of NCBI NO: 18150150 NR Description: spermine synthase [Arabidopsis thaliana]
  misc_feature (1)..(339): Homolog of NCBI NO: 18150154 NR Description: spermine synthase [Arabidopsis thaliana]
  misc_feature (1)..(339): Homolog of NCBI NO: 18150158 NR Description: spermine synthase [Arabidopsis thaliana] spermine synthase [Arabidopsis thaliana] spermine synthase [Arabidopsis thaliana]
  misc_feature (1)..(339): Homolog of NCBI NO: 18150156 NR Description: spermine synthase [Arabidopsis thaliana]
  misc_feature (1)..(339): Homolog of NCBI NO: 18150168 NR Description: spermine synthase [Arabis gemmifera]
  misc_feature (11)..(338): Homolog of NCBI NO: 40788039 NR Description: putative spermine synthase [Lycopersicon
  misc_feature (2)..(335): Homolog of NCBI NO: 34146773 NR Description: putative spermine synthase [Cryptomeria japonica]
  misc_feature (9)..(335): Homolog of NCBI NO: 38603375 NR Description: putative spermine synthase [Taxodium distichum]
  misc_feature (50)..(335): Homolog of NCBI NO: 34810901 NR Description: Chain A, Crystal Structure Of Polyamine From Thermus Thermophilus >gi|34810902|pdb|1UIR|B Chain B, Structure Of Polyamine Aminopropyltransfease From Thermus

SEQ ID NO: 78309 - protein, 332 aa, Arabidopsis thaliana; identical to SEQ ID NO: 26798
  peptide (1)..(332): Ceres Seq. ID no. 12640580
  misc_feature (27)..(272): Pfam Name: Spermine/spermidine synthase Pfam Description: Spermine/spermidine synthase
  misc_feature (1)..(332): Homolog of NCBI NO: 18419941 NR Description: spermine synthase (ACL5); protein id: supported by cDNA: 3968., supported by cDNA: gi_6013268 thaliana] >gi|6013267|gb|AAF01311.1|AF184093_1 spermine synthase
  misc_feature (1)..(332): Homolog of NCBI NO: 18150150 NR Description: spermine synthase [Arabidopsis thaliana]
  misc_feature (1)..(332): Homolog of NCBI NO: 18150154 NR Description: spermine synthase [Arabidopsis thaliana]
  misc_feature (1)..(332): Homolog of NCBI NO: 18150158 NR Description: spermine synthase [Arabidopsis thaliana] spermine synthase [Arabidopsis thaliana] spermine synthase [Arabidopsis thaliana]
  misc_feature (1)..(332): Homolog of NCBI NO: 18150156 NR Description: spermine synthase [Arabidopsis thaliana]
  misc_feature (1)..(332): Homolog of NCBI NO: 18150168 NR Description: spermine synthase [Arabis gemmifera]
  misc_feature (4)..(331): Homolog of NCBI NO: 40788039 NR Description: putative spermine synthase [Lycopersicon
  misc_feature (1)..(328): Homolog of NCBI NO: 34146773 NR Description: putative spermine synthase [Cryptomeria japonica]
  misc_feature (2)..(328): Homolog of NCBI NO: 38603375 NR Description: putative spermine synthase [Taxodium distichum]
  misc_feature (43)..(328): Homolog of NCBI NO: 34810901 NR Description: Chain A, Crystal Structure Of Polyamine From Thermus Thermophilus >gi|34810902|pdb|1UIR|B Chain B, Structure Of Polyamine Aminopropyltransfease From Thermus

SEQ ID NO: 78310 - protein, 258 aa, Arabidopsis thaliana; identical to SEQ ID NO: 26799
  peptide (1)..(258): Ceres Seq. ID no. 12640581
  misc_feature (1)..(198): Pfam Name: Spermine/spermidine synthase Pfam Description: Spermine/spermidine synthase
  misc_feature (1)..(258): Homolog of NCBI NO: 18419941 NR Description: spermine synthase (ACL5); protein id: supported by cDNA: 3968., supported by cDNA: gi_6013268 thaliana] >gi|6013267|gb|AAF01311.1|AF184093_1 spermine synthase
  misc_feature (1)..(258): Homolog of NCBI NO: 18150150 NR Description: spermine synthase [Arabidopsis thaliana]
  misc_feature (1)..(258): Homolog of NCBI NO: 18150154 NR Description: spermine synthase [Arabidopsis thaliana]
  misc_feature (1)..(258): Homolog of NCBI NO: 18150158 NR Description: spermine synthase [Arabidopsis thaliana] spermine synthase [Arabidopsis thaliana] spermine synthase [Arabidopsis thaliana]
  misc_feature (1)..(258): Homolog of NCBI NO: 18150156 NR Description: spermine synthase [Arabidopsis thaliana]
  misc_feature (1)..(258): Homolog of NCBI NO: 18150168 NR Description: spermine synthase [Arabis gemmifera]
  misc_feature (1)..(257): Homolog of NCBI NO: 40788039 NR Description: putative spermine synthase [Lycopersicon
  misc_feature (1)..(254): Homolog of NCBI NO: 34146773 NR Description: putative spermine synthase [Cryptomeria japonica]
  misc_feature (1)..(254): Homolog of NCBI NO: 38603375 NR Description: putative spermine synthase [Taxodium distichum]
  misc_feature (1)..(254): Homolog of NCBI NO: 34810901 NR Description: Chain A, Crystal Structure Of Polyamine From Thermus Thermophilus >gi|34810902|pdb|1UIR|B Chain B, Structure Of Polyamine Aminopropyltransfease From Thermus

SEQ ID NO: 78311 - DNA, 2127 bp, Arabidopsis thaliana
  misc_feature (1)..(2127): Ceres Seq. ID no. 12640586
  misc_feature: MA Experiment ID: 20000185 Result: Down-regulated in Transcription
  misc_feature: MA Experiment 20000185 PARAMETER Experiment Name: At_Roots__P Parameter: Age (day) Value: 7 vs. 21
  misc_feature: MA Experiment 20000185 PARAMETER Experiment Name: At_Roots__P Parameter: Organism Value: A. thaliana
  misc_feature: MA Experiment 20000185 PARAMETER Experiment Name: At_Roots__P Parameter: Tissue Value: Roots vs. Whole Plant
  misc_feature: MA Experiment ID: 20000234 Result: Up-regulated in Transcription
  misc_feature: MA Experiment 20000234 PARAMETER Experiment Name: At_Siliques_P Parameter: Age (day) Value: 21
  misc_feature: MA Experiment 20000234 PARAMETER Experiment Name: At_Siliques_P Parameter: Organism Value: A. thaliana
  misc_feature: MA Experiment 20000234 PARAMETER Experiment Name: At_Siliques_P Parameter: Plant Line Value: WS
  misc_feature: MA Experiment 20000234 PARAMETER Experiment Name: At_Siliques_P Parameter: Tissue Value: Less Than 5mm Siliques vs. Whole Plant
  misc_feature: MA Experiment ID: 20000264 Result: Up-regulated in Transcription
  misc_feature: MA Experiment 20000264 PARAMETER Experiment Name: At_Open_Flower_P Parameter: Age (day) Value: 21
  misc_feature: MA Experiment 20000264 PARAMETER Experiment Name: At_Open_Flower_P Parameter: Plant Line Value: WS
  misc_feature: MA Experiment 20000264 PARAMETER Experiment Name: At_Open_Flower_P Parameter: Tissue Value: Open Flower vs. Whole Plant
  misc_feature: MA Experiment ID: 20000265 Result: Up-regulated in Transcription
  misc_feature: MA Experiment 20000265 PARAMETER Experiment Name: At_Open_Flower_P Parameter: Age (day) Value: 21
  misc_feature: MA Experiment 20000265 PARAMETER Experiment Name: At_Open_Flower_P Parameter: Plant Line Value: WS
  misc_feature: MA Experiment 20000265 PARAMETER Experiment Name: At_Open_Flower_P Parameter: Tissue Value: Closed Flower vs. Whole Plant
  misc_feature: MA Experiment ID: 20000286 Result: Up-regulated in Transcription
  misc_feature: MA Experiment 20000286 PARAMETER Experiment Name: At_Open_Flower_P Parameter: Age (day) Value: 21
  misc_feature: MA Experiment 20000286 PARAMETER Experiment Name: At_Open_Flower_P Parameter: Plant Line Value: WS
  misc_feature: MA Experiment 20000286 PARAMETER Experiment Name: At_Open_Flower_P Parameter: Tissue Value: Half Open vs. Whole Plant
  misc_feature: MA Experiment ID: 20000438 Result: Down-regulated in Transcription
  misc_feature: MA Experiment 20000438 PARAMETER Experiment Name: At_Shoots__P Parameter: Age (day) Value: 14
  misc_feature: MA Experiment 20000438 PARAMETER Experiment Name: At_Shoots__P Parameter: Tissue Value: Shoots vs. Whole Plant
  misc_feature: MA Experiment ID: 20000496 Result: Up-regulated in Transcription
  misc_feature: MA Experiment 20000496 PARAMETER Experiment Name: At_Guard_Cells_P Parameter: Harvest Date Value: 7/19/2002
  misc_feature: MA Experiment 20000496 PARAMETER Experiment Name: At_Guard_Cells_P Parameter: Organism Value: Canola
  misc_feature: MA Experiment 20000496 PARAMETER Experiment Name: At_Guard_Cells_P Parameter: Tissue Value: Guard Cells vs. Leaves
  misc_feature: MA Experiment ID: 20000794 Result: Up-regulated in Transcription
  misc_feature: MA Experiment 20000794 PARAMETER Experiment Name: At_Petals_P Parameter: Age (day) Value: 23-25 days
  misc_feature: MA Experiment 20000794 PARAMETER Experiment Name: At_Petals_P Parameter: Plant Line Value: WS
  misc_feature: MA Experiment 20000794 PARAMETER Experiment Name: At_Petals_P Parameter: Tissue Value: Petals vs. Whole plant
  misc_feature: MA Experiment ID: 20001761 Result: Down-regulated in Transcription
  misc_feature: MA Experiment 20001761 PARAMETER Experiment Name: At_50mM_NH4NO3_L-to-H_P Parameter: Timepoint (hr) Value: 4
  misc_feature: MA Experiment 20001761 PARAMETER Experiment Name: At_50mM_NH4NO3_L-to-H_P Parameter: Tissue Value: Siliques
  misc_feature: MA Experiment 20001761 PARAMETER Experiment Name: At_50mM_NH4NO3_L-to-H_P Parameter: Treatment Value: 50mM NH4NO3 vs 100mM Mannitol
  misc_feature: MA Experiment ID: 20001909 Result: Up-regulated in Transcription
  misc_feature: MA Experiment 20001909 PARAMETER Experiment Name: At_Drought_Reproduction_P Parameter: Age (day) Value: 35
  misc_feature: MA Experiment 20001909 PARAMETER Experiment Name: At_Drought_Reproduction_P Parameter: Organism Value: A. thaliana
  misc_feature: MA Experiment 20001909 PARAMETER Experiment Name: At_Drought_Reproduction_P Parameter: Plant Line Value: WS
  misc_feature: MA Experiment 20001909 PARAMETER Experiment Name: At_Drought_Reproduction_P Parameter: Timepoint (day) Value: 5
  misc_feature: MA Experiment 20001909 PARAMETER Experiment Name: At_Drought_Reproduction_P Parameter: Tissue Value: Flowers
  misc_feature: MA Experiment 20001909 PARAMETER Experiment Name: At_Drought_Reproduction_P Parameter: Treatment Value: Drought vs. No Drought
aggcatcacaacaatcaatataagcctgggatccaattttcttatttccccaaccaaaacaggggaagaaaaaaaaagaaaacaaaaaaatcaaaaaaaattagaaaatgaaagcctcaacaagagtcatatggacaatatctgtccttatgctcgctgctgtgtccgaggccatcttccctctaccgtttctaccgttcctccctgggttcaacaacggctttagggacaatgaggctgtcaaggttgcgaaaccacagcctgcaggagcagttggtggaaaagccgcaagaaggcagcgtggcggcggtttagacgctcagacaacctggggtggtaagtgggagctcttcttggaaaactcgggtgtgtcagggatgcatgcgatccttatgccagttatcaacaaggtccagtactatgacgccaccatttggagaatttcaaagattaagttgcctccaggcgtaccatgccatgtcgtggacgctaagactaacaaggtcgattgttgggctcattcgattctcatggatgtcaacaccggcgcccttaagcctctagggctttccaccgatacatggtgctcatccggaggtctgaccgtaaatggtacattggtgagcactggaggatacggaggaggagccaacaccgcgaggtacctatccagctgtgaaaactgcaagtgggaagaataccctcaggcattggccgcgaagagatggtactcaacgcaagcaactctccctgacggaaagttcttcgtgattggtggaagagacgccttgaactacgaatacattcctgaggagggacaaaacaacaggaagctctttgactcattgctcctcaggcaaacagacgacccggaagaaaacaacctttaccctttcgtctggcttaacaccgacggtaacctcttcattttcgctaacaaccgatccatccttctaagccccaaaacaaaccaagtcatcaaggagttccctcagctcccaggtggtgcccgtaactacccgggatcaggttcttccgcactcctccccatccaactttacgtgaaaaaccccaaggtcatcccagccgaggttctcgtctgtggtggttccaaacaagacgcgtattacaaggctggtaaaaaaatatacgaaccagcactacaagactgcgccaggataaggatcaacagcgcaaagccacgatggaagacggagatgatgccaaccccacgaatcatgagtgatactgtcatcctccctaacggagacatccttctagtcaacggagctaaacgtggttgttcaggctggggatatggtaaagaccctgcctttgctcccctcttgtacaagccccatgctgcacgtggcaagcgtttcagacagctcaagcccaccaccatcccacgtatgtaccactccagcgccatcattcttccagacggtaaggttcttgtcggtggcagcaacaccaacgacggttacaagtacaacgttgagttcccaacggagcttcgcgttgagaaattctccccaccttacctcgacccggctctagccaacataaggccaaagatcgtcaccaccggcaccccaaaacaggtcaaatacggacaattcttcaacgtgaaggtcgaccttaaagaaaagggagcaaccaagggaaatctcaaggttaccatgttagcccctgccttcacaacacacagtatctcaatgaacatgaggatgctcatcttgggtgtcaataatgtcaaacctgctggtgccggttacgatatccaggccgttgcaccaccaaatggaaacatcgctccaccgggttactatcttatctttgccatctacaaaggtgttcccagcactggagaatggattcaggtcgtctaatgacgataatttttacccattttgtcttatgaccgtaacatcttaatataaaacaatcacataatatcagtttttttttccttctatatatattgtttatgccaccattaatggatccaaattacttgtgttttctttcacttctataaacttttccgttcatgtaaaccttttcggtgagtttttatgactaaattttgtattggagaaattcttttattattacttttggctc

SEQ ID NO: 78312 - protein, 594 aa, Arabidopsis thaliana
  peptide (1)..(594): Ceres Seq. ID no. 12640587
  misc_feature (38)..(594): Homolog of NCBI NO: 15220398 NR Description: glyoxal oxidase (glx1), putative; protein id: [Arabidopsis thaliana] >gi|9828629|gb|AAG00252.1|AC002130_17 [Arabidopsis thaliana] >gi|27754377|gb|AAO22637.1| putative
  misc_feature (69)..(593): Homolog of NCBI NO: 34911116 NR Description: putative glyoxal oxidase [Oryza sativa (japonica group)] >gi|20161084|dbj|BAB90014.1| putative glyoxal oxidase
  misc_feature (77)..(593): Homolog of NCBI NO: 15223699 NR Description: unknown protein; protein id: At1g19900.1, by cDNA: gi_16604506 [Arabidopsis thaliana]
  misc_feature (76)..(593): Homolog of NCBI NO: 25352602 NR Description: F14L17.20 protein - Arabidopsis thaliana Weak similarity to glyoxal oxidase (glx2) from Phanerochaete
  misc_feature (76)..(590): Homolog of NCBI NO: 15223754 NR Description: hypothetical protein; protein id: At1g14430.1
  misc_feature (77)..(593): Homolog of NCBI NO: 15222300 NR Description: unknown protein; protein id: At1g75620.1 thaliana] >gi|9369366|gb|AAF87115.1|AC006434_11 F10A5.18
  misc_feature (91)..(593): Homolog of NCBI NO: 25352604 NR Description: hypothetical protein F6F9.4 [imported] - thaliana >gi|10086483|gb|AAG12543.1|AC007797_3 Unknown Protein
  misc_feature (78)..(593): Homolog of NCBI NO: 15230360 NR Description: putative protein; protein id: At3g57620.1 thaliana] >gi|7485502|pir||T06758 probable galactose oxidase (EC
  misc_feature (139)..(593): Homolog of NCBI NO: 542394 NR Description: glyoxal oxidase (EC 1.2.3.-) precursor - (Phanerochaete chrysosporium) >gi|1050302|gb|AAA87594.1| glyoxal
  misc_feature (129)..(180): Homolog of NCBI NO: 542394 NR Description: glyoxal oxidase (EC 1.2.3.-) precursor - (Phanerochaete chrysosporium) >gi|1050302|gb|AAA87594.1| glyoxal
MKASTRVIWTISVLMLAAVSEAIFPLPFLPFLPGFNNGFRDNEAVKVAKPQPAGAVGGKAARRQRGGGLDAQTTWGGKWELFLENSGVSGMHAILMPVINKVQYYDATIWRISKIKLPPGVPCHVVDAKTNKVDCWAHSILMDVNTGALKPLGLSTDTWCSSGGLTVNGTLVSTGGYGGGANTARYLSSCENCKWEEYPQALAAKRWYSTQATLPDGKFFVIGGRDALNYEYIPEEGQNNRKLFDSLLLRQTDDPEENNLYPFVWLNTDGNLFIFANNRSILLSPKTNQVIKEFPQLPGGARNYPGSGSSALLPIQLYVKNPKVIPAEVLVCGGSKQDAYYKAGKKIYEPALQDCARIRINSAKPRWKTEMMPTPRIMSDTVILPNGDILLVNGAKRGCSGWGYGKDPAFAPLLYKPHAARGKRFRQLKPTTIPRMYHSSAIILPDGKVLVGGSNTNDGYKYNVEFPTELRVEKFSPPYLDPALANIRPKIVTTGTPKQVKYGQFFNVKVDLKEKGATKGNLKVTMLAPAFTTHSISMNMRMLILGVNNVKPAGAGYDIQAVAPPNGNIAPPGYYLIFAIYKGVPSTGEWIQVV

SEQ ID NO: 78313 - protein, 580 aa, Arabidopsis thaliana
  peptide (1)..(580): Ceres Seq. ID no. 12640588
  misc_feature (24)..(580): Homolog of NCBI NO: 15220398 NR Description: glyoxal oxidase (glx1), putative; protein id: [Arabidopsis thaliana] >gi|9828629|gb|AAG00252.1|AC002130_17 [Arabidopsis thaliana] >gi|27754377|gb|AAO22637.1| putative
  misc_feature (55)..(579): Homolog of NCBI NO: 34911116 NR Description: putative glyoxal oxidase [Oryza sativa (japonica group)] >gi|20161084|dbj|BAB90014.1| putative glyoxal oxidase
  misc_feature (63)..(579): Homolog of NCBI NO: 15223699 NR Description: unknown protein; protein id: At1g19900.1, by cDNA: gi_16604506 [Arabidopsis thaliana]
  misc_feature (62)..(579): Homolog of NCBI NO: 25352602 NR Description: F14L17.20 protein - Arabidopsis thaliana Weak similarity to glyoxal oxidase (glx2) from Phanerochaete
  misc_feature (62)..(576): Homolog of NCBI NO: 15223754 NR Description: hypothetical protein; protein id: At1g14430.1
  misc_feature (63)..(579): Homolog of NCBI NO: 15222300 NR Description: unknown protein; protein id: At1g75620.1 thaliana] >gi|9369366|gb|AAF87115.1|AC006434_11 F10A5.18
  misc_feature (77)..(579): Homolog of NCBI NO: 25352604 NR Description: hypothetical protein F6F9.4 [imported] - thaliana >gi|10086483|gb|AAG12543.1|AC007797_3 Unknown Protein
  misc_feature (64)..(579): Homolog of NCBI NO: 15230360 NR Description: putative protein; protein id: At3g57620.1 thaliana] >gi|7485502|pir||T06758 probable galactose oxidase (EC
  misc_feature (125)..(579): Homolog of NCBI NO: 542394 NR Description: glyoxal oxidase (EC 1.2.3.-) precursor - (Phanerochaete chrysosporium) >gi|1050302|gb|AAA87594.1| glyoxal
  misc_feature (115)..(166): Homolog of NCBI NO: 542394 NR Description: glyoxal oxidase (EC 1.2.3.-) precursor - (Phanerochaete chrysosporium) >gi|1050302|gb|AAA87594.1| glyoxal
MLAAVSEAIFPLPFLPFLPGFNNGFRDNEAVKVAKPQPAGAVGGKAARRQRGGGLDAQTTWGGKWELFLENSGVSGMHAILMPVINKVQYYDATIWRISKIKLPPGVPCHVVDAKTNKVDCWAHSILMDVNTGALKPLGLSTDTWCSSGGLTVNGTLVSTGGYGGGANTARYLSSCENCKWEEYPQALAAKRWYSTQATLPDGKFFVIGGRDALNYEYIPEEGQNNRKLFDSLLLRQTDDPEENNLYPFVWLNTDGNLFIFANNRSILLSPKTNQVIKEFPQLPGGARNYPGSGSSALLPIQLYVKNPKVIPAEVLVCGGSKQDAYYKAGKKIYEPALQDCARIRINSAKPRWKTEMMPTPRIMSDTVILPNGDILLVNGAKRGCSGWGYGKDPAFAPLLYKPHAARGKRFRQLKPTTIPRMYHSSAIILPDGKVLVGGSNTNDGYKYNVEFPTELRVEKFSPPYLDPALANIRPKIVTTGTPKQVKYGQFFNVKVDLKEKGATKGNLKVTMLAPAFTTHSISMNMRMLILGVNNVKPAGAGYDIQAVAPPNGNIAPPGYYLIFAIYKGVPSTGEWIQVV

SEQ ID NO: 78314 - protein, 504 aa, Arabidopsis thaliana
  peptide (1)..(504): Ceres Seq. ID no. 12640589
  misc_feature (1)..(504): Homolog of NCBI NO: 15220398 NR Description: glyoxal oxidase (glx1), putative; protein id: [Arabidopsis thaliana] >gi|9828629|gb|AAG00252.1|AC002130_17 [Arabidopsis thaliana] >gi|27754377|gb|AAO22637.1| putative
  misc_feature (1)..(503): Homolog of NCBI NO: 34911116 NR Description: putative glyoxal oxidase [Oryza sativa (japonica group)] >gi|20161084|dbj|BAB90014.1| putative glyoxal oxidase
  misc_feature (1)..(503): Homolog of NCBI NO: 15223699 NR Description: unknown protein; protein id: At1g19900.1, by cDNA: gi_16604506 [Arabidopsis thaliana]
  misc_feature (1)..(503): Homolog of NCBI NO: 25352602 NR Description: F14L17.20 protein - Arabidopsis thaliana Weak similarity to glyoxal oxidase (glx2) from Phanerochaete
  misc_feature (1)..(500): Homolog of NCBI NO: 15223754 NR Description: hypothetical protein; protein id: At1g14430.1
  misc_feature (1)..(503): Homolog of NCBI NO: 15222300 NR Description: unknown protein; protein id: At1g75620.1 thaliana] >gi|9369366|gb|AAF87115.1|AC006434_11 F10A5.18
  misc_feature (1)..(503): Homolog of NCBI NO: 25352604 NR Description: hypothetical protein F6F9.4 [imported] - thaliana >gi|10086483|gb|AAG12543.1|AC007797_3 Unknown Protein
  misc_feature (1)..(503): Homolog of NCBI NO: 15230360 NR Description: putative protein; protein id: At3g57620.1 thaliana] >gi|7485502|pir||T06758 probable galactose oxidase (EC
  misc_feature (49)..(503): Homolog of NCBI NO: 542394 NR Description: glyoxal oxidase (EC 1.2.3.-) precursor - (Phanerochaete chrysosporium) >gi|1050302|gb|AAA87594.1| glyoxal
  misc_feature (39)..(90): Homolog of NCBI NO: 542394 NR Description: glyoxal oxidase (EC 1.2.3.-) precursor - (Phanerochaete chrysosporium) >gi|1050302|gb|AAA87594.1| glyoxal
MHAILMPVINKVQYYDATIWRISKIKLPPGVPCHVVDAKTNKVDCWAHSILMDVNTGALKPLGLSTDTWCSSGGLTVNGTLVSTGGYGGGANTARYLSSCENCKWEEYPQALAAKRWYSTQATLPDGKFFVIGGRDALNYEYIPEEGQNNRKLFDSLLLRQTDDPEENNLYPFVWLNTDGNLFIFANNRSILLSPKTNQVIKEFPQLPGGARNYPGSGSSALLPIQLYVKNPKVIPAEVLVCGGSKQDAYYKAGKKIYEPALQDCARIRINSAKPRWKTEMMPTPRIMSDTVILPNGDILLVNGAKRGCSGWGYGKDPAFAPLLYKPHAARGKRFRQLKPTTIPRMYHSSAIILPDGKVLVGGSNTNDGYKYNVEFPTELRVEKFSPPYLDPALANIRPKIVTTGTPKQVKYGQFFNVKVDLKEKGATKGNLKVTMLAPAFTTHSISMNMRMLILGVNNVKPAGAGYDIQAVAPPNGNIAPPGYYLIFAIYKGVPSTGEWIQVV

SEQ ID NO: 78315 - DNA, 1353 bp, Arabidopsis thaliana
  misc_feature (1)..(1353): Ceres Seq. ID no. 12640602
  misc_feature: MA Experiment ID: 108434 Result: Up-regulated in Transcription
  misc_feature: MA Experiment 108434 PARAMETER Experiment Name: At_Root_Tips_cDNA_P Parameter: Tissue Value: Root Tips
  misc_feature: MA Experiment ID: 108463 Result: Down-regulated in Transcription
  misc_feature: MA Experiment 108463 PARAMETER Experiment Name: At_Germinating_Seeds_cDNA_P Parameter: Age (day) Value: 3 vs. 0
  misc_feature: MA Experiment 108463 PARAMETER Experiment Name: At_Germinating_Seeds_cDNA_P Parameter: Tissue Value: Germinating Seeds
  misc_feature: MA Experiment ID: 108572 Result: Down-regulated in Transcription
  misc_feature: MA Experiment 108572 PARAMETER Experiment Name: At_Drought_cDNA_P Parameter: Timepoint (hr) Value: 1
  misc_feature: MA Experiment 108572 PARAMETER Experiment Name: At_Drought_cDNA_P Parameter: Tissue Value: Aerial
  misc_feature: MA Experiment 108572 PARAMETER Experiment Name: At_Drought_cDNA_P Parameter: Treatment Value: Drought vs. No Drought
  misc_feature: MA Experiment ID: 108573 Result: Up-regulated in Transcription
  misc_feature: MA Experiment 108573 PARAMETER Experiment Name: At_Drought_cDNA_P Parameter: Timepoint (hr) Value: 6
  misc_feature: MA Experiment 108573 PARAMETER Experiment Name: At_Drought_cDNA_P Parameter: Tissue Value: Aerial
  misc_feature: MA Experiment 108573 PARAMETER Experiment Name: At_Drought_cDNA_P Parameter: Treatment Value: Drought vs. No Drought
  misc_feature: MA Experiment ID: 108594 Result: Down-regulated in Transcription
  misc_feature: MA Experiment 108594 PARAMETER Experiment Name: At_Ler-rhl_Root_cDNA_P Parameter: Plant Line Value: null
  misc_feature: MA Experiment ID: 108595 Result: Down-regulated in Transcription
  misc_feature: MA Experiment 108595 PARAMETER Experiment Name: At_Ler-pi_Ovule_cDNA_P Parameter: Plant Line Value: null
  misc_feature: MA Experiment ID: 108607 Result: Down-regulated in Transcription
  misc_feature: MA Experiment 108607 PARAMETER Experiment Name: At_100uM_ABA_cDNA_P Parameter: Timepoint (hr) Value: 4
  misc_feature: MA Experiment 108607 PARAMETER Experiment Name: At_100uM_ABA_cDNA_P Parameter: Tissue Value: Aerial
  misc_feature: MA Experiment 108607 PARAMETER Experiment Name: At_100uM_ABA_cDNA_P Parameter: Treatment Value: 100uM ABA vs. No Treatment
  misc_feature: MA Experiment ID: 108668 Result: Down-regulated in Transcription
  misc_feature: MA Experiment 108668 PARAMETER Experiment Name: At_2mM_SA_cDNA_P Parameter: Plant Line Value: WS
  misc_feature: MA Experiment 108668 PARAMETER Experiment Name: At_2mM_SA_cDNA_P Parameter: Timepoint (hr) Value: 6
  misc_feature: MA Experiment 108668 PARAMETER Experiment Name: At_2mM_SA_cDNA_P Parameter: Treatment Value: 2mM SA vs. No Treatment
  misc_feature: MA Experiment ID: 20000087 Result: Down-regulated in Transcription
  misc_feature: MA Experiment 20000087 PARAMETER Experiment Name: At_100uM_ABA_Mutants_cDNA_P Parameter: Plant Line Value: WS
  misc_feature: MA Experiment 20000087 PARAMETER Experiment Name: At_100uM_ABA_Mutants_cDNA_P Parameter: Timepoint (hr) Value: 6
  misc_feature: MA Experiment 20000087 PARAMETER Experiment Name: At_100uM_ABA_Mutants_cDNA_P Parameter: Tissue Value: Aerial
  misc_feature: MA Experiment 20000087 PARAMETER Experiment Name: At_100uM_ABA_Mutants_cDNA_P Parameter: Treatment Value: 100uM ABA vs. No Treatment
  misc_feature: MA Experiment ID: 20000182 Result: Down-regulated in Transcription
  misc_feature: MA Experiment 20000182 PARAMETER Experiment Name: At_2mM_SA_P Parameter: Age (day) Value: 14
  misc_feature: MA Experiment 20000182 PARAMETER Experiment Name: At_2mM_SA_P Parameter: Organism Value: A. thaliana
  misc_feature: MA Experiment 20000182 PARAMETER Experiment Name: At_2mM_SA_P Parameter: Plant Line Value: WS
  misc_feature: MA Experiment 20000182 PARAMETER Experiment Name: At_2mM_SA_P Parameter: Timepoint (hr) Value: 6
  misc_feature: MA Experiment 20000182 PARAMETER Experiment Name: At_2mM_SA_P Parameter: Tissue Value: Aerial
  misc_feature: MA Experiment 20000182 PARAMETER Experiment Name: At_2mM_SA_P Parameter: Treatment Value: 2mM SA vs. No Treatment
  misc_feature: MA Experiment ID: 20000224 Result: Down-regulated in Transcription
  misc_feature: MA Experiment ID: 20000437 Result: Down-regulated in Transcription
  misc_feature: MA Experiment 20000437 PARAMETER Experiment Name: At_Drought_P Parameter: Age (day) Value: 8
  misc_feature: MA Experiment 20000437 PARAMETER Experiment Name: At_Drought_P Parameter: Organism Value: A. thaliana
  misc_feature: MA Experiment 20000437 PARAMETER Experiment Name: At_Drought_P Parameter: Plant Line Value: WS
  misc_feature: MA Experiment 20000437 PARAMETER Experiment Name: At_Drought_P Parameter: Timepoint (hr) Value: 24
  misc_feature: MA Experiment 20000437 PARAMETER Experiment Name: At_Drought_P Parameter: Tissue Value: Whole Plant
  misc_feature: MA Experiment 20000437 PARAMETER Experiment Name: At_Drought_P Parameter: Treatment Value: Drought vs. No Drought
  misc_feature: MA Experiment ID: 20001248 Result: Up-regulated in Transcription
  misc_feature: MA Experiment 20001248 PARAMETER Experiment Name: At_Far-red-induction_P Parameter: Age (day) Value: 7
  misc_feature: MA Experiment 20001248 PARAMETER Experiment Name: At_Far-red-induction_P Parameter: Light Value: Far-red vs. White
  misc_feature: MA Experiment 20001248 PARAMETER Experiment Name: At_Far-red-induction_P Parameter: Organism Value: A. thaliana
  misc_feature: MA Experiment 20001248 PARAMETER Experiment Name: At_Far-red-induction_P Parameter: Plant Line Value: Columbia
  misc_feature: MA Experiment 20001248 PARAMETER Experiment Name: At_Far-red-induction_P Parameter: Timepoint (hr) Value: 4
  misc_feature: MA Experiment 20001248 PARAMETER Experiment Name: At_Far-red-induction_P Parameter: Tissue Value: Whole Plant
  misc_feature: MA Experiment ID: 20001554 Result: Down-regulated in Transcription
  misc_feature: MA Experiment 20001554 PARAMETER Experiment Name: At_Drought_Soil_Dry_P Parameter: Age (day) Value: 21
  misc_feature: MA Experiment 20001554 PARAMETER Experiment Name: At_Drought_Soil_Dry_P Parameter: Organism Value: A. thaliana
  misc_feature: MA Experiment 20001554 PARAMETER Experiment Name: At_Drought_Soil_Dry_P Parameter: Plant Line Value: WS
  misc_feature: MA Experiment 20001554 PARAMETER Experiment Name: At_Drought_Soil_Dry_P Parameter: Post Timepoint (hr) Value: None
  misc_feature: MA Experiment 20001554 PARAMETER Experiment Name: At_Drought_Soil_Dry_P Parameter: Post-Treatment Value: None
  misc_feature: MA Experiment 20001554 PARAMETER Experiment Name: At_Drought_Soil_Dry_P Parameter: Timepoint (day) Value: 7
  misc_feature: MA Experiment 20001554 PARAMETER Experiment Name: At_Drought_Soil_Dry_P Parameter: Treatment Value: Drought vs. No Drought
  misc_feature: MA Experiment ID: 20001555 Result: Down-regulated in Transcription
  misc_feature: MA Experiment 20001555 PARAMETER Experiment Name: At_Drought_Soil_Dry_P Parameter: Age (day) Value: 24
  misc_feature: MA Experiment 20001555 PARAMETER Experiment Name: At_Drought_Soil_Dry_P Parameter: Organism Value: A. thaliana
  misc_feature: MA Experiment 20001555 PARAMETER Experiment Name: At_Drought_Soil_Dry_P Parameter: Plant Line Value: WS
  misc_feature: MA Experiment 20001555 PARAMETER Experiment Name: At_Drought_Soil_Dry_P Parameter: Post Timepoint (hr) Value: None
  misc_feature: MA Experiment 20001555 PARAMETER Experiment Name: At_Drought_Soil_Dry_P Parameter: Post-Treatment Value: None
  misc_feature: MA Experiment 20001555 PARAMETER Experiment Name: At_Drought_Soil_Dry_P Parameter: Timepoint (day) Value: 10
  misc_feature: MA Experiment 20001555 PARAMETER Experiment Name: At_Drought_Soil_Dry_P Parameter: Treatment Value: Drought vs. No Drought
  misc_feature: MA Experiment ID: 20001556 Result: Down-regulated in Transcription
  misc_feature: MA Experiment 20001556 PARAMETER Experiment Name: At_Drought_Soil_Dry_P Parameter: Age (day) Value: 26
  misc_feature: MA Experiment 20001556 PARAMETER Experiment Name: At_Drought_Soil_Dry_P Parameter: Organism Value: A. thaliana
  misc_feature: MA Experiment 20001556 PARAMETER Experiment Name: At_Drought_Soil_Dry_P Parameter: Plant Line Value: WS
  misc_feature: MA Experiment 20001556 PARAMETER Experiment Name: At_Drought_Soil_Dry_P Parameter: Post Timepoint (hr) Value: None
  misc_feature: MA Experiment 20001556 PARAMETER Experiment Name: At_Drought_Soil_Dry_P Parameter: Post-Treatment Value: None
  misc_feature: MA Experiment 20001556 PARAMETER Experiment Name: At_Drought_Soil_Dry_P Parameter: Timepoint (day) Value: 12
  misc_feature: MA Experiment 20001556 PARAMETER Experiment Name: At_Drought_Soil_Dry_P Parameter: Treatment Value: Drought vs. No Drought
  misc_feature: MA Experiment ID: 20001557 Result: Up-regulated in Transcription
  misc_feature: MA Experiment 20001557 PARAMETER Experiment Name: At_Drought_Soil_Dry_P Parameter: Age (day) Value: 27
  misc_feature: MA Experiment 20001557 PARAMETER Experiment Name: At_Drought_Soil_Dry_P Parameter: Organism Value: A. thaliana
  misc_feature: MA Experiment 20001557 PARAMETER Experiment Name: At_Drought_Soil_Dry_P Parameter: Plant Line Value: WS
  misc_feature: MA Experiment 20001557 PARAMETER Experiment Name: At_Drought_Soil_Dry_P Parameter: Post Timepoint (hr) Value: 3
  misc_feature: MA Experiment 20001557 PARAMETER Experiment Name: At_Drought_Soil_Dry_P Parameter: Post-Treatment Value: Re-Water vs. No Drought
  misc_feature: MA Experiment 20001557 PARAMETER Experiment Name: At_Drought_Soil_Dry_P Parameter: Timepoint (day) Value: 13
  misc_feature: MA Experiment 20001557 PARAMETER Experiment Name: At_Drought_Soil_Dry_P Parameter: Treatment Value: Drought vs. No Drought
  misc_feature: MA Experiment ID: 20001558 Result: Up-regulated in Transcription
  misc_feature: MA Experiment 20001558 PARAMETER Experiment Name: At_Drought_Soil_Dry_P Parameter: Age (day) Value: 27
  misc_feature: MA Experiment 20001558 PARAMETER Experiment Name: At_Drought_Soil_Dry_P Parameter: Organism Value: A. thaliana
  misc_feature: MA Experiment 20001558 PARAMETER Experiment Name: At_Drought_Soil_Dry_P Parameter: Plant Line Value: WS
  misc_feature: MA Experiment 20001558 PARAMETER Experiment Name: At_Drought_Soil_Dry_P Parameter: Post Timepoint (hr) Value: 6
  misc_feature: MA Experiment 20001558 PARAMETER Experiment Name: At_Drought_Soil_Dry_P Parameter: Post-Treatment Value: Re-Water vs. No Drought
  misc_feature: MA Experiment 20001558 PARAMETER Experiment Name: At_Drought_Soil_Dry_P Parameter: Timepoint (day) Value: 13
  misc_feature: MA Experiment 20001558 PARAMETER Experiment Name: At_Drought_Soil_Dry_P Parameter: Treatment Value: Drought vs. No Drought
  misc_feature: MA Experiment ID: 20001559 Result: Down-regulated in Transcription
  misc_feature: MA Experiment 20001559 PARAMETER Experiment Name: At_Drought_Soil_Dry_P Parameter: Age (day) Value: 28
  misc_feature: MA Experiment 20001559 PARAMETER Experiment Name: At_Drought_Soil_Dry_P Parameter: Organism Value: A. thaliana
  misc_feature: MA Experiment 20001559 PARAMETER Experiment Name: At_Drought_Soil_Dry_P Parameter: Plant Line Value: WS
  misc_feature: MA Experiment 20001559 PARAMETER Experiment Name: At_Drought_Soil_Dry_P Parameter: Post Timepoint (hr) Value: 29
  misc_feature: MA Experiment 20001559 PARAMETER Experiment Name: At_Drought_Soil_Dry_P Parameter: Post-Treatment Value: Re-Water vs. No Drought
  misc_feature: MA Experiment 20001559 PARAMETER Experiment Name: At_Drought_Soil_Dry_P Parameter: Timepoint (day) Value: 14
  misc_feature: MA Experiment 20001559 PARAMETER Experiment Name: At_Drought_Soil_Dry_P Parameter: Treatment Value: Drought vs. No Drought
  misc_feature: MA Experiment ID: 20001904 Result: Down-regulated in Transcription
  misc_feature: MA Experiment 20001904 PARAMETER Experiment Name: At_Drought_Reproduction_P Parameter: Age (day) Value: 37
  misc_feature: MA Experiment 20001904 PARAMETER Experiment Name: At_Drought_Reproduction_P Parameter: Organism Value: A. thaliana
  misc_feature: MA Experiment 20001904 PARAMETER Experiment Name: At_Drought_Reproduction_P Parameter: Plant Line Value: WS
  misc_feature: MA Experiment 20001904 PARAMETER Experiment Name: At_Drought_Reproduction_P Parameter: Timepoint (day) Value: 7
  misc_feature: MA Experiment 20001904 PARAMETER Experiment Name: At_Drought_Reproduction_P Parameter: Tissue Value: Rosettes
  misc_feature: MA Experiment 20001904 PARAMETER Experiment Name: At_Drought_Reproduction_P Parameter: Treatment Value: Drought vs. No Drought
  misc_feature: MA Experiment ID: 20001905 Result: Down-regulated in Transcription
  misc_feature: MA Experiment 20001905 PARAMETER Experiment Name: At_Drought_Reproduction_P Parameter: Age (day) Value: 40
  misc_feature: MA Experiment 20001905 PARAMETER Experiment Name: At_Drought_Reproduction_P Parameter: Organism Value: A. thaliana
  misc_feature: MA Experiment 20001905 PARAMETER Experiment Name: At_Drought_Reproduction_P Parameter: Plant Line Value: WS
  misc_feature: MA Experiment 20001905 PARAMETER Experiment Name: At_Drought_Reproduction_P Parameter: Timepoint (day) Value: 10
  misc_feature: MA Experiment 20001905 PARAMETER Experiment Name: At_Drought_Reproduction_P Parameter: Tissue Value: Rosettes
  misc_feature: MA Experiment 20001905 PARAMETER Experiment Name: At_Drought_Reproduction_P Parameter: Treatment Value: Drought vs. No Drought
  misc_feature: MA Experiment ID: 20001911 Result: Down-regulated in Transcription
  misc_feature: MA Experiment 20001911 PARAMETER Experiment Name: At_Drought_Reproduction_P Parameter: Age (day) Value: 40
  misc_feature: MA Experiment 20001911 PARAMETER Experiment Name: At_Drought_Reproduction_P Parameter: Organism Value: A. thaliana
  misc_feature: MA Experiment 20001911 PARAMETER Experiment Name: At_Drought_Reproduction_P Parameter: Plant Line Value: WS
  misc_feature: MA Experiment 20001911 PARAMETER Experiment Name: At_Drought_Reproduction_P Parameter: Timepoint (day) Value: 10
  misc_feature: MA Experiment 20001911 PARAMETER Experiment Name: At_Drought_Reproduction_P Parameter: Tissue Value: Flowers
  misc_feature: MA Experiment 20001911 PARAMETER Experiment Name: At_Drought_Reproduction_P Parameter: Treatment Value: Drought vs. No Drought
atgcgagaaatcataagcattcacatcggacaagctgggatccaggtcggaaattcgtgttgggagctttactgtctcgaacatggaatccagccggacggaatgatgccgagtgatactacagttggtgttgcacacgatgcgttcaatactttctttagcgagactggtgctgggaagcatgtccctagggctgtcttcgttgatctcgagcctaccgttatcgacgaagttcgtactggtacttaccgtcaacttttccatccagagcagctcatttctgggaaagaagatgctgctaacaacttcgctagaggacattacactgttgggaaggaaattgtggatctatgtcttgaccgtgtgaggaaacttgccgacaactgtactggcttacaagggtttttggtgttcaatgctgttggtggtggaactggttctggattgggttctctgttgctagagcgtttgtctgtagattatggaaagaagtctaagcttggttttaccatatacccttctcctcaggtttctactgctgttgtagaaccttacaacagtgttctctcaacgcattcccttcttgaacatacggatgtagctgtcctcttggataacgaagccatctatgacatttgccgcagatccctagatatcgagaggccaacctacacaaacttgaacaggttgatatcacagatcatttcatccttgacaacatctttgaggtttgatggtgccatcaacgtggatatcactgagttccagaccaatcttgtcccatatccccgtatccatttcatgctgtcatcttatgcaccagtcatctcagccgccaaggcttaccacgagcagctatcagtccctgagatcaccaatgccgtttttgagccagctagcatgatggcaaagtgtgacccgagacacggaaagtacatggcctgttgtttgatgtaccgaggagatgttgttcccaaagatgttaatgctgctgttggcaccatcaagacaaagaggactgttcagtttgttgactggtgcccaactgggttcaaatgtggaatcaactaccaacctccaacagttgttccaggtggtgacctcgctaaggttcagagagctgtatgtatgatcagtaacaacacagcagttgcagaggtgttctcacggatcgaccacaagtttgatctcatgtatgcgaagagggcatttgtccactggtacgttggtgaaggaatggaggaaggtgaattctctgaggcacgtgaagacttggccgcactggagaaagattacgaagaagttggtgctgaaggtggagacgatgaagaagatgaaggtgaagactattga

SEQ ID NO: 78316 - protein, 450 aa, Arabidopsis thaliana; identical to SEQ ID NO: 38746
  peptide (1)..(450): Ceres Seq. ID no. 12640603
  misc_feature (49)..(246): Pfam Name: Tubulin/FtsZ family, GTPase domain Pfam Description: Tubulin/FtsZ family, GTPase domain
  misc_feature (1)..(450): Homolog of NCBI NO: 15241168 NR Description: tubulin alpha-5 chain-like protein; protein id: supported by cDNA: gi_13605804, supported by cDNA: gi_17473825
  misc_feature (1)..(450): Homolog of NCBI NO: 135399 NR Description: Tubulin alpha-1 chain >gi|100716|pir||S20758
  misc_feature (1)..(450): Homolog of NCBI NO: 6094431 NR Description: Tubulin alpha-3 chain (Alpha-3 tubulin)
  misc_feature (1)..(450): Homolog of NCBI NO: 464846 NR Description: Tubulin alpha-6 chain (Alpha-6 tubulin)
  misc_feature (1)..(450): Homolog of NCBI NO: 8928419 NR Description: Tubulin alpha-1 chain >gi|1477428|emb|CAA67942.1|
  misc_feature (1)..(450): Homolog of NCBI NO: 401161 NR Description: Tubulin alpha-5 chain (Alpha-5 tubulin)
  misc_feature (1)..(445): Homolog of NCBI NO: 25396545 NR Description: alpha tubulin [Physcomitrella patens]
  misc_feature (1)..(450): Homolog of NCBI NO: 15220329 NR Description: tubulin alpha-2/alpha-4 chain; protein id:
  misc_feature (1)..(450): Homolog of NCBI NO: 15233627 NR Description: tubulin alpha-6 chain (TUA6); protein id: supported by cDNA: gi_16226461, supported by cDNA: gi_16604479,
  misc_feature (1)..(449): Homolog of NCBI NO: 7271241 NR Description: alpha-tubulin [Miscanthus sinensis]

SEQ ID NO: 78317 - protein, 416 aa, Arabidopsis thaliana; identical to SEQ ID NO: 38747
  peptide (1)..(416): Ceres Seq. ID no. 12640604
  misc_feature (15)..(212): Pfam Name: Tubulin/FtsZ family, GTPase domain Pfam Description: Tubulin/FtsZ family, GTPase domain
  misc_feature (1)..(416): Homolog of NCBI NO: 15241168 NR Description: tubulin alpha-5 chain-like protein; protein id: supported by cDNA: gi_13605804, supported by cDNA: gi_17473825
  misc_feature (1)..(416): Homolog of NCBI NO: 135399 NR Description: Tubulin alpha-1 chain >gi|100716|pir||S20758
  misc_feature (1)..(416): Homolog of NCBI NO: 6094431 NR Description: Tubulin alpha-3 chain (Alpha-3 tubulin)
  misc_feature (1)..(416): Homolog of NCBI NO: 464846 NR Description: Tubulin alpha-6 chain (Alpha-6 tubulin)
  misc_feature (1)..(416): Homolog of NCBI NO: 8928419 NR Description: Tubulin alpha-1 chain >gi|1477428|emb|CAA67942.1|
  misc_feature (1)..(416): Homolog of NCBI NO: 401161 NR Description: Tubulin alpha-5 chain (Alpha-5 tubulin)
  misc_feature (1)..(411): Homolog of NCBI NO: 25396545 NR Description: alpha tubulin [Physcomitrella patens]
  misc_feature (1)..(416): Homolog of NCBI NO: 15220329 NR Description: tubulin alpha-2/alpha-4 chain; protein id:
  misc_feature (1)..(416): Homolog of NCBI NO: 15233627 NR Description: tubulin alpha-6 chain (TUA6); protein id: supported by cDNA: gi_16226461, supported by cDNA: gi_16604479,
  misc_feature (1)..(415): Homolog of NCBI NO: 7271241 NR Description: alpha-tubulin [Miscanthus sinensis]

SEQ ID NO: 78318 - protein, 415 aa, Arabidopsis thaliana; identical to SEQ ID NO: 38748
  peptide (1)..(415): Ceres Seq. ID no. 12640605
  misc_feature (14)..(211): Pfam Name: Tubulin/FtsZ family, GTPase domain Pfam Description: Tubulin/FtsZ family, GTPase domain
  misc_feature (1)..(415): Homolog of NCBI NO: 15241168 NR Description: tubulin alpha-5 chain-like protein; protein id: supported by cDNA: gi_13605804, supported by cDNA: gi_17473825
  misc_feature (1)..(415): Homolog of NCBI NO: 135399 NR Description: Tubulin alpha-1 chain >gi|100716|pir||S20758
  misc_feature (1)..(415): Homolog of NCBI NO: 6094431 NR Description: Tubulin alpha-3 chain (Alpha-3 tubulin)
  misc_feature (1)..(415): Homolog of NCBI NO: 464846 NR Description: Tubulin alpha-6 chain (Alpha-6 tubulin)
  misc_feature (1)..(415): Homolog of NCBI NO: 8928419 NR Description: Tubulin alpha-1 chain >gi|1477428|emb|CAA67942.1|
  misc_feature (1)..(415): Homolog of NCBI NO: 401161 NR Description: Tubulin alpha-5 chain (Alpha-5 tubulin)
  misc_feature (1)..(410): Homolog of NCBI NO: 25396545 NR Description: alpha tubulin [Physcomitrella patens]
  misc_feature (1)..(415): Homolog of NCBI NO: 15220329 NR Description: tubulin alpha-2/alpha-4 chain; protein id:
  misc_feature (1)..(415): Homolog of NCBI NO: 15233627 NR Description: tubulin alpha-6 chain (TUA6); protein id: supported by cDNA: gi_16226461, supported by cDNA: gi_16604479,
  misc_feature (1)..(414): Homolog of NCBI NO: 7271241 NR Description: alpha-tubulin [Miscanthus sinensis]

SEQ ID NO: 78319 - DNA, 1248 bp, Arabidopsis thaliana
  misc_feature (1)..(1248): Ceres Seq. ID no. 12640618
  misc_feature: MA Experiment ID: 108434 Result: Down-regulated in Transcription
  misc_feature: MA Experiment 108434 PARAMETER Experiment Name: At_Root_Tips_cDNA_P Parameter: Tissue Value: Root Tips
  misc_feature: MA Experiment ID: 108595 Result: Up-regulated in Transcription
  misc_feature: MA Experiment 108595 PARAMETER Experiment Name: At_Ler-pi_Ovule_cDNA_P Parameter: Plant Line Value: null
  misc_feature: MA Experiment ID: 108668 Result: Up-regulated in Transcription
  misc_feature: MA Experiment 108668 PARAMETER Experiment Name: At_2mM_SA_cDNA_P Parameter: Plant Line Value: WS
  misc_feature: MA Experiment 108668 PARAMETER Experiment Name: At_2mM_SA_cDNA_P Parameter: Timepoint (hr) Value: 6
  misc_feature: MA Experiment 108668 PARAMETER Experiment Name: At_2mM_SA_cDNA_P Parameter: Treatment Value: 2mM SA vs. No Treatment
  misc_feature: MA Experiment ID: 20000087 Result: Up-regulated in Transcription
  misc_feature: MA Experiment 20000087 PARAMETER Experiment Name: At_100uM_ABA_Mutants_cDNA_P Parameter: Plant Line Value: WS
  misc_feature: MA Experiment 20000087 PARAMETER Experiment Name: At_100uM_ABA_Mutants_cDNA_P Parameter: Timepoint (hr) Value: 6
  misc_feature: MA Experiment 20000087 PARAMETER Experiment Name: At_100uM_ABA_Mutants_cDNA_P Parameter: Tissue Value: Aerial
  misc_feature: MA Experiment 20000087 PARAMETER Experiment Name: At_100uM_ABA_Mutants_cDNA_P Parameter: Treatment Value: 100uM ABA vs. No Treatment
  misc_feature: MA Experiment ID: 20000171 Result: Up-regulated in Transcription
  misc_feature: MA Experiment 20000171 PARAMETER Experiment Name: At_42deg_Heat_P Parameter: Age (day) Value: 14
  misc_feature: MA Experiment 20000171 PARAMETER Experiment Name: At_42deg_Heat_P Parameter: Organism Value: A. thaliana
  misc_feature: MA Experiment 20000171 PARAMETER Experiment Name: At_42deg_Heat_P Parameter: Plant Line Value: WS
  misc_feature: MA Experiment 20000171 PARAMETER Experiment Name: At_42deg_Heat_P Parameter: Temperature (deg C) Value: 42 vs. 22
  misc_feature: MA Experiment 20000171 PARAMETER Experiment Name: At_42deg_Heat_P Parameter: Timepoint (hr) Value: 1
  misc_feature: MA Experiment 20000171 PARAMETER Experiment Name: At_42deg_Heat_P Parameter: Tissue Value: Aerial
  misc_feature: MA Experiment ID: 20000234 Result: Down-regulated in Transcription
  misc_feature: MA Experiment 20000234 PARAMETER Experiment Name: At_Siliques_P Parameter: Age (day) Value: 21
  misc_feature: MA Experiment 20000234 PARAMETER Experiment Name: At_Siliques_P Parameter: Organism Value: A. thaliana
  misc_feature: MA Experiment 20000234 PARAMETER Experiment Name: At_Siliques_P Parameter: Plant Line Value: WS
  misc_feature: MA Experiment 20000234 PARAMETER Experiment Name: At_Siliques_P Parameter: Tissue Value: Less Than 5mm Siliques vs. Whole Plant
  misc_feature: MA Experiment ID: 20000264 Result: Up-regulated in Transcription
  misc_feature: MA Experiment 20000264 PARAMETER Experiment Name: At_Open_Flower_P Parameter: Age (day) Value: 21
  misc_feature: MA Experiment 20000264 PARAMETER Experiment Name: At_Open_Flower_P Parameter: Plant Line Value: WS
  misc_feature: MA Experiment 20000264 PARAMETER Experiment Name: At_Open_Flower_P Parameter: Tissue Value: Open Flower vs. Whole Plant
  misc_feature: MA Experiment ID: 20000286 Result: Up-regulated in Transcription
  misc_feature: MA Experiment 20000286 PARAMETER Experiment Name: At_Open_Flower_P Parameter: Age (day) Value: 21
  misc_feature: MA Experiment 20000286 PARAMETER Experiment Name: At_Open_Flower_P Parameter: Plant Line Value: WS
  misc_feature: MA Experiment 20000286 PARAMETER Experiment Name: At_Open_Flower_P Parameter: Tissue Value: Half Open vs. Whole Plant
  misc_feature: MA Experiment ID: 20001558 Result: Down-regulated in Transcription
  misc_feature: MA Experiment 20001558 PARAMETER Experiment Name: At_Drought_Soil_Dry_P Parameter: Age (day) Value: 27
  misc_feature: MA Experiment 20001558 PARAMETER Experiment Name: At_Drought_Soil_Dry_P Parameter: Organism Value: A. thaliana
  misc_feature: MA Experiment 20001558 PARAMETER Experiment Name: At_Drought_Soil_Dry_P Parameter: Plant Line Value: WS
  misc_feature: MA Experiment 20001558 PARAMETER Experiment Name: At_Drought_Soil_Dry_P Parameter: Post Timepoint (hr) Value: 6
  misc_feature: MA Experiment 20001558 PARAMETER Experiment Name: At_Drought_Soil_Dry_P Parameter: Post-Treatment Value: Re-Water vs. No Drought
  misc_feature: MA Experiment 20001558 PARAMETER Experiment Name: At_Drought_Soil_Dry_P Parameter: Timepoint (day) Value: 13
  misc_feature: MA Experiment 20001558 PARAMETER Experiment Name: At_Drought_Soil_Dry_P Parameter: Treatment Value: Drought vs. No Drought
  misc_feature: MA Experiment ID: 20001761 Result: Up-regulated in Transcription
  misc_feature: MA Experiment 20001761 PARAMETER Experiment Name: At_50mM_NH4NO3_L-to-H_P Parameter: Timepoint (hr) Value: 4
  misc_feature: MA Experiment 20001761 PARAMETER Experiment Name: At_50mM_NH4NO3_L-to-H_P Parameter: Tissue Value: Siliques
  misc_feature: MA Experiment 20001761 PARAMETER Experiment Name: At_50mM_NH4NO3_L-to-H_P Parameter: Treatment Value: 50mM NH4NO3 vs 100mM Mannitol
  misc_feature: MA Experiment ID: 20001904 Result: Down-regulated in Transcription
  misc_feature: MA Experiment 20001904 PARAMETER Experiment Name: At_Drought_Reproduction_P Parameter: Age (day) Value: 37
  misc_feature: MA Experiment 20001904 PARAMETER Experiment Name: At_Drought_Reproduction_P Parameter: Organism Value: A. thaliana
  misc_feature: MA Experiment 20001904 PARAMETER Experiment Name: At_Drought_Reproduction_P Parameter: Plant Line Value: WS
  misc_feature: MA Experiment 20001904 PARAMETER Experiment Name: At_Drought_Reproduction_P Parameter: Timepoint (day) Value: 7
  misc_feature: MA Experiment 20001904 PARAMETER Experiment Name: At_Drought_Reproduction_P Parameter: Tissue Value: Rosettes
  misc_feature: MA Experiment 20001904 PARAMETER Experiment Name: At_Drought_Reproduction_P Parameter: Treatment Value: Drought vs. No Drought
atcaactcctctaataagcttcttctttctatccctcacttttacaaacaaagggagaccaaaaatgggtctaagcaaaactattcccttagtgttactcccgattttgatgtttggggttttgagtaacgctcagcttacctctgatttttactccacgacatgccctaacgtcacagccattgctcggggactgatcgagcgagcaagccgtaacgacgtcagactcactgctaaagtcatgcgtcttcactttcatgactgtttcgtgaacgggtgcgatggttcggtactattggacgctgctccagcggatggggtagagggtgaaaaggaggctttccaaaacgcgggttctcttgatggattcgaagtgatcgatgatatcaaaaccgccctcgagaatgtttgtcccggagttgtctcttgtgctgatatcctcgctatcgcagctgaaatctctgttgcactggcgggagggccgtcattggacgtattgctaggaaggagagatggccggacagcgatccgtgcggacgcagtggctgcacttccactaggacctgattctctcgagattcttacttccaaattctccgtacataatcttgacactaccgatctcgtcgctttatctggtgctcataccttcgggagggttcagtgtggagtgataaacaatcgtctacacaactttagtggtaacagcggacagtccgacccaagtatcgaaccggagttcttgcaaacgttacgacgacaatgcccgcaaggcggagatctcaccgcaagggcgaatcttgatcctacgagccccgactcatttgataacgactatttcaagaaccttcaaaacaaccgcggagtgattgaatcagatcaaatcttgttctcttcgacaggagcgcctactgtgtctttggtgaatcgttttgctgagaaccaaaatgagttctttacaaattttgcgagatcaatgatcaagatgggaaatgtgaggattctcacaggacgtgagggagagatacgtagagactgcagacgcgtcaattaataagttttgcatggttaaatgatcaaacgtaacttattgttattcatgaaataagtgttctttagtttgtgcttctccacaattaattgtttttcttcttttgattttatttactgttaagcatgccattgttacttgtaattgtaaatcttatataatatttttctttttgaaaaaatccactatcatgtctg

SEQ ID NO: 78320 - protein, 350 aa, Arabidopsis thaliana
  peptide (1)..(350): Ceres Seq. ID no. 12640619
  misc_feature (62)..(314): Pfam Name: Peroxidase Pfam Description: Peroxidase
  misc_feature (22)..(350): Homolog of NCBI NO: 15241208 NR Description: peroxidase, putative; protein id: At5g19880.1, by cDNA: 100990. [Arabidopsis thaliana]
  misc_feature (22)..(350): Homolog of NCBI NO: 21536505 NR Description: peroxidase [Arabidopsis thaliana]
  misc_feature (22)..(350): Homolog of NCBI NO: 26451205 NR Description: putative peroxidase [Arabidopsis thaliana]
  misc_feature (29)..(350): Homolog of NCBI NO: 421924 NR Description: peroxidase (EC 1.11.1.7) - tomato
  misc_feature (29)..(350): Homolog of NCBI NO: 6723685 NR Description: peroxidase [Lycopersicon esculentum]
  misc_feature (22)..(350): Homolog of NCBI NO: 7433042 NR Description: peroxidase (EC 1.11.1.7) - common tobacco
  misc_feature (24)..(350): Homolog of NCBI NO: 478389 NR Description: peroxidase (EC 1.11.1.7) precursor, anionic -
  misc_feature (33)..(350): Homolog of NCBI NO: 8546851 NR Description: peroxidase [Ipomoea batatas]
  misc_feature (22)..(350): Homolog of NCBI NO: 18072039 NR Description: anionic peroxidase [Nicotiana tomentosiformis]
  misc_feature (28)..(350): Homolog of NCBI NO: 21593262 NR Description: peroxidase [Arabidopsis thaliana]
STPLISFFFLSLTFTNKGRPKMGLSKTIPLVLLPILMFGVLSNAQLTSDFYSTTCPNVTAIARGLIERASRNDVRLTAKVMRLHFHDCFVNGCDGSVLLDAAPADGVEGEKEAFQNAGSLDGFEVIDDIKTALENVCPGVVSCADILAIAAEISVALAGGPSLDVLLGRRDGRTAIRADAVAALPLGPDSLEILTSKFSVHNLDTTDLVALSGAHTFGRVQCGVINNRLHNFSGNSGQSDPSIEPEFLQTLRRQCPQGGDLTARANLDPTSPDSFDNDYFKNLQNNRGVIESDQILFSSTGAPTVSLVNRFAENQNEFFTNFARSMIKMGNVRILTGREGEIRRDCRRVN

SEQ ID NO: 78321 - protein, 329 aa, Arabidopsis thaliana
  peptide (1)..(329): Ceres Seq. ID no. 12640620
  misc_feature (41)..(293): Pfam Name: Peroxidase Pfam Description: Peroxidase
  misc_feature (1)..(329): Homolog of NCBI NO: 15241208 NR Description: peroxidase, putative; protein id: At5g19880.1, by cDNA: 100990. [Arabidopsis thaliana]
  misc_feature (1)..(329): Homolog of NCBI NO: 21536505 NR Description: peroxidase [Arabidopsis thaliana]
  misc_feature (1)..(329): Homolog of NCBI NO: 26451205 NR Description: putative peroxidase [Arabidopsis thaliana]
  misc_feature (8)..(329): Homolog of NCBI NO: 421924 NR Description: peroxidase (EC 1.11.1.7) - tomato
  misc_feature (8)..(329): Homolog of NCBI NO: 6723685 NR Description: peroxidase [Lycopersicon esculentum]
  misc_feature (1)..(329): Homolog of NCBI NO: 7433042 NR Description: peroxidase (EC 1.11.1.7) - common tobacco
  misc_feature (3)..(329): Homolog of NCBI NO: 478389 NR Description: peroxidase (EC 1.11.1.7) precursor, anionic -
  misc_feature (12)..(329): Homolog of NCBI NO: 8546851 NR Description: peroxidase [Ipomoea batatas]
  misc_feature (1)..(329): Homolog of NCBI NO: 18072039 NR Description: anionic peroxidase [Nicotiana tomentosiformis]
  misc_feature (7)..(329): Homolog of NCBI NO: 21593262 NR Description: peroxidase [Arabidopsis thaliana]
MGLSKTIPLVLLPILMFGVLSNAQLTSDFYSTTCPNVTAIARGLIERASRNDVRLTAKVMRLHFHDCFVNGCDGSVLLDAAPADGVEGEKEAFQNAGSLDGFEVIDDIKTALENVCPGVVSCADILAIAAEISVALAGGPSLDVLLGRRDGRTAIRADAVAALPLGPDSLEILTSKFSVHNLDTTDLVALSGAHTFGRVQCGVINNRLHNFSGNSGQSDPSIEPEFLQTLRRQCPQGGDLTARANLDPTSPDSFDNDYFKNLQNNRGVIESDQILFSSTGAPTVSLVNRFAENQNEFFTNFARSMIKMGNVRILTGREGEIRRDCRRVN

SEQ ID NO: 78322 - protein, 314 aa, Arabidopsis thaliana
  peptide (1)..(314): Ceres Seq. ID no. 12640621
  misc_feature (26)..(278): Pfam Name: Peroxidase Pfam Description: Peroxidase
  misc_feature (1)..(314): Homolog of NCBI NO: 15241208 NR Description: peroxidase, putative; protein id: At5g19880.1, by cDNA: 100990. [Arabidopsis thaliana]
  misc_feature (1)..(314): Homolog of NCBI NO: 21536505 NR Description: peroxidase [Arabidopsis thaliana]
  misc_feature (1)..(314): Homolog of NCBI NO: 26451205 NR Description: putative peroxidase [Arabidopsis thaliana]
  misc_feature (1)..(314): Homolog of NCBI NO: 421924 NR Description: peroxidase (EC 1.11.1.7) - tomato
  misc_feature (1)..(314): Homolog of NCBI NO: 6723685 NR Description: peroxidase [Lycopersicon esculentum]
  misc_feature (1)..(314): Homolog of NCBI NO: 7433042 NR Description: peroxidase (EC 1.11.1.7) - common tobacco
  misc_feature (1)..(314): Homolog of NCBI NO: 478389 NR Description: peroxidase (EC 1.11.1.7) precursor, anionic -
  misc_feature (1)..(314): Homolog of NCBI NO: 8546851 NR Description: peroxidase [Ipomoea batatas]
  misc_feature (1)..(314): Homolog of NCBI NO: 18072039 NR Description: anionic peroxidase [Nicotiana tomentosiformis]
  misc_feature (1)..(314): Homolog of NCBI NO: 21593262 NR Description: peroxidase [Arabidopsis thaliana]
MFGVLSNAQLTSDFYSTTCPNVTAIARGLIERASRNDVRLTAKVMRLHFHDCFVNGCDGSVLLDAAPADGVEGEKEAFQNAGSLDGFEVIDDIKTALENVCPGVVSCADILAIAAEISVALAGGPSLDVLLGRRDGRTAIRADAVAALPLGPDSLEILTSKFSVHNLDTTDLVALSGAHTFGRVQCGVINNRLHNFSGNSGQSDPSIEPEFLQTLRRQCPQGGDLTARANLDPTSPDSFDNDYFKNLQNNRGVIESDQILFSSTGAPTVSLVNRFAENQNEFFTNFARSMIKMGNVRILTGREGEIRRDCRRVN

SEQ ID NO: 78323 - DNA, 1194 bp, Arabidopsis thaliana
  misc_feature (1)..(1194): Ceres Seq. ID no. 12640622
  misc_feature: MA Experiment ID: 108434 Result: Down-regulated in Transcription
  misc_feature: MA Experiment 108434 PARAMETER Experiment Name: At_Root_Tips_cDNA_P Parameter: Tissue Value: Root Tips
  misc_feature: MA Experiment ID: 108463 Result: Up-regulated in Transcription
  misc_feature: MA Experiment 108463 PARAMETER Experiment Name: At_Germinating_Seeds_cDNA_P Parameter: Age (day) Value: 3 vs. 0
  misc_feature: MA Experiment 108463 PARAMETER Experiment Name: At_Germinating_Seeds_cDNA_P Parameter: Tissue Value: Germinating Seeds
  misc_feature: MA Experiment ID: 108464 Result: Up-regulated in Transcription
  misc_feature: MA Experiment 108464 PARAMETER Experiment Name: At_Germinating_Seeds_cDNA_P Parameter: Age (day) Value: 4 vs. 0
  misc_feature: MA Experiment 108464 PARAMETER Experiment Name: At_Germinating_Seeds_cDNA_P Parameter: Tissue Value: Germinating Seeds
  misc_feature: MA Experiment ID: 108594 Result: Up-regulated in Transcription
  misc_feature: MA Experiment 108594 PARAMETER Experiment Name: At_Ler-rhl_Root_cDNA_P Parameter: Plant Line Value: null
  misc_feature: MA Experiment ID: 20000227 Result: Down-regulated in Transcription
  misc_feature: MA Experiment 20000227 PARAMETER Experiment Name: At_Root-Tips-vs-Tops_P Parameter: Tissue Value: Root Tips vs. Root Tops
  misc_feature: MA Experiment ID: 20000264 Result: Down-regulated in Transcription
  misc_feature: MA Experiment 20000264 PARAMETER Experiment Name: At_Open_Flower_P Parameter: Age (day) Value: 21
  misc_feature: MA Experiment 20000264 PARAMETER Experiment Name: At_Open_Flower_P Parameter: Plant Line Value: WS
  misc_feature: MA Experiment 20000264 PARAMETER Experiment Name: At_Open_Flower_P Parameter: Tissue Value: Open Flower vs. Whole Plant
  misc_feature: MA Experiment ID: 20000265 Result: Down-regulated in Transcription
  misc_feature: MA Experiment 20000265 PARAMETER Experiment Name: At_Open_Flower_P Parameter: Age (day) Value: 21
  misc_feature: MA Experiment 20000265 PARAMETER Experiment Name: At_Open_Flower_P Parameter: Plant Line Value: WS
  misc_feature: MA Experiment 20000265 PARAMETER Experiment Name: At_Open_Flower_P Parameter: Tissue Value: Closed Flower vs. Whole Plant
  misc_feature: MA Experiment ID: 20000267 Result: Down-regulated in Transcription
  misc_feature: MA Experiment 20000267 PARAMETER Experiment Name: At_Drought_P Parameter: Age (day) Value: 7
  misc_feature: MA Experiment 20000267 PARAMETER Experiment Name: At_Drought_P Parameter: Organism Value: A. thaliana
  misc_feature: MA Experiment 20000267 PARAMETER Experiment Name: At_Drought_P Parameter: Plant Line Value: WS
  misc_feature: MA Experiment 20000267 PARAMETER Experiment Name: At_Drought_P Parameter: Timepoint (hr) Value: 6
  misc_feature: MA Experiment 20000267 PARAMETER Experiment Name: At_Drought_P Parameter: Tissue Value: Whole Plant
  misc_feature: MA Experiment 20000267 PARAMETER Experiment Name: At_Drought_P Parameter: Treatment Value: Drought vs. No Drought
  misc_feature: MA Experiment ID: 20000438 Result: Down-regulated in Transcription
  misc_feature: MA Experiment 20000438 PARAMETER Experiment Name: At_Shoots__P Parameter: Age (day) Value: 14
  misc_feature: MA Experiment 20000438 PARAMETER Experiment Name: At_Shoots__P Parameter: Tissue Value: Shoots vs. Whole Plant
  misc_feature: MA Experiment ID: 20000451 Result: Up-regulated in Transcription
  misc_feature: MA Experiment 20000451 PARAMETER Experiment Name: At_CS6879_Shoots-Roots_P Parameter: Age (day) Value: 14
  misc_feature: MA Experiment 20000451 PARAMETER Experiment Name: At_CS6879_Shoots-Roots_P Parameter: Organism Value: A. thaliana
  misc_feature: MA Experiment 20000451 PARAMETER Experiment Name: At_CS6879_Shoots-Roots_P Parameter: Plant Line Value: CS6879 vs. WS
  misc_feature: MA Experiment 20000451 PARAMETER Experiment Name: At_CS6879_Shoots-Roots_P Parameter: Tissue Value: Roots
  misc_feature: MA Experiment ID: 20000460 Result: Down-regulated in Transcription
  misc_feature: MA Experiment 20000460 PARAMETER Experiment Name: At_10percent_PEG_P Parameter: Age (day) Value: 12
  misc_feature: MA Experiment 20000460 PARAMETER Experiment Name: At_10percent_PEG_P Parameter: Organism Value: A. thaliana
  misc_feature: MA Experiment 20000460 PARAMETER Experiment Name: At_10percent_PEG_P Parameter: Plant Line Value: WS
  misc_feature: MA Experiment 20000460 PARAMETER Experiment Name: At_10percent_PEG_P Parameter: Timepoint (day) Value: 12
  misc_feature: MA Experiment 20000460 PARAMETER Experiment Name: At_10percent_PEG_P Parameter: Tissue Value: Whole Plant
  misc_feature: MA Experiment 20000460 PARAMETER Experiment Name: At_10percent_PEG_P Parameter: Treatment Value: 10percent PEG vs. No Treatment
  misc_feature: MA Experiment ID: 20000527 Result: Down-regulated in Transcription
  misc_feature: MA Experiment 20000527 PARAMETER Experiment Name: At_10percent_PEG_P Parameter: Age (day) Value: 20
  misc_feature: MA Experiment 20000527 PARAMETER Experiment Name: At_10percent_PEG_P Parameter: Organism Value: A. thaliana
  misc_feature: MA Experiment 20000527 PARAMETER Experiment Name: At_10percent_PEG_P Parameter: Plant Line Value: WS
  misc_feature: MA Experiment 20000527 PARAMETER Experiment Name: At_10percent_PEG_P Parameter: Timepoint (day) Value: 20
  misc_feature: MA Experiment 20000527 PARAMETER Experiment Name: At_10percent_PEG_P Parameter: Tissue Value: Whole Plant
  misc_feature: MA Experiment 20000527 PARAMETER Experiment Name: At_10percent_PEG_P Parameter: Treatment Value: 10percent PEG vs. No Treatment
  misc_feature: MA Experiment ID: 20001247 Result: Down-regulated in Transcription
  misc_feature: MA Experiment 20001247 PARAMETER Experiment Name: At_Far-red-induction_P Parameter: Age (day) Value: 7
  misc_feature: MA Experiment 20001247 PARAMETER Experiment Name: At_Far-red-induction_P Parameter: Light Value: Far-red vs. White
  misc_feature: MA Experiment 20001247 PARAMETER Experiment Name: At_Far-red-induction_P Parameter: Organism Value: A. thaliana
  misc_feature: MA Experiment 20001247 PARAMETER Experiment Name: At_Far-red-induction_P Parameter: Plant Line Value: Columbia
  misc_feature: MA Experiment 20001247 PARAMETER Experiment Name: At_Far-red-induction_P Parameter: Timepoint (hr) Value: 1
  misc_feature: MA Experiment 20001247 PARAMETER Experiment Name: At_Far-red-induction_P Parameter: Tissue Value: Whole Plant
  misc_feature: MA Experiment ID: 20001450 Result: Down-regulated in Transcription
  misc_feature: MA Experiment 20001450 PARAMETER Experiment Name: At_Far-red-induction_P Parameter: Age (day) Value: 7
  misc_feature: MA Experiment 20001450 PARAMETER Experiment Name: At_Far-red-induction_P Parameter: Light Value: Far-red vs. White
  misc_feature: MA Experiment 20001450 PARAMETER Experiment Name: At_Far-red-induction_P Parameter: Organism Value: A. thaliana
  misc_feature: MA Experiment 20001450 PARAMETER Experiment Name: At_Far-red-induction_P Parameter: Plant Line Value: Columbia
  misc_feature: MA Experiment 20001450 PARAMETER Experiment Name: At_Far-red-induction_P Parameter: Timepoint (hr) Value: 8
  misc_feature: MA Experiment 20001450 PARAMETER Experiment Name: At_Far-red-induction_P Parameter: Tissue Value: Whole Plant
aataaactatctctttagtaagtcttttaaacaagctatctagataatgaaaacacaaaccaaagtgatgggaggacatgtcttgcttactgttttcactctttgtatgctttgttcaggggttagggcacagctaagccctgacatttatgctaaatcgtgccccaatctagttcaaattgtccgtaaacaagttgccatcgccctgaaggccgagatacggatggctgcttctctcattcgtcttcatttccacgactgctttgttaatgggtgtgatgcgtcgttattgttggatggagctgacagcgagaaactcgcgatcccaaacattaactctgctagaggatttgaagtaattgatacaatcaaagccgctgtggaaaacgcatgtcctggtgttgtttcttgtgctgatatcctcactttggccgctcgtgactccgttgtattgagtggagggcctgggtggagagtggcattaggaagaaaagatggattggtggcaaatcagaacagtgcaaacaatctaccatctccttttgaacctttagacgccattatcgccaaatttgtagccgtaaaccttaacatcaccgacgtcgtagctttatcaggagctcacacctttggacaagcgaagtgtgctgtcttcagcaaccgtctgttcaactttaccggcttgggaaatcccgacgcaacacttgagacatcactcttgtctaatctgcaaacagtttgtccgctcggaggaaatagtaacataacagcacctcttgacaggagcactacggacaccttcgacaacaattatttcaagaacctgcttgaaggaaaaggtcttttgagttctgatcagattctgttctcgagtgacttagccgtgaacaccacaaagaaactagtggaggcttatagtcggagccagagcttgtttttcagggacttcacatgtgcgatgatcagaatgggaaacatttcgaatggagctagtggggaggttaggacaaactgcagggttatcaataattagcatgtgtgtgtgttttcgagtttatgtaatgtttgggagttgatcggtctcgtgtgtatcagaatgatcacgtgtgtaataataagaattaatggggtttgttggtttgcctaattaaaagtgatttggtaaacctggaaattttcattgattttaaaatt

SEQ ID NO: 78324 - protein, 328 aa, Arabidopsis thaliana
  peptide (1)..(328): Ceres Seq. ID no. 12640623
  misc_feature (46)..(293): Pfam Name: Peroxidase Pfam Description: Peroxidase
  misc_feature (1)..(328): Homolog of NCBI NO: 18420061 NR Description: peroxidase, putative; protein id: At5g19890.1, by cDNA: 40493. [Arabidopsis thaliana] Peroxidase 59 precursor (Atperox P59) (Peroxidase N) (ATPN)
  misc_feature (1)..(328): Homolog of NCBI NO: 1403134 NR Description: peroxidase [Arabidopsis thaliana]
  misc_feature (1)..(328): Homolog of NCBI NO: 21593604 NR Description: peroxidase ATP N [Arabidopsis thaliana]
  misc_feature (29)..(328): Homolog of NCBI NO: 7245406 NR Description: Chain A, Arabidopsis Thaliana Peroxidase N
  misc_feature (1)..(327): Homolog of NCBI NO: 26398017 NR Description: Peroxidase N precursor (Neutral peroxidase)
  misc_feature (16)..(327): Homolog of NCBI NO: 1853975 NR Description: putative peroxidase [Oryza sativa (japonica
  misc_feature (16)..(327): Homolog of NCBI NO: 7433039 NR Description: peroxidase (EC 1.11.1.7) poxN [similarity] - rice
  misc_feature (28)..(328): Homolog of NCBI NO: 1279654 NR Description: peroxidase [Populus balsamifera subsp.
  misc_feature (9)..(327): Homolog of NCBI NO: 21594792 NR Description: peroxidase [Arabidopsis thaliana]
  misc_feature (12)..(328): Homolog of NCBI NO: 19698448 NR Description: gaiacol peroxidase [Gossypium hirsutum]
MKTQTKVMGGHVLLTVFTLCMLCSGVRAQLSPDIYAKSCPNLVQIVRKQVAIALKAEIRMAASLIRLHFHDCFVNGCDASLLLDGADSEKLAIPNINSARGFEVIDTIKAAVENACPGVVSCADILTLAARDSVVLSGGPGWRVALGRKDGLVANQNSANNLPSPFEPLDAIIAKFVAVNLNITDVVALSGAHTFGQAKCAVFSNRLFNFTGLGNPDATLETSLLSNLQTVCPLGGNSNITAPLDRSTTDTFDNNYFKNLLEGKGLLSSDQILFSSDLAVNTTKKLVEAYSRSQSLFFRDFTCAMIRMGNISNGASGEVRTNCRVINN

SEQ ID NO: 78325 - protein, 321 aa, Arabidopsis thaliana
  peptide (1)..(321): Ceres Seq. ID no. 12640624
  misc_feature (39)..(286): Pfam Name: Peroxidase Pfam Description: Peroxidase
  misc_feature (1)..(321): Homolog of NCBI NO: 18420061 NR Description: peroxidase, putative; protein id: At5g19890.1, by cDNA: 40493. [Arabidopsis thaliana] Peroxidase 59 precursor (Atperox P59) (Peroxidase N) (ATPN)
  misc_feature (1)..(321): Homolog of NCBI NO: 1403134 NR Description: peroxidase [Arabidopsis thaliana]
  misc_feature (1)..(321): Homolog of NCBI NO: 21593604 NR Description: peroxidase ATP N [Arabidopsis thaliana]
  misc_feature (22)..(321): Homolog of NCBI NO: 7245406 NR Description: Chain A, Arabidopsis Thaliana Peroxidase N
  misc_feature (1)..(320): Homolog of NCBI NO: 26398017 NR Description: Peroxidase N precursor (Neutral peroxidase)
  misc_feature (9)..(320): Homolog of NCBI NO: 1853975 NR Description: putative peroxidase [Oryza sativa (japonica
  misc_feature (9)..(320): Homolog of NCBI NO: 7433039 NR Description: peroxidase (EC 1.11.1.7) poxN [similarity] - rice
  misc_feature (21)..(321): Homolog of NCBI NO: 1279654 NR Description: peroxidase [Populus balsamifera subsp.
  misc_feature (2)..(320): Homolog of NCBI NO: 21594792 NR Description: peroxidase [Arabidopsis thaliana]
  misc_feature (5)..(321): Homolog of NCBI NO: 19698448 NR Description: gaiacol peroxidase [Gossypium hirsutum]
MGGHVLLTVFTLCMLCSGVRAQLSPDIYAKSCPNLVQIVRKQVAIALKAEIRMAASLIRLHFHDCFVNGCDASLLLDGADSEKLAIPNINSARGFEVIDTIKAAVENACPGVVSCADILTLAARDSVVLSGGPGWRVALGRKDGLVANQNSANNLPSPFEPLDAIIAKFVAVNLNITDVVALSGAHTFGQAKCAVFSNRLFNFTGLGNPDATLETSLLSNLQTVCPLGGNSNITAPLDRSTTDTFDNNYFKNLLEGKGLLSSDQILFSSDLAVNTTKKLVEAYSRSQSLFFRDFTCAMIRMGNISNGASGEVRTNCRVINN

SEQ ID NO: 78326 - protein, 308 aa, Arabidopsis thaliana
  peptide (1)..(308): Ceres Seq. ID no. 12640625
  misc_feature (26)..(273): Pfam Name: Peroxidase Pfam Description: Peroxidase
  misc_feature (1)..(308): Homolog of NCBI NO: 18420061 NR Description: peroxidase, putative; protein id: At5g19890.1, by cDNA: 40493. [Arabidopsis thaliana] Peroxidase 59 precursor (Atperox P59) (Peroxidase N) (ATPN)
  misc_feature (1)..(308): Homolog of NCBI NO: 1403134 NR Description: peroxidase [Arabidopsis thaliana]
  misc_feature (1)..(308): Homolog of NCBI NO: 21593604 NR Description: peroxidase ATP N [Arabidopsis thaliana]
  misc_feature (9)..(308): Homolog of NCBI NO: 7245406 NR Description: Chain A, Arabidopsis Thaliana Peroxidase N
  misc_feature (1)..(307): Homolog of NCBI NO: 26398017 NR Description: Peroxidase N precursor (Neutral peroxidase)
  misc_feature (1)..(307): Homolog of NCBI NO: 1853975 NR Description: putative peroxidase [Oryza sativa (japonica
  misc_feature (1)..(307): Homolog of NCBI NO: 7433039 NR Description: peroxidase (EC 1.11.1.7) poxN [similarity] - rice
  misc_feature (8)..(308): Homolog of NCBI NO: 1279654 NR Description: peroxidase [Populus balsamifera subsp.
  misc_feature (1)..(307): Homolog of NCBI NO: 21594792 NR Description: peroxidase [Arabidopsis thaliana]
  misc_feature (1)..(308): Homolog of NCBI NO: 19698448 NR Description: gaiacol peroxidase [Gossypium hirsutum]
MLCSGVRAQLSPDIYAKSCPNLVQIVRKQVAIALKAEIRMAASLIRLHFHDCFVNGCDASLLLDGADSEKLAIPNINSARGFEVIDTIKAAVENACPGVVSCADILTLAARDSVVLSGGPGWRVALGRKDGLVANQNSANNLPSPFEPLDAIIAKFVAVNLNITDVVALSGAHTFGQAKCAVFSNRLFNFTGLGNPDATLETSLLSNLQTVCPLGGNSNITAPLDRSTTDTFDNNYFKNLLEGKGLLSSDQILFSSDLAVNTTKKLVEAYSRSQSLFFRDFTCAMIRMGNISNGASGEVRTNCRVINN

SEQ ID NO: 78327 - DNA, 1198 bp, Arabidopsis thaliana
  misc_feature (1)..(1198): Ceres Seq. ID no. 12640626
  misc_feature: MA Experiment ID: 108461 Result: Up-regulated in Transcription
  misc_feature: MA Experiment 108461 PARAMETER Experiment Name: At_Germinating_Seeds_cDNA_P Parameter: Age (day) Value: 1 vs. 0
  misc_feature: MA Experiment 108461 PARAMETER Experiment Name: At_Germinating_Seeds_cDNA_P Parameter: Tissue Value: Germinating Seeds
  misc_feature: MA Experiment ID: 108501 Result: Down-regulated in Transcription
  misc_feature: MA Experiment 108501 PARAMETER Experiment Name: At_ap2_floral_buds_cDNA_P Parameter: Plant Line Value: ap2 (Ler.)
  misc_feature: MA Experiment 108501 PARAMETER Experiment Name: At_ap2_floral_buds_cDNA_P Parameter: Tissue Value: Closed Flower
  misc_feature: MA Experiment ID: 108573 Result: Up-regulated in Transcription
  misc_feature: MA Experiment 108573 PARAMETER Experiment Name: At_Drought_cDNA_P Parameter: Timepoint (hr) Value: 6
  misc_feature: MA Experiment 108573 PARAMETER Experiment Name: At_Drought_cDNA_P Parameter: Tissue Value: Aerial
  misc_feature: MA Experiment 108573 PARAMETER Experiment Name: At_Drought_cDNA_P Parameter: Treatment Value: Drought vs. No Drought
  misc_feature: MA Experiment ID: 108668 Result: Up-regulated in Transcription
  misc_feature: MA Experiment 108668 PARAMETER Experiment Name: At_2mM_SA_cDNA_P Parameter: Plant Line Value: WS
  misc_feature: MA Experiment 108668 PARAMETER Experiment Name: At_2mM_SA_cDNA_P Parameter: Timepoint (hr) Value: 6
  misc_feature: MA Experiment 108668 PARAMETER Experiment Name: At_2mM_SA_cDNA_P Parameter: Treatment Value: 2mM SA vs. No Treatment
  misc_feature: MA Experiment ID: 20000090 Result: Up-regulated in Transcription
  misc_feature: MA Experiment ID: 20000171 Result: Up-regulated in Transcription
  misc_feature: MA Experiment 20000171 PARAMETER Experiment Name: At_42deg_Heat_P Parameter: Age (day) Value: 14
  misc_feature: MA Experiment 20000171 PARAMETER Experiment Name: At_42deg_Heat_P Parameter: Organism Value: A. thaliana
  misc_feature: MA Experiment 20000171 PARAMETER Experiment Name: At_42deg_Heat_P Parameter: Plant Line Value: WS
  misc_feature: MA Experiment 20000171 PARAMETER Experiment Name: At_42deg_Heat_P Parameter: Temperature (deg C) Value: 42 vs. 22
  misc_feature: MA Experiment 20000171 PARAMETER Experiment Name: At_42deg_Heat_P Parameter: Timepoint (hr) Value: 1
  misc_feature: MA Experiment 20000171 PARAMETER Experiment Name: At_42deg_Heat_P Parameter: Tissue Value: Aerial
  misc_feature: MA Experiment ID: 20000224 Result: Down-regulated in Transcription
gaactgaatcttcgtcgtcaacagattctccgccactggaagaaatggaaacgtcgccgcaattcagacttatcttcgccgtaatcatttcttctctcatcgctttccgatcgtacaagcggaagtcgctcgatctctccggtggaattgctggattcctcgttatgaccattcacttcaccgccggtttcaggtacggagctctgctgcttgtattctttcttacttcctcgaaacttaccaaagttggcgaagataaaaaaagacgcgttgatgttgagttcaaagaaggtggacaaaggaactgggtacaagtgctatgcaatagtggaattgcttcagttctagttgtaattgcttgtactttaacgggttggaaggacaagtgtttggactcgaagcagtcagaaattgtaacagctcttattggtgggatcattggtcattacgcctgctgtaatggagacacttggtcctcagagcttggggttcttagtgatgcccagcctcgactaatcacaacgtttaagccggtgaagaagggcacaaatggtggagttacaaaggcaggactcttagctgccttggcagcaggcaccactgttggattaacattccttatcttcggactctttaccgcgagttgtgcaagtgatgtagctctaaagcaactcttagtcataccactctctgcactagctggactatgtgggagtcttattgattctatactaggagcaaccattcaattcagtggtttctgctctgtccggaacaaggttgtagggaaaccgggtccaaccgtaaagaagatttcaggtgtggacattcttgacaacaatggtgtgaactttgtctccatactcttgacatcttttctgacttccattgcttctgtgtacattttctgaatgatgaagctaccaacctgttttcttgactagactgttttagattttcaccttttgcatgccaaatttggtatacaaacatactttgattttatttcttaaattgttcattttgttgtatgctgaaatgagagttttaagttcatagaaaactttgatcaaaaaaaaaaaaaaaaaaaagttcatagaacacagtctcttttatgttcagtacaataatcacagctaccaatgtaactgaacatgtatttgttgttttgtttaagagatgtatcactgtgcttccg

SEQ ID NO: 78328 - protein, 302 aa, Arabidopsis thaliana
  peptide (1)..(302): Ceres Seq. ID no. 12640627
  misc_feature (15)..(302): Pfam Name: Integral membrane protein DUF92 Pfam Description: Integral membrane protein DUF92
  misc_feature (15)..(302): Homolog of NCBI NO: 18420075 NR Description: putative protein; protein id: At5g19930.1,
  misc_feature (15)..(302): Homolog of NCBI NO: 21537262 NR Description: unknown [Arabidopsis thaliana]
  misc_feature (22)..(297): Homolog of NCBI NO: 34906132 NR Description: P0509B06.3 [Oryza sativa (japonica
  misc_feature (22)..(261): Homolog of NCBI NO: 34914530 NR Description: OSJNBa0094H06.11 [Oryza sativa (japonica
  misc_feature (18)..(298): Homolog of NCBI NO: 40018572 NR Description: Unknown (protein for MGC:72591) [Rattus
  misc_feature (18)..(297): Homolog of NCBI NO: 21361720 NR Description: hypothetical protein FLJ10936 [Homo sapiens]
  misc_feature (18)..(298): Homolog of NCBI NO: 19526846 NR Description: RIKEN cDNA 2810428F02 [Mus musculus]
  misc_feature (18)..(298): Homolog of NCBI NO: 26335111 NR Description: unnamed protein product [Mus musculus]
  misc_feature (18)..(298): Homolog of NCBI NO: 26329849 NR Description: unnamed protein product [Mus musculus]
  misc_feature (19)..(297): Homolog of NCBI NO: 31239709 NR Description: ENSANGP00000016490 [Anopheles gambiae]
TESSSSTDSPPLEEMETSPQFRLIFAVIISSLIAFRSYKRKSLDLSGGIAGFLVMTIHFTAGFRYGALLLVFFLTSSKLTKVGEDKKRRVDVEFKEGGQRNWVQVLCNSGIASVLVVIACTLTGWKDKCLDSKQSEIVTALIGGIIGHYACCNGDTWSSELGVLSDAQPRLITTFKPVKKGTNGGVTKAGLLAALAAGTTVGLTFLIFGLFTASCASDVALKQLLVIPLSALAGLCGSLIDSILGATIQFSGFCSVRNKVVGKPGPTVKKISGVDILDNNGVNFVSILLTSFLTSIASVYIF

SEQ ID NO: 78329 - protein, 288 aa, Arabidopsis thaliana
  peptide (1)..(288): Ceres Seq. ID no. 12640628
  misc_feature (1)..(288): Pfam Name: Integral membrane protein DUF92 Pfam Description: Integral membrane protein DUF92
  misc_feature (1)..(288): Homolog of NCBI NO: 18420075 NR Description: putative protein; protein id: At5g19930.1,
  misc_feature (1)..(288): Homolog of NCBI NO: 21537262 NR Description: unknown [Arabidopsis thaliana]
  misc_feature (8)..(283): Homolog of NCBI NO: 34906132 NR Description: P0509B06.3 [Oryza sativa (japonica
  misc_feature (8)..(247): Homolog of NCBI NO: 34914530 NR Description: OSJNBa0094H06.11 [Oryza sativa (japonica
  misc_feature (4)..(284): Homolog of NCBI NO: 40018572 NR Description: Unknown (protein for MGC:72591) [Rattus
  misc_feature (4)..(283): Homolog of NCBI NO: 21361720 NR Description: hypothetical protein FLJ10936 [Homo sapiens]
  misc_feature (4)..(284): Homolog of NCBI NO: 19526846 NR Description: RIKEN cDNA 2810428F02 [Mus musculus]
  misc_feature (4)..(284): Homolog of NCBI NO: 26335111 NR Description: unnamed protein product [Mus musculus]
  misc_feature (4)..(284): Homolog of NCBI NO: 26329849 NR Description: unnamed protein product [Mus musculus]
  misc_feature (5)..(283): Homolog of NCBI NO: 31239709 NR Description: ENSANGP00000016490 [Anopheles gambiae]
METSPQFRLIFAVIISSLIAFRSYKRKSLDLSGGIAGFLVMTIHFTAGFRYGALLLVFFLTSSKLTKVGEDKKRRVDVEFKEGGQRNWVQVLCNSGIASVLVVIACTLTGWKDKCLDSKQSEIVTALIGGIIGHYACCNGDTWSSELGVLSDAQPRLITTFKPVKKGTNGGVTKAGLLAALAAGTTVGLTFLIFGLFTASCASDVALKQLLVIPLSALAGLCGSLIDSILGATIQFSGFCSVRNKVVGKPGPTVKKISGVDILDNNGVNFVSILLTSFLTSIASVYIF

SEQ ID NO: 78330 - protein, 248 aa, Arabidopsis thaliana
  peptide (1)..(248): Ceres Seq. ID no. 12640629
  misc_feature (1)..(248): Pfam Name: Integral membrane protein DUF92 Pfam Description: Integral membrane protein DUF92
  misc_feature (1)..(248): Homolog of NCBI NO: 18420075 NR Description: putative protein; protein id: At5g19930.1,
  misc_feature (1)..(248): Homolog of NCBI NO: 21537262 NR Description: unknown [Arabidopsis thaliana]
  misc_feature (1)..(243): Homolog of NCBI NO: 34906132 NR Description: P0509B06.3 [Oryza sativa (japonica
  misc_feature (1)..(207): Homolog of NCBI NO: 34914530 NR Description: OSJNBa0094H06.11 [Oryza sativa (japonica
  misc_feature (1)..(244): Homolog of NCBI NO: 40018572 NR Description: Unknown (protein for MGC:72591) [Rattus
  misc_feature (1)..(243): Homolog of NCBI NO: 21361720 NR Description: hypothetical protein FLJ10936 [Homo sapiens]
  misc_feature (1)..(244): Homolog of NCBI NO: 19526846 NR Description: RIKEN cDNA 2810428F02 [Mus musculus]
  misc_feature (1)..(244): Homolog of NCBI NO: 26335111 NR Description: unnamed protein product [Mus musculus]
  misc_feature (1)..(244): Homolog of NCBI NO: 26329849 NR Description: unnamed protein product [Mus musculus]
  misc_feature (1)..(243): Homolog of NCBI NO: 31239709 NR Description: ENSANGP00000016490 [Anopheles gambiae]
MTIHFTAGFRYGALLLVFFLTSSKLTKVGEDKKRRVDVEFKEGGQRNWVQVLCNSGIASVLVVIACTLTGWKDKCLDSKQSEIVTALIGGIIGHYACCNGDTWSSELGVLSDAQPRLITTFKPVKKGTNGGVTKAGLLAALAAGTTVGLTFLIFGLFTASCASDVALKQLLVIPLSALAGLCGSLIDSILGATIQFSGFCSVRNKVVGKPGPTVKKISGVDILDNNGVNFVSILLTSFLTSIASVYIF

SEQ ID NO: 78331 - DNA, 1319 bp, Arabidopsis thaliana
  misc_feature (1)..(1319): Ceres Seq. ID no. 12640686
  misc_feature: MA Experiment ID: 108501 Result: Up-regulated in Transcription
  misc_feature: MA Experiment 108501 PARAMETER Experiment Name: At_ap2_floral_buds_cDNA_P Parameter: Plant Line Value: ap2 (Ler.)
  misc_feature: MA Experiment 108501 PARAMETER Experiment Name: At_ap2_floral_buds_cDNA_P Parameter: Tissue Value: Closed Flower
  misc_feature: MA Experiment ID: 20000173 Result: Up-regulated in Transcription
  misc_feature: MA Experiment 20000173 PARAMETER Experiment Name: At_42deg_Heat_P Parameter: Age (day) Value: 14
  misc_feature: MA Experiment 20000173 PARAMETER Experiment Name: At_42deg_Heat_P Parameter: Organism Value: A. thaliana
  misc_feature: MA Experiment 20000173 PARAMETER Experiment Name: At_42deg_Heat_P Parameter: Plant Line Value: WS
  misc_feature: MA Experiment 20000173 PARAMETER Experiment Name: At_42deg_Heat_P Parameter: Temperature (deg C) Value: 42 vs. 22
  misc_feature: MA Experiment 20000173 PARAMETER Experiment Name: At_42deg_Heat_P Parameter: Timepoint (hr) Value: 6
  misc_feature: MA Experiment 20000173 PARAMETER Experiment Name: At_42deg_Heat_P Parameter: Tissue Value: Aerial
  misc_feature: MA Experiment ID: 20000286 Result: Up-regulated in Transcription
  misc_feature: MA Experiment 20000286 PARAMETER Experiment Name: At_Open_Flower_P Parameter: Age (day) Value: 21
  misc_feature: MA Experiment 20000286 PARAMETER Experiment Name: At_Open_Flower_P Parameter: Plant Line Value: WS
  misc_feature: MA Experiment 20000286 PARAMETER Experiment Name: At_Open_Flower_P Parameter: Tissue Value: Half Open vs. Whole Plant
aaaaaaacaaatttggttcctttttcttcttcagacgagtaatatcttttgtcttcatcatgctctattcacctaagaagctgttcttgttcttcctctcgtgcattgtgctgtatgtcaactccaacaacagtggcttcgtaaccgcagcaaatagcatcggcttgaactacggactcctcggtgacaacctcccgtctccttccaatgttatcaacctttacaagtccataggcattagtagaatccgaatcttcgacccgaacactgaggtactcaatgccttacgtggtcaccgcgatattgaagtcactgttggcgttaaggaccaagacttggctgctcttgctgcaagcgaagaagctgttaagggctggttcgcggccaacatcgagtcttacttagctgacgtcaacatcacatttattaccgttggtaacgaagtcatccccggaccaatcggtcctcaagtgcttcccgtcatgcagtctctaaccaacctagtcaagtcgaggaatcttccgatctcgataagcaccgtggtggctatgtcgaacctggagcagtcgtatccaccttccgcgggaatgttcacctcccaggcgcgggaacaacttgtccccgtgttgaaactattgtctcaaacaagcacaccaatccttgtcaacatatacccttacttcgcttatgcgtccgacccagccaacatccgtctcgactatgccagctttaacactaagtccatcgtggtccaagatggatcattgggctattcaaacatgtttgatgcaatctttgatgcgttcgtgtgggcaatggagaaggaaggcgttaaaaatttaccaatggtggtgtccgagaccggatggccatccgcggggaacgggaactttaccacgccggctattgcgtccacctacaacagaaattttgtgaagcatatagcaagcggaaaagggacgcctaaaaggcctaacaagagcatgaacgggtttttgtttgcaacgttcaatgaaaatcagaagccggccgggactgaacaaaactttggtttatacaatccaagtgatatgaagcctatctacaagctattctaagtgtgaaagttacttagactttcccgattcactaataataatgctctactagttgttagtgaattaaagtaagattaacaatgatgcacatgctataagcaactggtgactatgagatgatggctctcgtagcgaacttagttgactttttgtaataaaatctgaatgtagtatttaaaaccaatttcctggttttataaacgaatgtactgcctcttcaat

SEQ ID NO: 78332 - protein, 364 aa, Arabidopsis thaliana
  peptide (1)..(364): Ceres Seq. ID no. 12640687
  misc_feature (53)..(364): Pfam Name: Glycosyl hydrolases family 17 Pfam Description: Glycosyl hydrolases family 17
  misc_feature (20)..(364): Homolog of NCBI NO: 15241325 NR Description: glycosyl hydrolase family 17 (beta-1,3-glucanase protein id: At5g20330.1, supported by cDNA: 14120. [Arabidopsis
  misc_feature (20)..(364): Homolog of NCBI NO: 21553380 NR Description: beta-1,3-glucanase bg4 [Arabidopsis thaliana]
  misc_feature (20)..(364): Homolog of NCBI NO: 15241326 NR Description: glycosyl hydrolase family 17 (beta-1,3-glucanase protein id: At5g20340.1 [Arabidopsis thaliana]
  misc_feature (20)..(364): Homolog of NCBI NO: 15217468 NR Description: glycosyl hydrolase family 17
  misc_feature (25)..(364): Homolog of NCBI NO: 15241345 NR Description: glycosyl hydrolase family 17 protein id: At5g20390.1, supported by cDNA: gi_17529181,
  misc_feature (22)..(354): Homolog of NCBI NO: 15241384 NR Description: glycosyl hydrolase family 17
  misc_feature (47)..(361): Homolog of NCBI NO: 34908958 NR Description: beta-1,3-glucanase precursor [Oryza sativa
  misc_feature (47)..(361): Homolog of NCBI NO: 4097944 NR Description: beta-1,3-glucanase precursor [Oryza sativa]
  misc_feature (48)..(363): Homolog of NCBI NO: 6448757 NR Description: beta-1,3-glucanase [Musa acuminata]
  misc_feature (48)..(363): Homolog of NCBI NO: 6073860 NR Description: beta-1, 3-glucananse [Musa acuminata]
KNKFGSFFFFRRVISFVFIMLYSPKKLFLFFLSCIVLYVNSNNSGFVTAANSIGLNYGLLGDNLPSPSNVINLYKSIGISRIRIFDPNTEVLNALRGHRDIEVTVGVKDQDLAALAASEEAVKGWFAANIESYLADVNITFITVGNEVIPGPIGPQVLPVMQSLTNLVKSRNLPISISTVVAMSNLEQSYPPSAGMFTSQAREQLVPVLKLLSQTSTPILVNIYPYFAYASDPANIRLDYASFNTKSIVVQDGSLGYSNMFDAIFDAFVWAMEKEGVKNLPMVVSETGWPSAGNGNFTTPAIASTYNRNFVKHIASGKGTPKRPNKSMNGFLFATFNENQKPAGTEQNFGLYNPSDMKPIYKLF

SEQ ID NO: 78333 - protein, 345 aa, Arabidopsis thaliana
  peptide (1)..(345): Ceres Seq. ID no. 12640688
  misc_feature (34)..(345): Pfam Name: Glycosyl hydrolases family 17 Pfam Description: Glycosyl hydrolases family 17
  misc_feature (1)..(345): Homolog of NCBI NO: 15241325 NR Description: glycosyl hydrolase family 17 (beta-1,3-glucanase protein id: At5g20330.1, supported by cDNA: 14120. [Arabidopsis
  misc_feature (1)..(345): Homolog of NCBI NO: 21553380 NR Description: beta-1,3-glucanase bg4 [Arabidopsis thaliana]
  misc_feature (1)..(345): Homolog of NCBI NO: 15241326 NR Description: glycosyl hydrolase family 17 (beta-1,3-glucanase protein id: At5g20340.1 [Arabidopsis thaliana]
  misc_feature (1)..(345): Homolog of NCBI NO: 15217468 NR Description: glycosyl hydrolase family 17
  misc_feature (6)..(345): Homolog of NCBI NO: 15241345 NR Description: glycosyl hydrolase family 17 protein id: At5g20390.1, supported by cDNA: gi_17529181,
  misc_feature (3)..(335): Homolog of NCBI NO: 15241384 NR Description: glycosyl hydrolase family 17
  misc_feature (28)..(342): Homolog of NCBI NO: 34908958 NR Description: beta-1,3-glucanase precursor [Oryza sativa
  misc_feature (28)..(342): Homolog of NCBI NO: 4097944 NR Description: beta-1,3-glucanase precursor [Oryza sativa]
  misc_feature (29)..(344): Homolog of NCBI NO: 6448757 NR Description: beta-1,3-glucanase [Musa acuminata]
  misc_feature (29)..(344): Homolog of NCBI NO: 6073860 NR Description: beta-1, 3-glucananse [Musa acuminata]
MLYSPKKLFLFFLSCIVLYVNSNNSGFVTAANSIGLNYGLLGDNLPSPSNVINLYKSIGISRIRIFDPNTEVLNALRGHRDIEVTVGVKDQDLAALAASEEAVKGWFAANIESYLADVNITFITVGNEVIPGPIGPQVLPVMQSLTNLVKSRNLPISISTVVAMSNLEQSYPPSAGMFTSQAREQLVPVLKLLSQTSTPILVNIYPYFAYASDPANIRLDYASFNTKSIVVQDGSLGYSNMFDAIFDAFVWAMEKEGVKNLPMVVSETGWPSAGNGNFTTPAIASTYNRNFVKHIASGKGTPKRPNKSMNGFLFATFNENQKPAGTEQNFGLYNPSDMKPIYKLF

SEQ ID NO: 78334 - protein, 204 aa, Arabidopsis thaliana; identical to SEQ ID NO: 29450
  peptide (1)..(204): Ceres Seq. ID no. 12640689
  misc_feature (1)..(204): Pfam Name: Glycosyl hydrolases family 17 Pfam Description: Glycosyl hydrolases family 17
  misc_feature (1)..(204): Homolog of NCBI NO: 15241325 NR Description: glycosyl hydrolase family 17 (beta-1,3-glucanase protein id: At5g20330.1, supported by cDNA: 14120. [Arabidopsis
  misc_feature (1)..(204): Homolog of NCBI NO: 21553380 NR Description: beta-1,3-glucanase bg4 [Arabidopsis thaliana]
  misc_feature (1)..(204): Homolog of NCBI NO: 15241326 NR Description: glycosyl hydrolase family 17 (beta-1,3-glucanase protein id: At5g20340.1 [Arabidopsis thaliana]
  misc_feature (1)..(204): Homolog of NCBI NO: 15217468 NR Description: glycosyl hydrolase family 17
  misc_feature (1)..(204): Homolog of NCBI NO: 15241345 NR Description: glycosyl hydrolase family 17 protein id: At5g20390.1, supported by cDNA: gi_17529181,
  misc_feature (1)..(194): Homolog of NCBI NO: 15241384 NR Description: glycosyl hydrolase family 17
  misc_feature (1)..(201): Homolog of NCBI NO: 34908958 NR Description: beta-1,3-glucanase precursor [Oryza sativa
  misc_feature (1)..(201): Homolog of NCBI NO: 4097944 NR Description: beta-1,3-glucanase precursor [Oryza sativa]
  misc_feature (1)..(203): Homolog of NCBI NO: 6448757 NR Description: beta-1,3-glucanase [Musa acuminata]
  misc_feature (1)..(203): Homolog of NCBI NO: 6073860 NR Description: beta-1, 3-glucananse [Musa acuminata]

SEQ ID NO: 78335 - DNA, 945 bp, Arabidopsis thaliana
  misc_feature (1)..(945): Ceres Seq. ID no. 12640741
  misc_feature: MA Experiment ID: 108434 Result: Up-regulated in Transcription
  misc_feature: MA Experiment 108434 PARAMETER Experiment Name: At_Root_Tips_cDNA_P Parameter: Tissue Value: Root Tips
  misc_feature: MA Experiment ID: 108462 Result: Down-regulated in Transcription
  misc_feature: MA Experiment 108462 PARAMETER Experiment Name: At_Germinating_Seeds_cDNA_P Parameter: Age (day) Value: 2 vs. 0
  misc_feature: MA Experiment 108462 PARAMETER Experiment Name: At_Germinating_Seeds_cDNA_P Parameter: Tissue Value: Germinating Seeds
  misc_feature: MA Experiment ID: 108463 Result: Down-regulated in Transcription
  misc_feature: MA Experiment 108463 PARAMETER Experiment Name: At_Germinating_Seeds_cDNA_P Parameter: Age (day) Value: 3 vs. 0
  misc_feature: MA Experiment 108463 PARAMETER Experiment Name: At_Germinating_Seeds_cDNA_P Parameter: Tissue Value: Germinating Seeds
  misc_feature: MA Experiment ID: 108464 Result: Down-regulated in Transcription
  misc_feature: MA Experiment 108464 PARAMETER Experiment Name: At_Germinating_Seeds_cDNA_P Parameter: Age (day) Value: 4 vs. 0
  misc_feature: MA Experiment 108464 PARAMETER Experiment Name: At_Germinating_Seeds_cDNA_P Parameter: Tissue Value: Germinating Seeds
  misc_feature: MA Experiment ID: 108488 Result: Up-regulated in Transcription
  misc_feature: MA Experiment ID: 108573 Result: Down-regulated in Transcription
  misc_feature: MA Experiment 108573 PARAMETER Experiment Name: At_Drought_cDNA_P Parameter: Timepoint (hr) Value: 6
  misc_feature: MA Experiment 108573 PARAMETER Experiment Name: At_Drought_cDNA_P Parameter: Tissue Value: Aerial
  misc_feature: MA Experiment 108573 PARAMETER Experiment Name: At_Drought_cDNA_P Parameter: Treatment Value: Drought vs. No Drought
  misc_feature: MA Experiment ID: 108577 Result: Up-regulated in Transcription
  misc_feature: MA Experiment 108577 PARAMETER Experiment Name: At_42deg_Heat_cDNA_P Parameter: Temperature (deg C) Value: 42 vs. 22
  misc_feature: MA Experiment 108577 PARAMETER Experiment Name: At_42deg_Heat_cDNA_P Parameter: Timepoint (hr) Value: 6
  misc_feature: MA Experiment 108577 PARAMETER Experiment Name: At_42deg_Heat_cDNA_P Parameter: Tissue Value: Aerial
  misc_feature: MA Experiment ID: 108595 Result: Down-regulated in Transcription
  misc_feature: MA Experiment 108595 PARAMETER Experiment Name: At_Ler-pi_Ovule_cDNA_P Parameter: Plant Line Value: null
  misc_feature: MA Experiment ID: 20000069 Result: Down-regulated in Transcription
  misc_feature: MA Experiment 20000069 PARAMETER Experiment Name: At_100uM_ABA_Mutants_cDNA_P Parameter: Plant Line Value: CS23
  misc_feature: MA Experiment 20000069 PARAMETER Experiment Name: At_100uM_ABA_Mutants_cDNA_P Parameter: Timepoint (hr) Value: 6
  misc_feature: MA Experiment 20000069 PARAMETER Experiment Name: At_100uM_ABA_Mutants_cDNA_P Parameter: Tissue Value: Aerial
  misc_feature: MA Experiment 20000069 PARAMETER Experiment Name: At_100uM_ABA_Mutants_cDNA_P Parameter: Treatment Value: 100uM ABA vs. No Treatment
  misc_feature: MA Experiment ID: 20000070 Result: Down-regulated in Transcription
  misc_feature: MA Experiment 20000070 PARAMETER Experiment Name: At_100uM_ABA_Mutants_cDNA_P Parameter: Plant Line Value: CS24
  misc_feature: MA Experiment 20000070 PARAMETER Experiment Name: At_100uM_ABA_Mutants_cDNA_P Parameter: Timepoint (hr) Value: 6
  misc_feature: MA Experiment 20000070 PARAMETER Experiment Name: At_100uM_ABA_Mutants_cDNA_P Parameter: Tissue Value: Aerial
  misc_feature: MA Experiment 20000070 PARAMETER Experiment Name: At_100uM_ABA_Mutants_cDNA_P Parameter: Treatment Value: 100uM ABA vs. No Treatment
  misc_feature: MA Experiment ID: 20000071 Result: Down-regulated in Transcription
  misc_feature: MA Experiment 20000071 PARAMETER Experiment Name: At_100uM_ABA_Mutants_cDNA_P Parameter: Plant Line Value: CS8104
  misc_feature: MA Experiment 20000071 PARAMETER Experiment Name: At_100uM_ABA_Mutants_cDNA_P Parameter: Timepoint (hr) Value: 6
  misc_feature: MA Experiment 20000071 PARAMETER Experiment Name: At_100uM_ABA_Mutants_cDNA_P Parameter: Tissue Value: Aerial
  misc_feature: MA Experiment 20000071 PARAMETER Experiment Name: At_100uM_ABA_Mutants_cDNA_P Parameter: Treatment Value: 100uM ABA vs. No Treatment
  misc_feature: MA Experiment ID: 20000072 Result: Down-regulated in Transcription
  misc_feature: MA Experiment 20000072 PARAMETER Experiment Name: At_100uM_ABA_Mutants_cDNA_P Parameter: Plant Line Value: CS8105
  misc_feature: MA Experiment 20000072 PARAMETER Experiment Name: At_100uM_ABA_Mutants_cDNA_P Parameter: Timepoint (hr) Value: 6
  misc_feature: MA Experiment 20000072 PARAMETER Experiment Name: At_100uM_ABA_Mutants_cDNA_P Parameter: Tissue Value: Aerial
  misc_feature: MA Experiment 20000072 PARAMETER Experiment Name: At_100uM_ABA_Mutants_cDNA_P Parameter: Treatment Value: 100uM ABA vs. No Treatment
  misc_feature: MA Experiment ID: 20000086 Result: Down-regulated in Transcription
  misc_feature: MA Experiment 20000086 PARAMETER Experiment Name: At_100uM_ABA_Mutants_cDNA_P Parameter: Plant Line Value: CS22
  misc_feature: MA Experiment 20000086 PARAMETER Experiment Name: At_100uM_ABA_Mutants_cDNA_P Parameter: Timepoint (hr) Value: 6
  misc_feature: MA Experiment 20000086 PARAMETER Experiment Name: At_100uM_ABA_Mutants_cDNA_P Parameter: Tissue Value: Aerial
  misc_feature: MA Experiment 20000086 PARAMETER Experiment Name: At_100uM_ABA_Mutants_cDNA_P Parameter: Treatment Value: 100uM ABA vs. No Treatment
  misc_feature: MA Experiment ID: 20000087 Result: Down-regulated in Transcription
  misc_feature: MA Experiment 20000087 PARAMETER Experiment Name: At_100uM_ABA_Mutants_cDNA_P Parameter: Plant Line Value: WS
  misc_feature: MA Experiment 20000087 PARAMETER Experiment Name: At_100uM_ABA_Mutants_cDNA_P Parameter: Timepoint (hr) Value: 6
  misc_feature: MA Experiment 20000087 PARAMETER Experiment Name: At_100uM_ABA_Mutants_cDNA_P Parameter: Tissue Value: Aerial
  misc_feature: MA Experiment 20000087 PARAMETER Experiment Name: At_100uM_ABA_Mutants_cDNA_P Parameter: Treatment Value: 100uM ABA vs. No Treatment
  misc_feature: MA Experiment ID: 20000093 Result: Up-regulated in Transcription
  misc_feature: MA Experiment 20000093 PARAMETER Experiment Name: At_42deg_Heat_cDNA_P Parameter: Temperature (deg C) Value: 42 vs. 22
  misc_feature: MA Experiment 20000093 PARAMETER Experiment Name: At_42deg_Heat_cDNA_P Parameter: Timepoint (hr) Value: 0.5
  misc_feature: MA Experiment 20000093 PARAMETER Experiment Name: At_42deg_Heat_cDNA_P Parameter: Tissue Value: Aerial
  misc_feature: MA Experiment ID: 20000111 Result: Up-regulated in Transcription
  misc_feature: MA Experiment 20000111 PARAMETER Experiment Name: At_42deg_Heat_cDNA_P Parameter: Temperature (deg C) Value: 42 vs. 22
  misc_feature: MA Experiment 20000111 PARAMETER Experiment Name: At_42deg_Heat_cDNA_P Parameter: Timepoint (hr) Value: 6
  misc_feature: MA Experiment 20000111 PARAMETER Experiment Name: At_42deg_Heat_cDNA_P Parameter: Tissue Value: Aerial
  misc_feature: MA Experiment ID: 20000112 Result: Up-regulated in Transcription
  misc_feature: MA Experiment 20000112 PARAMETER Experiment Name: At_42deg_Heat_cDNA_P Parameter: Temperature (deg C) Value: 42 vs. 22
  misc_feature: MA Experiment 20000112 PARAMETER Experiment Name: At_42deg_Heat_cDNA_P Parameter: Timepoint (hr) Value: 2
  misc_feature: MA Experiment 20000112 PARAMETER Experiment Name: At_42deg_Heat_cDNA_P Parameter: Tissue Value: Aerial
  misc_feature: MA Experiment ID: 20000113 Result: Up-regulated in Transcription
  misc_feature: MA Experiment 20000113 PARAMETER Experiment Name: At_42deg_Heat_cDNA_P Parameter: Temperature (deg C) Value: 42 vs. 22
  misc_feature: MA Experiment 20000113 PARAMETER Experiment Name: At_42deg_Heat_cDNA_P Parameter: Timepoint (hr) Value: 8
  misc_feature: MA Experiment 20000113 PARAMETER Experiment Name: At_42deg_Heat_cDNA_P Parameter: Tissue Value: Aerial
  misc_feature: MA Experiment ID: 20000117 Result: Down-regulated in Transcription
  misc_feature: MA Experiment 20000117 PARAMETER Experiment Name: At_100uM_ABA_Mutants_cDNA_P Parameter: Plant Line Value: Columbia
  misc_feature: MA Experiment 20000117 PARAMETER Experiment Name: At_100uM_ABA_Mutants_cDNA_P Parameter: Timepoint (hr) Value: 6
  misc_feature: MA Experiment 20000117 PARAMETER Experiment Name: At_100uM_ABA_Mutants_cDNA_P Parameter: Tissue Value: Aerial
  misc_feature: MA Experiment 20000117 PARAMETER Experiment Name: At_100uM_ABA_Mutants_cDNA_P Parameter: Treatment Value: 100uM ABA vs. No Treatment
  misc_feature: MA Experiment ID: 20000144 Result: Up-regulated in Transcription
  misc_feature: MA Experiment 20000144 PARAMETER Experiment Name: At_42deg_Heat_cDNA_P Parameter: Temperature (deg C) Value: 42 vs. 22
  misc_feature: MA Experiment 20000144 PARAMETER Experiment Name: At_42deg_Heat_cDNA_P Parameter: Timepoint (hr) Value: 1
  misc_feature: MA Experiment 20000144 PARAMETER Experiment Name: At_42deg_Heat_cDNA_P Parameter: Tissue Value: Aerial
  misc_feature: MA Experiment ID: 20000171 Result: Up-regulated in Transcription
  misc_feature: MA Experiment 20000171 PARAMETER Experiment Name: At_42deg_Heat_P Parameter: Age (day) Value: 14
  misc_feature: MA Experiment 20000171 PARAMETER Experiment Name: At_42deg_Heat_P Parameter: Organism Value: A. thaliana
  misc_feature: MA Experiment 20000171 PARAMETER Experiment Name: At_42deg_Heat_P Parameter: Plant Line Value: WS
  misc_feature: MA Experiment 20000171 PARAMETER Experiment Name: At_42deg_Heat_P Parameter: Temperature (deg C) Value: 42 vs. 22
  misc_feature: MA Experiment 20000171 PARAMETER Experiment Name: At_42deg_Heat_P Parameter: Timepoint (hr) Value: 1
  misc_feature: MA Experiment 20000171 PARAMETER Experiment Name: At_42deg_Heat_P Parameter: Tissue Value: Aerial
  misc_feature: MA Experiment ID: 20000173 Result: Up-regulated in Transcription
  misc_feature: MA Experiment 20000173 PARAMETER Experiment Name: At_42deg_Heat_P Parameter: Age (day) Value: 14
  misc_feature: MA Experiment 20000173 PARAMETER Experiment Name: At_42deg_Heat_P Parameter: Organism Value: A. thaliana
  misc_feature: MA Experiment 20000173 PARAMETER Experiment Name: At_42deg_Heat_P Parameter: Plant Line Value: WS
  misc_feature: MA Experiment 20000173 PARAMETER Experiment Name: At_42deg_Heat_P Parameter: Temperature (deg C) Value: 42 vs. 22
  misc_feature: MA Experiment 20000173 PARAMETER Experiment Name: At_42deg_Heat_P Parameter: Timepoint (hr) Value: 6
  misc_feature: MA Experiment 20000173 PARAMETER Experiment Name: At_42deg_Heat_P Parameter: Tissue Value: Aerial
  misc_feature: MA Experiment ID: 20000234 Result: Up-regulated in Transcription
  misc_feature: MA Experiment 20000234 PARAMETER Experiment Name: At_Siliques_P Parameter: Age (day) Value: 21
  misc_feature: MA Experiment 20000234 PARAMETER Experiment Name: At_Siliques_P Parameter: Organism Value: A. thaliana
  misc_feature: MA Experiment 20000234 PARAMETER Experiment Name: At_Siliques_P Parameter: Plant Line Value: WS
  misc_feature: MA Experiment 20000234 PARAMETER Experiment Name: At_Siliques_P Parameter: Tissue Value: Less Than 5mm Siliques vs. Whole Plant
  misc_feature: MA Experiment ID: 20000437 Result: Down-regulated in Transcription
  misc_feature: MA Experiment 20000437 PARAMETER Experiment Name: At_Drought_P Parameter: Age (day) Value: 8
  misc_feature: MA Experiment 20000437 PARAMETER Experiment Name: At_Drought_P Parameter: Organism Value: A. thaliana
  misc_feature: MA Experiment 20000437 PARAMETER Experiment Name: At_Drought_P Parameter: Plant Line Value: WS
  misc_feature: MA Experiment 20000437 PARAMETER Experiment Name: At_Drought_P Parameter: Timepoint (hr) Value: 24
  misc_feature: MA Experiment 20000437 PARAMETER Experiment Name: At_Drought_P Parameter: Tissue Value: Whole Plant
  misc_feature: MA Experiment 20000437 PARAMETER Experiment Name: At_Drought_P Parameter: Treatment Value: Drought vs. No Drought
  misc_feature: MA Experiment ID: 20000794 Result: Down-regulated in Transcription
  misc_feature: MA Experiment 20000794 PARAMETER Experiment Name: At_Petals_P Parameter: Age (day) Value: 23-25 days
  misc_feature: MA Experiment 20000794 PARAMETER Experiment Name: At_Petals_P Parameter: Plant Line Value: WS
  misc_feature: MA Experiment 20000794 PARAMETER Experiment Name: At_Petals_P Parameter: Tissue Value: Petals vs. Whole plant
  misc_feature: MA Experiment ID: 20001248 Result: Down-regulated in Transcription
  misc_feature: MA Experiment 20001248 PARAMETER Experiment Name: At_Far-red-induction_P Parameter: Age (day) Value: 7
  misc_feature: MA Experiment 20001248 PARAMETER Experiment Name: At_Far-red-induction_P Parameter: Light Value: Far-red vs. White
  misc_feature: MA Experiment 20001248 PARAMETER Experiment Name: At_Far-red-induction_P Parameter: Organism Value: A. thaliana
  misc_feature: MA Experiment 20001248 PARAMETER Experiment Name: At_Far-red-induction_P Parameter: Plant Line Value: Columbia
  misc_feature: MA Experiment 20001248 PARAMETER Experiment Name: At_Far-red-induction_P Parameter: Timepoint (hr) Value: 4
  misc_feature: MA Experiment 20001248 PARAMETER Experiment Name: At_Far-red-induction_P Parameter: Tissue Value: Whole Plant
  misc_feature: MA Experiment ID: 20001450 Result: Down-regulated in Transcription
  misc_feature: MA Experiment 20001450 PARAMETER Experiment Name: At_Far-red-induction_P Parameter: Age (day) Value: 7
  misc_feature: MA Experiment 20001450 PARAMETER Experiment Name: At_Far-red-induction_P Parameter: Light Value: Far-red vs. White
  misc_feature: MA Experiment 20001450 PARAMETER Experiment Name: At_Far-red-induction_P Parameter: Organism Value: A. thaliana
  misc_feature: MA Experiment 20001450 PARAMETER Experiment Name: At_Far-red-induction_P Parameter: Plant Line Value: Columbia
  misc_feature: MA Experiment 20001450 PARAMETER Experiment Name: At_Far-red-induction_P Parameter: Timepoint (hr) Value: 8
  misc_feature: MA Experiment 20001450 PARAMETER Experiment Name: At_Far-red-induction_P Parameter: Tissue Value: Whole Plant
  misc_feature: MA Experiment ID: 20001451 Result: Down-regulated in Transcription
  misc_feature: MA Experiment 20001451 PARAMETER Experiment Name: At_Far-red-induction_P Parameter: Age (day) Value: 7
  misc_feature: MA Experiment 20001451 PARAMETER Experiment Name: At_Far-red-induction_P Parameter: Light Value: Far-red vs. White
  misc_feature: MA Experiment 20001451 PARAMETER Experiment Name: At_Far-red-induction_P Parameter: Organism Value: A. thaliana
  misc_feature: MA Experiment 20001451 PARAMETER Experiment Name: At_Far-red-induction_P Parameter: Plant Line Value: Columbia
  misc_feature: MA Experiment 20001451 PARAMETER Experiment Name: At_Far-red-induction_P Parameter: Timepoint (hr) Value: 24
  misc_feature: MA Experiment 20001451 PARAMETER Experiment Name: At_Far-red-induction_P Parameter: Tissue Value: Whole Plant
  misc_feature: MA Experiment ID: 20001558 Result: Up-regulated in Transcription
  misc_feature: MA Experiment 20001558 PARAMETER Experiment Name: At_Drought_Soil_Dry_P Parameter: Age (day) Value: 27
  misc_feature: MA Experiment 20001558 PARAMETER Experiment Name: At_Drought_Soil_Dry_P Parameter: Organism Value: A. thaliana
  misc_feature: MA Experiment 20001558 PARAMETER Experiment Name: At_Drought_Soil_Dry_P Parameter: Plant Line Value: WS
  misc_feature: MA Experiment 20001558 PARAMETER Experiment Name: At_Drought_Soil_Dry_P Parameter: Post Timepoint (hr) Value: 6
  misc_feature: MA Experiment 20001558 PARAMETER Experiment Name: At_Drought_Soil_Dry_P Parameter: Post-Treatment Value: Re-Water vs. No Drought
  misc_feature: MA Experiment 20001558 PARAMETER Experiment Name: At_Drought_Soil_Dry_P Parameter: Timepoint (day) Value: 13
  misc_feature: MA Experiment 20001558 PARAMETER Experiment Name: At_Drought_Soil_Dry_P Parameter: Treatment Value: Drought vs. No Drought
  misc_feature: MA Experiment ID: 20001560 Result: Up-regulated in Transcription
  misc_feature: MA Experiment 20001560 PARAMETER Experiment Name: At_Drought_Soil_Dry_P Parameter: Age (day) Value: 28
  misc_feature: MA Experiment 20001560 PARAMETER Experiment Name: At_Drought_Soil_Dry_P Parameter: Organism Value: A. thaliana
  misc_feature: MA Experiment 20001560 PARAMETER Experiment Name: At_Drought_Soil_Dry_P Parameter: Plant Line Value: WS
  misc_feature: MA Experiment 20001560 PARAMETER Experiment Name: At_Drought_Soil_Dry_P Parameter: Post Timepoint (hr) Value: None
  misc_feature: MA Experiment 20001560 PARAMETER Experiment Name: At_Drought_Soil_Dry_P Parameter: Post-Treatment Value: None
  misc_feature: MA Experiment 20001560 PARAMETER Experiment Name: At_Drought_Soil_Dry_P Parameter: Timepoint (day) Value: 14
  misc_feature: MA Experiment 20001560 PARAMETER Experiment Name: At_Drought_Soil_Dry_P Parameter: Treatment Value: Drought vs. No Drought
  misc_feature: MA Experiment ID: 20001905 Result: Down-regulated in Transcription
  misc_feature: MA Experiment 20001905 PARAMETER Experiment Name: At_Drought_Reproduction_P Parameter: Age (day) Value: 40
  misc_feature: MA Experiment 20001905 PARAMETER Experiment Name: At_Drought_Reproduction_P Parameter: Organism Value: A. thaliana
  misc_feature: MA Experiment 20001905 PARAMETER Experiment Name: At_Drought_Reproduction_P Parameter: Plant Line Value: WS
  misc_feature: MA Experiment 20001905 PARAMETER Experiment Name: At_Drought_Reproduction_P Parameter: Timepoint (day) Value: 10
  misc_feature: MA Experiment 20001905 PARAMETER Experiment Name: At_Drought_Reproduction_P Parameter: Tissue Value: Rosettes
  misc_feature: MA Experiment 20001905 PARAMETER Experiment Name: At_Drought_Reproduction_P Parameter: Treatment Value: Drought vs. No Drought
tctctctactgcaatttttagggttttatcctccgaaagtctcaacctttttcttatcctcaacaagaaatggcggcgactcaacttacagcgtcaccagtgactatgtcagcaaggagcttagcctcgctggatggtctcagagcttcgagtgtcaagttttcatctttgaaaccagggacccttagacagagccagttccgtcgtttggttgtcaaagctgcttctgttgttgcccctaagtatacttcaattaagccattgggagatcgagttttggtgaagatcaaggaggcagaggagaagactttaggtggtatcttacttccatccactgctcaatcaaaacctcaaggaggtgaagtcgttgccgtgggtgaaggaagaactattgggaagaacaaaattgatatcactgtccctactggagcacaaattatctactccaaatacgcaggaactgaggtggagttcaatgatgtgaagcatcttatcctcaaggaagatgatattgttggcattcttgagacagaggacatcaaagatctcaaacctttgaatgaccgagtctttattaaggttgctgaggcggaggagaaaacagctggagggttgttgttaaccgagactaccaaagagaagccttctattggcacggtgatagcagttggaccgggttccctagacgaggaaggtaaaattacgcctctaccagtatcaaccggaagcacagtactttactccaagtatgctggtaacgacttcaagggcaaagatggttccaactacattgccctcagagcttcagatgtgatggctatactttcttagttatgttatatctttgtaatctgcaacttgtatcccaattgtggaaattttttccgtaaacggcctgagcataatctggaataaagacttgagtttgaaaatgtgattttattg

SEQ ID NO: 78336 - protein, 253 aa, Arabidopsis thaliana; identical to SEQ ID NO: 24239
  peptide (1)..(253): Ceres Seq. ID no. 12640742
  misc_feature (158)..(253): Pfam Name: Chaperonin 10 Kd subunit Pfam Description: Chaperonin 10 Kd subunit
  misc_feature (1)..(253): Homolog of NCBI NO: 15242045 NR Description: chloroplast Cpn21 protein; protein id: supported by cDNA: gi_10179871, supported by cDNA: gi_14334611, by cDNA: gi_14587372, supported by cDNA: gi_16226814, supported
  misc_feature (1)..(253): Homolog of NCBI NO: 25453528 NR Description: chaperonin 10 [imported] - Arabidopsis thaliana
  misc_feature (1)..(253): Homolog of NCBI NO: 21780187 NR Description: cp10-like protein [Gossypium hirsutum]
  misc_feature (1)..(253): Homolog of NCBI NO: 7331143 NR Description: chaperonin 21 precursor [Lycopersicon esculentum]
  misc_feature (1)..(253): Homolog of NCBI NO: 399241 NR Description: 20 kDa chaperonin, chloroplast precursor (Protein
  misc_feature (157)..(252): Homolog of NCBI NO: 22297730 NR Description: 10kD chaperonin [Thermosynechococcus elongatus >gi|4033374|sp|O50322|CH10_SYNEL 10 kDa chaperonin (Protein (groES protein) >gi|2696700|dbj|BAA23816.1| GroES [Synechococcus
  misc_feature (159)..(253): Homolog of NCBI NO: 3599923 NR Description: GroES/HSP10 homolog [Lawsonia intracellularis]
  misc_feature (62)..(153): Homolog of NCBI NO: 2493659 NR Description: 10 kDa chaperonin (Protein Cpn10) (groES protein)
  misc_feature (154)..(253): Homolog of NCBI NO: 11467285 NR Description: GroES [Cyanophora paradoxa] GroES [Cyanophora paradoxa] >gi|2493661|sp|Q37761|CH10_CYAPA 10
  misc_feature (61)..(153): Homolog of NCBI NO: 23474135 NR Description: hypothetical protein [Desulfovibrio desulfuricans

SEQ ID NO: 78337 - protein, 241 aa, Arabidopsis thaliana; identical to SEQ ID NO: 24240
  peptide (1)..(241): Ceres Seq. ID no. 12640743
  misc_feature (146)..(241): Pfam Name: Chaperonin 10 Kd subunit Pfam Description: Chaperonin 10 Kd subunit
  misc_feature (1)..(241): Homolog of NCBI NO: 15242045 NR Description: chloroplast Cpn21 protein; protein id: supported by cDNA: gi_10179871, supported by cDNA: gi_14334611, by cDNA: gi_14587372, supported by cDNA: gi_16226814, supported
  misc_feature (1)..(241): Homolog of NCBI NO: 25453528 NR Description: chaperonin 10 [imported] - Arabidopsis thaliana
  misc_feature (1)..(241): Homolog of NCBI NO: 21780187 NR Description: cp10-like protein [Gossypium hirsutum]
  misc_feature (1)..(241): Homolog of NCBI NO: 7331143 NR Description: chaperonin 21 precursor [Lycopersicon esculentum]
  misc_feature (1)..(241): Homolog of NCBI NO: 399241 NR Description: 20 kDa chaperonin, chloroplast precursor (Protein
  misc_feature (145)..(240): Homolog of NCBI NO: 22297730 NR Description: 10kD chaperonin [Thermosynechococcus elongatus >gi|4033374|sp|O50322|CH10_SYNEL 10 kDa chaperonin (Protein (groES protein) >gi|2696700|dbj|BAA23816.1| GroES [Synechococcus
  misc_feature (147)..(241): Homolog of NCBI NO: 3599923 NR Description: GroES/HSP10 homolog [Lawsonia intracellularis]
  misc_feature (50)..(141): Homolog of NCBI NO: 2493659 NR Description: 10 kDa chaperonin (Protein Cpn10) (groES protein)
  misc_feature (142)..(241): Homolog of NCBI NO: 11467285 NR Description: GroES [Cyanophora paradoxa] GroES [Cyanophora paradoxa] >gi|2493661|sp|Q37761|CH10_CYAPA 10
  misc_feature (49)..(141): Homolog of NCBI NO: 23474135 NR Description: hypothetical protein [Desulfovibrio desulfuricans

SEQ ID NO: 78338 - DNA, 799 bp, Arabidopsis thaliana
  misc_feature (1)..(799): Ceres Seq. ID no. 12640775
  misc_feature: MA Experiment ID: 108434 Result: Down-regulated in Transcription
  misc_feature: MA Experiment 108434 PARAMETER Experiment Name: At_Root_Tips_cDNA_P Parameter: Tissue Value: Root Tips
  misc_feature: MA Experiment ID: 108464 Result: Up-regulated in Transcription
  misc_feature: MA Experiment 108464 PARAMETER Experiment Name: At_Germinating_Seeds_cDNA_P Parameter: Age (day) Value: 4 vs. 0
  misc_feature: MA Experiment 108464 PARAMETER Experiment Name: At_Germinating_Seeds_cDNA_P Parameter: Tissue Value: Germinating Seeds
  misc_feature: MA Experiment ID: 108573 Result: Up-regulated in Transcription
  misc_feature: MA Experiment 108573 PARAMETER Experiment Name: At_Drought_cDNA_P Parameter: Timepoint (hr) Value: 6
  misc_feature: MA Experiment 108573 PARAMETER Experiment Name: At_Drought_cDNA_P Parameter: Tissue Value: Aerial
  misc_feature: MA Experiment 108573 PARAMETER Experiment Name: At_Drought_cDNA_P Parameter: Treatment Value: Drought vs. No Drought
  misc_feature: MA Experiment ID: 108577 Result: Down-regulated in Transcription
  misc_feature: MA Experiment 108577 PARAMETER Experiment Name: At_42deg_Heat_cDNA_P Parameter: Temperature (deg C) Value: 42 vs. 22
  misc_feature: MA Experiment 108577 PARAMETER Experiment Name: At_42deg_Heat_cDNA_P Parameter: Timepoint (hr) Value: 6
  misc_feature: MA Experiment 108577 PARAMETER Experiment Name: At_42deg_Heat_cDNA_P Parameter: Tissue Value: Aerial
  misc_feature: MA Experiment ID: 108585 Result: Up-regulated in Transcription
  misc_feature: MA Experiment 108585 PARAMETER Experiment Name: At_5mM_NaNP_cDNA_P Parameter: Timepoint (hr) Value: 6
  misc_feature: MA Experiment 108585 PARAMETER Experiment Name: At_5mM_NaNP_cDNA_P Parameter: Tissue Value: Aerial
  misc_feature: MA Experiment 108585 PARAMETER Experiment Name: At_5mM_NaNP_cDNA_P Parameter: Treatment Value: null
  misc_feature: MA Experiment ID: 108607 Result: Up-regulated in Transcription
  misc_feature: MA Experiment 108607 PARAMETER Experiment Name: At_100uM_ABA_cDNA_P Parameter: Timepoint (hr) Value: 4
  misc_feature: MA Experiment 108607 PARAMETER Experiment Name: At_100uM_ABA_cDNA_P Parameter: Tissue Value: Aerial
  misc_feature: MA Experiment 108607 PARAMETER Experiment Name: At_100uM_ABA_cDNA_P Parameter: Treatment Value: 100uM ABA vs. No Treatment
  misc_feature: MA Experiment ID: 20000111 Result: Down-regulated in Transcription
  misc_feature: MA Experiment 20000111 PARAMETER Experiment Name: At_42deg_Heat_cDNA_P Parameter: Temperature (deg C) Value: 42 vs. 22
  misc_feature: MA Experiment 20000111 PARAMETER Experiment Name: At_42deg_Heat_cDNA_P Parameter: Timepoint (hr) Value: 6
  misc_feature: MA Experiment 20000111 PARAMETER Experiment Name: At_42deg_Heat_cDNA_P Parameter: Tissue Value: Aerial
  misc_feature: MA Experiment ID: 20000113 Result: Down-regulated in Transcription
  misc_feature: MA Experiment 20000113 PARAMETER Experiment Name: At_42deg_Heat_cDNA_P Parameter: Temperature (deg C) Value: 42 vs. 22
  misc_feature: MA Experiment 20000113 PARAMETER Experiment Name: At_42deg_Heat_cDNA_P Parameter: Timepoint (hr) Value: 8
  misc_feature: MA Experiment 20000113 PARAMETER Experiment Name: At_42deg_Heat_cDNA_P Parameter: Tissue Value: Aerial
  misc_feature: MA Experiment ID: 20000144 Result: Down-regulated in Transcription
  misc_feature: MA Experiment 20000144 PARAMETER Experiment Name: At_42deg_Heat_cDNA_P Parameter: Temperature (deg C) Value: 42 vs. 22
  misc_feature: MA Experiment 20000144 PARAMETER Experiment Name: At_42deg_Heat_cDNA_P Parameter: Timepoint (hr) Value: 1
  misc_feature: MA Experiment 20000144 PARAMETER Experiment Name: At_42deg_Heat_cDNA_P Parameter: Tissue Value: Aerial
  misc_feature: MA Experiment ID: 20000224 Result: Down-regulated in Transcription
actttctctattcaatctcacacgcgctaaaccataacccgatattactaatgacgaactacggtgcgattccgacgtcgtctcatgcatctccgttggtggatgtcgagtctctctcacgcgctaaacaccgtatcaaagccgggctagccacgcgccgtgcttggagagtgatgttcgatttccactccatgggactgcctcacggtgtctccgatgcgttcacaagaatcaagaccaatcttgcttacttccgtatgaactacgcaatcgttgtcttgatcgttatcttcttcagcttgatctggcatccgacatcgctcatcgtcttcaccgtcttggtcgttgtttggatctttctgtattttctccgtgatgagcctatcaagctgttccggtttcagatcgatgatcggacggtcttgattgttttatcggtgttaaccgtcgttttactcctgttgaccaacgcgacgtttaatattgttggagcgcttgtgaccggagctgtgttggttttgatccattcggtggttaggaagacggaggatcttttcttggatgaagaagcggcgacgactgagacttctgggctgacgtcatacccgtcgacttaaatcgtttcatctcgaaatttgtgtatcttttctatttttgtatattatcttgtttttttaattatgcgtaatcaatttttattggtgtgagtttggtttgagactttctctctctcttttgttttctgagttttgagctctgtctgaagtttgaacaattctaatttgttataatttttatt

SEQ ID NO: 78339 - protein, 204 aa, Arabidopsis thaliana; identical to SEQ ID NO: 28093
  peptide (1)..(204): Ceres Seq. ID no. 12640776
  misc_feature (17)..(204): Homolog of NCBI NO: 18400140 NR Description: expressed protein; protein id: At3g13720.1, by cDNA: 8544. [Arabidopsis thaliana] >gi|9294018|dbj|BAB01921.1|
  misc_feature (17)..(204): Homolog of NCBI NO: 21617895 NR Description: unknown [Arabidopsis thaliana]
  misc_feature (17)..(204): Homolog of NCBI NO: 15231332 NR Description: unknown protein; protein id: At3g13710.1 thaliana] >gi|9294017|dbj|BAB01920.1|
  misc_feature (17)..(204): Homolog of NCBI NO: 18405248 NR Description: expressed protein; protein id: At1g55190.1, by cDNA: 21940. [Arabidopsis thaliana] >gi|25347725|pir||F96593
  misc_feature (17)..(188): Homolog of NCBI NO: 34903576 NR Description: P0419B01.1 [Oryza sativa (japonica
  misc_feature (17)..(191): Homolog of NCBI NO: 15220814 NR Description: hypothetical protein; protein id: At1g17700.1
  misc_feature (21)..(200): Homolog of NCBI NO: 18390939 NR Description: expressed protein; protein id: At1g08770.1, by cDNA: 7188. [Arabidopsis thaliana] >gi|7485990|pir||T00733
  misc_feature (21)..(191): Homolog of NCBI NO: 21594668 NR Description: unknown [Arabidopsis thaliana]
  misc_feature (24)..(191): Homolog of NCBI NO: 40539036 NR Description: putative prenylated rab acceptor protein [Oryza
  misc_feature (38)..(200): Homolog of NCBI NO: 7487097 NR Description: hypothetical protein T16L4.170 - Arabidopsis >gi|5123560|emb|CAB45326.1| putative protein [Arabidopsis >gi|7269865|emb|CAB79724.1| putative protein [Arabidopsis

SEQ ID NO: 78340 - protein, 188 aa, Arabidopsis thaliana; identical to SEQ ID NO: 28094
  peptide (1)..(188): Ceres Seq. ID no. 12640777
  misc_feature (1)..(188): Homolog of NCBI NO: 18400140 NR Description: expressed protein; protein id: At3g13720.1, by cDNA: 8544. [Arabidopsis thaliana] >gi|9294018|dbj|BAB01921.1|
  misc_feature (1)..(188): Homolog of NCBI NO: 21617895 NR Description: unknown [Arabidopsis thaliana]
  misc_feature (1)..(188): Homolog of NCBI NO: 15231332 NR Description: unknown protein; protein id: At3g13710.1 thaliana] >gi|9294017|dbj|BAB01920.1|
  misc_feature (1)..(188): Homolog of NCBI NO: 18405248 NR Description: expressed protein; protein id: At1g55190.1, by cDNA: 21940. [Arabidopsis thaliana] >gi|25347725|pir||F96593
  misc_feature (1)..(172): Homolog of NCBI NO: 34903576 NR Description: P0419B01.1 [Oryza sativa (japonica
  misc_feature (1)..(175): Homolog of NCBI NO: 15220814 NR Description: hypothetical protein; protein id: At1g17700.1
  misc_feature (5)..(184): Homolog of NCBI NO: 18390939 NR Description: expressed protein; protein id: At1g08770.1, by cDNA: 7188. [Arabidopsis thaliana] >gi|7485990|pir||T00733
  misc_feature (5)..(175): Homolog of NCBI NO: 21594668 NR Description: unknown [Arabidopsis thaliana]
  misc_feature (8)..(175): Homolog of NCBI NO: 40539036 NR Description: putative prenylated rab acceptor protein [Oryza
  misc_feature (22)..(184): Homolog of NCBI NO: 7487097 NR Description: hypothetical protein T16L4.170 - Arabidopsis >gi|5123560|emb|CAB45326.1| putative protein [Arabidopsis >gi|7269865|emb|CAB79724.1| putative protein [Arabidopsis

SEQ ID NO: 78341 - protein, 147 aa, Arabidopsis thaliana; identical to SEQ ID NO: 28095
  peptide (1)..(147): Ceres Seq. ID no. 12640778
  misc_feature (1)..(147): Homolog of NCBI NO: 18400140 NR Description: expressed protein; protein id: At3g13720.1, by cDNA: 8544. [Arabidopsis thaliana] >gi|9294018|dbj|BAB01921.1|
  misc_feature (1)..(147): Homolog of NCBI NO: 21617895 NR Description: unknown [Arabidopsis thaliana]
  misc_feature (1)..(147): Homolog of NCBI NO: 15231332 NR Description: unknown protein; protein id: At3g13710.1 thaliana] >gi|9294017|dbj|BAB01920.1|
  misc_feature (1)..(147): Homolog of NCBI NO: 18405248 NR Description: expressed protein; protein id: At1g55190.1, by cDNA: 21940. [Arabidopsis thaliana] >gi|25347725|pir||F96593
  misc_feature (1)..(131): Homolog of NCBI NO: 34903576 NR Description: P0419B01.1 [Oryza sativa (japonica
  misc_feature (1)..(134): Homolog of NCBI NO: 15220814 NR Description: hypothetical protein; protein id: At1g17700.1
  misc_feature (1)..(143): Homolog of NCBI NO: 18390939 NR Description: expressed protein; protein id: At1g08770.1, by cDNA: 7188. [Arabidopsis thaliana] >gi|7485990|pir||T00733
  misc_feature (1)..(134): Homolog of NCBI NO: 21594668 NR Description: unknown [Arabidopsis thaliana]
  misc_feature (1)..(134): Homolog of NCBI NO: 40539036 NR Description: putative prenylated rab acceptor protein [Oryza
  misc_feature (1)..(143): Homolog of NCBI NO: 7487097 NR Description: hypothetical protein T16L4.170 - Arabidopsis >gi|5123560|emb|CAB45326.1| putative protein [Arabidopsis >gi|7269865|emb|CAB79724.1| putative protein [Arabidopsis

SEQ ID NO: 78342 - DNA, 1740 bp, Arabidopsis thaliana
  misc_feature (1)..(1740): Ceres Seq. ID no. 12640782
  misc_feature: MA Experiment ID: 20000307 Result: Down-regulated in Transcription
  misc_feature: MA Experiment 20000307 PARAMETER Experiment Name: At_Germinating_Seeds_Sub_P Parameter: Age (hr) Value: 24 vs. 0
  misc_feature: MA Experiment 20000307 PARAMETER Experiment Name: At_Germinating_Seeds_Sub_P Parameter: Organism Value: A. thaliana
  misc_feature: MA Experiment 20000307 PARAMETER Experiment Name: At_Germinating_Seeds_Sub_P Parameter: Plant Line Value: WS
  misc_feature: MA Experiment 20000307 PARAMETER Experiment Name: At_Germinating_Seeds_Sub_P Parameter: Tissue Value: Germinating Seeds
  misc_feature: MA Experiment ID: 20000315 Result: Down-regulated in Transcription
  misc_feature: MA Experiment 20000315 PARAMETER Experiment Name: At_14day_Shoots-Roots_Sub_P Parameter: Age (day) Value: 14
  misc_feature: MA Experiment 20000315 PARAMETER Experiment Name: At_14day_Shoots-Roots_Sub_P Parameter: Organism Value: A. thaliana
  misc_feature: MA Experiment 20000315 PARAMETER Experiment Name: At_14day_Shoots-Roots_Sub_P Parameter: Plant Line Value: WS
  misc_feature: MA Experiment 20000315 PARAMETER Experiment Name: At_14day_Shoots-Roots_Sub_P Parameter: Tissue Value: Shoots vs. Whole Plant
  misc_feature: MA Experiment ID: 20000328 Result: Down-regulated in Transcription
  misc_feature: MA Experiment 20000328 PARAMETER Experiment Name: At_42deg_Heat_Sub_P Parameter: Age (day) Value: 14
  misc_feature: MA Experiment 20000328 PARAMETER Experiment Name: At_42deg_Heat_Sub_P Parameter: Organism Value: A. thaliana
  misc_feature: MA Experiment 20000328 PARAMETER Experiment Name: At_42deg_Heat_Sub_P Parameter: Plant Line Value: WS
  misc_feature: MA Experiment 20000328 PARAMETER Experiment Name: At_42deg_Heat_Sub_P Parameter: Temperature (deg C) Value: 42 vs. 22
  misc_feature: MA Experiment 20000328 PARAMETER Experiment Name: At_42deg_Heat_Sub_P Parameter: Timepoint (hr) Value: 6
  misc_feature: MA Experiment 20000328 PARAMETER Experiment Name: At_42deg_Heat_Sub_P Parameter: Tissue Value: Aerial
atggggttccatggttacgatgctttgttgaatgcgtgtttggacaaaagggctcttagagatggtcaaagagttcatgcccacatgatcaaaacccgttatttacccgccacttacctccgaactcgtctgcttatcttctatggtaaatgtgattgtttagaggatgcacggaaagtgctcgacgaaatgcctgagaagaatgtcgtttcctggactgctatgatctcgcgttattctcaaactgggcattcttctgaggctctcactgtttttgcagagatgatgagatcagatgggaaaccgaatgagttcactttcgctactgttcttacttcttgtatacgtgcttctgggttaggtcttggtaagcaaatccatggactcatagttaagtggaattacgattctcatatttttgttggaagctctcttcttgacatgtatgctaaagctggtcaaattaaagaagctcgtgagattttcgagtgtttgcctgagagagatgttgtctcatgtactgctattattgctggttatgcccaactaggtcttgatgaagaggcgttagagatgtttcatagactgcatagtgaaggaatgagtcccaattatgttacctatgctagtcttttgacagcattatctggacttgctttgctagatcatggcaagcaagctcattgccatgtcttgagacgtgaacttccgttttacgcggtccttcagaattctcttattgatatgtactcaaaatgtgggaatctttcttacgctagaaggctttttgataacatgcctgagaggacagcgatttcatggaatgcgatgcttgtgggatatagtaaacatgggttaggaagagaagttcttgaactttttagattgatgagagatgagaagagagtaaagcctgatgcagttacccttttggctgttttgtctggttgcagccatgggagaatggaagacacagggttgaatatatttgatggcatggtagcgggagaatacgggactaagcctggcactgagcattatggttgcatcgttgatatgcttggccgtgcgggtaggattgatgaggcatttgaattcatcaaaagaatgccatctaaaccaactgctggtgtcttgggttcccttttaggagcatgtagggttcacttatctgtggatattggcgaatctgtaggtcgcagactcattgagattgaaccagagaatgcagggaactatgtcatcctctctaatttgtatgcttcggctggaagatgggcagatgtaaacaatgtaagagctatgatgatgcagaaagctgttacaaaagaaccaggaagaagctggattcaacacgagcaaaccttacattacttccacgccaatgatcgtacccatccaagaagggaagaagtgttagctaaaatgaaagaaatatcgataaaaatgaagcaagctggttatgttcctgatcttagctgtgtgctatatgatgtggatgaagagcagaaggagaaaatgctacttggccacagtgagaaactagccttgacttttggtttgattgctactggtgaagggattccaattagagttttcaagaatctacgtatatgcgttgattgtcataacttcgccaagatcttctcaaaggtttttgaaagagaagtgtcattaagggataaaaacaggtttcatcaaattgtcgatggaatatgttcatgcggagattactggtga

SEQ ID NO: 78343 - protein, 579 aa, Arabidopsis thaliana
  peptide (1)..(579): Ceres Seq. ID no. 12640783
  misc_feature (308)..(342): Pfam Name: PPR repeat Pfam Description: PPR repeat
  misc_feature (1)..(579): Homolog of NCBI NO: 15231358 NR Description: hypothetical protein; protein id: At3g13770.1
  misc_feature (6)..(578): Homolog of NCBI NO: 37534806 NR Description: putative PPR-repeat containing protein [Oryza
  misc_feature (6)..(579): Homolog of NCBI NO: 15229561 NR Description: hypothetical protein; protein id: At3g24000.1 thaliana] >gi|9294669|dbj|BAB03018.1| contains similarity to
  misc_feature (8)..(579): Homolog of NCBI NO: 11281371 NR Description: hypothetical protein T8H10.30 - Arabidopsis >gi|6706414|emb|CAB66100.1| putative protein [Arabidopsis
  misc_feature (8)..(579): Homolog of NCBI NO: 30794008 NR Description: unknown protein [Arabidopsis thaliana]
  misc_feature (8)..(579): Homolog of NCBI NO: 30694644 NR Description: pentatricopeptide (PPR) repeat-containing protein
  misc_feature (6)..(579): Homolog of NCBI NO: 9279668 NR Description: selenium-binding protein-like [Arabidopsis
  misc_feature (6)..(579): Homolog of NCBI NO: 15231617 NR Description: unknown protein; protein id: At3g26780.1
  misc_feature (7)..(579): Homolog of NCBI NO: 15223099 NR Description: unknown protein; protein id: At1g08070.1 thaliana] >gi|8778839|gb|AAF79838.1|AC026875_18 T6D22.15
  misc_feature (6)..(579): Homolog of NCBI NO: 15232648 NR Description: putative protein; protein id: At3g46790.1
MGFHGYDALLNACLDKRALRDGQRVHAHMIKTRYLPATYLRTRLLIFYGKCDCLEDARKVLDEMPEKNVVSWTAMISRYSQTGHSSEALTVFAEMMRSDGKPNEFTFATVLTSCIRASGLGLGKQIHGLIVKWNYDSHIFVGSSLLDMYAKAGQIKEAREIFECLPERDVVSCTAIIAGYAQLGLDEEALEMFHRLHSEGMSPNYVTYASLLTALSGLALLDHGKQAHCHVLRRELPFYAVLQNSLIDMYSKCGNLSYARRLFDNMPERTAISWNAMLVGYSKHGLGREVLELFRLMRDEKRVKPDAVTLLAVLSGCSHGRMEDTGLNIFDGMVAGEYGTKPGTEHYGCIVDMLGRAGRIDEAFEFIKRMPSKPTAGVLGSLLGACRVHLSVDIGESVGRRLIEIEPENAGNYVILSNLYASAGRWADVNNVRAMMMQKAVTKEPGRSWIQHEQTLHYFHANDRTHPRREEVLAKMKEISIKMKQAGYVPDLSCVLYDVDEEQKEKMLLGHSEKLALTFGLIATGEGIPIRVFKNLRICVDCHNFAKIFSKVFEREVSLRDKNRFHQIVDGICSCGDYW

SEQ ID NO: 78344 - protein, 551 aa, Arabidopsis thaliana
  peptide (1)..(551): Ceres Seq. ID no. 12640784
  misc_feature (280)..(314): Pfam Name: PPR repeat Pfam Description: PPR repeat
  misc_feature (1)..(551): Homolog of NCBI NO: 15231358 NR Description: hypothetical protein; protein id: At3g13770.1
  misc_feature (1)..(550): Homolog of NCBI NO: 37534806 NR Description: putative PPR-repeat containing protein [Oryza
  misc_feature (1)..(551): Homolog of NCBI NO: 15229561 NR Description: hypothetical protein; protein id: At3g24000.1 thaliana] >gi|9294669|dbj|BAB03018.1| contains similarity to
  misc_feature (1)..(551): Homolog of NCBI NO: 11281371 NR Description: hypothetical protein T8H10.30 - Arabidopsis >gi|6706414|emb|CAB66100.1| putative protein [Arabidopsis
  misc_feature (1)..(551): Homolog of NCBI NO: 30794008 NR Description: unknown protein [Arabidopsis thaliana]
  misc_feature (1)..(551): Homolog of NCBI NO: 30694644 NR Description: pentatricopeptide (PPR) repeat-containing protein
  misc_feature (1)..(551): Homolog of NCBI NO: 9279668 NR Description: selenium-binding protein-like [Arabidopsis
  misc_feature (1)..(551): Homolog of NCBI NO: 15231617 NR Description: unknown protein; protein id: At3g26780.1
  misc_feature (1)..(551): Homolog of NCBI NO: 15223099 NR Description: unknown protein; protein id: At1g08070.1 thaliana] >gi|8778839|gb|AAF79838.1|AC026875_18 T6D22.15
  misc_feature (1)..(551): Homolog of NCBI NO: 15232648 NR Description: putative protein; protein id: At3g46790.1
MIKTRYLPATYLRTRLLIFYGKCDCLEDARKVLDEMPEKNVVSWTAMISRYSQTGHSSEALTVFAEMMRSDGKPNEFTFATVLTSCIRASGLGLGKQIHGLIVKWNYDSHIFVGSSLLDMYAKAGQIKEAREIFECLPERDVVSCTAIIAGYAQLGLDEEALEMFHRLHSEGMSPNYVTYASLLTALSGLALLDHGKQAHCHVLRRELPFYAVLQNSLIDMYSKCGNLSYARRLFDNMPERTAISWNAMLVGYSKHGLGREVLELFRLMRDEKRVKPDAVTLLAVLSGCSHGRMEDTGLNIFDGMVAGEYGTKPGTEHYGCIVDMLGRAGRIDEAFEFIKRMPSKPTAGVLGSLLGACRVHLSVDIGESVGRRLIEIEPENAGNYVILSNLYASAGRWADVNNVRAMMMQKAVTKEPGRSWIQHEQTLHYFHANDRTHPRREEVLAKMKEISIKMKQAGYVPDLSCVLYDVDEEQKEKMLLGHSEKLALTFGLIATGEGIPIRVFKNLRICVDCHNFAKIFSKVFEREVSLRDKNRFHQIVDGICSCGDYW

SEQ ID NO: 78345 - protein, 516 aa, Arabidopsis thaliana
  peptide (1)..(516): Ceres Seq. ID no. 12640785
  misc_feature (245)..(279): Pfam Name: PPR repeat Pfam Description: PPR repeat
  misc_feature (1)..(516): Homolog of NCBI NO: 15231358 NR Description: hypothetical protein; protein id: At3g13770.1
  misc_feature (1)..(515): Homolog of NCBI NO: 37534806 NR Description: putative PPR-repeat containing protein [Oryza
  misc_feature (1)..(516): Homolog of NCBI NO: 15229561 NR Description: hypothetical protein; protein id: At3g24000.1 thaliana] >gi|9294669|dbj|BAB03018.1| contains similarity to
  misc_feature (1)..(516): Homolog of NCBI NO: 11281371 NR Description: hypothetical protein T8H10.30 - Arabidopsis >gi|6706414|emb|CAB66100.1| putative protein [Arabidopsis
  misc_feature (1)..(516): Homolog of NCBI NO: 30694644 NR Description: pentatricopeptide (PPR) repeat-containing protein
  misc_feature (1)..(516): Homolog of NCBI NO: 30794008 NR Description: unknown protein [Arabidopsis thaliana]
  misc_feature (1)..(516): Homolog of NCBI NO: 9279668 NR Description: selenium-binding protein-like [Arabidopsis
  misc_feature (1)..(516): Homolog of NCBI NO: 15231617 NR Description: unknown protein; protein id: At3g26780.1
  misc_feature (1)..(516): Homolog of NCBI NO: 15223099 NR Description: unknown protein; protein id: At1g08070.1 thaliana] >gi|8778839|gb|AAF79838.1|AC026875_18 T6D22.15
  misc_feature (1)..(516): Homolog of NCBI NO: 15232648 NR Description: putative protein; protein id: At3g46790.1
MPEKNVVSWTAMISRYSQTGHSSEALTVFAEMMRSDGKPNEFTFATVLTSCIRASGLGLGKQIHGLIVKWNYDSHIFVGSSLLDMYAKAGQIKEAREIFECLPERDVVSCTAIIAGYAQLGLDEEALEMFHRLHSEGMSPNYVTYASLLTALSGLALLDHGKQAHCHVLRRELPFYAVLQNSLIDMYSKCGNLSYARRLFDNMPERTAISWNAMLVGYSKHGLGREVLELFRLMRDEKRVKPDAVTLLAVLSGCSHGRMEDTGLNIFDGMVAGEYGTKPGTEHYGCIVDMLGRAGRIDEAFEFIKRMPSKPTAGVLGSLLGACRVHLSVDIGESVGRRLIEIEPENAGNYVILSNLYASAGRWADVNNVRAMMMQKAVTKEPGRSWIQHEQTLHYFHANDRTHPRREEVLAKMKEISIKMKQAGYVPDLSCVLYDVDEEQKEKMLLGHSEKLALTFGLIATGEGIPIRVFKNLRICVDCHNFAKIFSKVFEREVSLRDKNRFHQIVDGICSCGDYW

SEQ ID NO: 78346 - DNA, 2358 bp, Arabidopsis thaliana
  misc_feature (1)..(2358): Ceres Seq. ID no. 12640800
  misc_feature: MA Experiment ID: 20000235 Result: Down-regulated in Transcription
  misc_feature: MA Experiment 20000235 PARAMETER Experiment Name: At_Siliques_P Parameter: Age (day) Value: 21
  misc_feature: MA Experiment 20000235 PARAMETER Experiment Name: At_Siliques_P Parameter: Organism Value: A. thaliana
  misc_feature: MA Experiment 20000235 PARAMETER Experiment Name: At_Siliques_P Parameter: Plant Line Value: WS
  misc_feature: MA Experiment 20000235 PARAMETER Experiment Name: At_Siliques_P Parameter: Tissue Value: 5-10mm Siliques vs. Whole Plant
  misc_feature: MA Experiment ID: 20000496 Result: Down-regulated in Transcription
  misc_feature: MA Experiment 20000496 PARAMETER Experiment Name: At_Guard_Cells_P Parameter: Harvest Date Value: 7/19/2002
  misc_feature: MA Experiment 20000496 PARAMETER Experiment Name: At_Guard_Cells_P Parameter: Organism Value: Canola
  misc_feature: MA Experiment 20000496 PARAMETER Experiment Name: At_Guard_Cells_P Parameter: Tissue Value: Guard Cells vs. Leaves
  misc_feature: MA Experiment ID: 20001451 Result: Up-regulated in Transcription
  misc_feature: MA Experiment 20001451 PARAMETER Experiment Name: At_Far-red-induction_P Parameter: Age (day) Value: 7
  misc_feature: MA Experiment 20001451 PARAMETER Experiment Name: At_Far-red-induction_P Parameter: Light Value: Far-red vs. White
  misc_feature: MA Experiment 20001451 PARAMETER Experiment Name: At_Far-red-induction_P Parameter: Organism Value: A. thaliana
  misc_feature: MA Experiment 20001451 PARAMETER Experiment Name: At_Far-red-induction_P Parameter: Plant Line Value: Columbia
  misc_feature: MA Experiment 20001451 PARAMETER Experiment Name: At_Far-red-induction_P Parameter: Timepoint (hr) Value: 24
  misc_feature: MA Experiment 20001451 PARAMETER Experiment Name: At_Far-red-induction_P Parameter: Tissue Value: Whole Plant
  misc_feature: MA Experiment ID: 20001911 Result: Up-regulated in Transcription
  misc_feature: MA Experiment 20001911 PARAMETER Experiment Name: At_Drought_Reproduction_P Parameter: Age (day) Value: 40
  misc_feature: MA Experiment 20001911 PARAMETER Experiment Name: At_Drought_Reproduction_P Parameter: Organism Value: A. thaliana
  misc_feature: MA Experiment 20001911 PARAMETER Experiment Name: At_Drought_Reproduction_P Parameter: Plant Line Value: WS
  misc_feature: MA Experiment 20001911 PARAMETER Experiment Name: At_Drought_Reproduction_P Parameter: Timepoint (day) Value: 10
  misc_feature: MA Experiment 20001911 PARAMETER Experiment Name: At_Drought_Reproduction_P Parameter: Tissue Value: Flowers
  misc_feature: MA Experiment 20001911 PARAMETER Experiment Name: At_Drought_Reproduction_P Parameter: Treatment Value: Drought vs. No Drought
atggggtcaaagatgtgcatgaacgcttcatgtggtacgacttctactgttgaatggaagaaaggttggcctcttcgatctggtcttctcgctgatctctgttatcgttgcggatctgcgtatgagagttctctattctgtgaacaatttcataaggaccaatctggttggagggaatgctatttgtgtagcaagagactacattgtggatgcattgcttctaaggtaacgattgagttaatggactatggtggtgttggttgtagtacatgtgcttgctgccatcaactcaatttgaacacaaggggtgagaatccaggtgtttttagcagattgccaatgaaaacgttagctgataggcaacatgtaaatggcgaaagcggaggaagaaacgaaggcgatctcttttctcagccactagtcatgggcggagataaaagggaagagttcatgcctcaccgtgggtttggtaagctaatgagtccagaaagtacaaccaccgggcataggctggatgctgctggggaaatgcatgaatcatcacctttacagccatctttaaatatgggtttggctgtgaatccgtttagcccatcttttgcaaccgaggctgtcgagggaatgaaacacatcagtccttctcagtccaacatggtccattgctctgcttctaatatactgcaaaagccatcaagacctgctatttcaactcctcctgtggctagtaaatccgctcaggcgcggattggaaggcctcctgtcgaagggcgagggagaggccacttgcttccgcggtattggccaaaatatacggataaagaggttcagcagatctctggaaatttgaatttgaacattgtacctctctttgagaaaactcttagtgccagtgatgctggtcgcattggtcgtctagttcttccaaaagcctgtgcagaggcatattttcctccgattagtcaatccgaaggcattcctttgaaaatccaagatgtgaggggtagggagtggacgttccagttcagatattggcccaataacaatagtagaatgtatgttttagaaggtgtcactccatgcatacagtccatgatgctacaggctggtgatacagtaactttcagtcgggttgatcctggcggaaaactaatcatgggttccaggaaggcagctaatgctggagacatgcagggttgtgggctcaccaacggaacatcaactgaggacacatcatcgtctggtgtaacagaaaacccaccctccataaatggttcctcgtgtatttcactaataccgaaagagttgaatggtatgcctgagaatttgaacagtgagactaacgggggcaggataggtgatgatcctacacgagttaaagagaagaagagaactcgaaccattggtgcaaaaaataagagacttcttttgcatagtgaagaatctatggagctgagactcacttgggaagaagctcaggacttgcttcgtccctctcctagtgtaaagcctaccatcgttgtcattgaggagcaagaaattgaagaatatgacgaacctcctgtctttggaaagaggactatagtcactacaaaaccttcaggtgaacaggaacgatgggcaacttgcgacgactgctctaaatggagaaggttacctgtagatgctcttctttcctttaaatggacatgtatagacaatgtttgggatgtgagtaggtgttcatgttctgcaccggaggagagtctgaaggaacttgagaatgttcttaaagtaggaagagagcacaagaagagaagaactggggaaagccaggcagcaaaaagtcagcaagaaccgtgtggtttggacgcactggcgagtgcagcagtcttaggagacacaataggcgagccagaggtagcgaccacgaccagacatccaaggcacagggctggatgctcttgcatcgtgtgcattcagccaccaagtgggaaaggtaggcacaagcctacatgtggctgcactgtgtgtagcaccgtgaagagaaggttcaagacgcttatgatgaggaggaagaagaagcagttggagcgcgatgtaacagcagcagaagataagaagaagaaggacatggaactggctgagtctgataagagtaaggaggagaaggaagtgaacacagcgagaatagacctgaacagtgatccatacaataaagaagatgttgaagctgttgcggtggagaaagaagagagtcgaaaaagagcaataggacagtgttcgggcgtggtggctcaagacgccagtgatgttttaggagttacagagttagaaggagagggtaagaatgttcgtgaagagccgagagtttcaagctga

SEQ ID NO: 78347 - protein, 785 aa, Arabidopsis thaliana; identical to SEQ ID NO: 36721
  peptide (1)..(785): Ceres Seq. ID no. 12640801
  misc_feature (289)..(393): Pfam Name: B3 DNA binding domain Pfam Description: B3 DNA binding domain
  misc_feature (391)..(735): Homolog of NCBI NO: 34394741 NR Description: VP1/ABI3 family regulatory protein-like [Oryza
  misc_feature (206)..(426): Homolog of NCBI NO: 34394741 NR Description: VP1/ABI3 family regulatory protein-like [Oryza
  misc_feature (1)..(91): Homolog of NCBI NO: 34394741 NR Description: VP1/ABI3 family regulatory protein-like [Oryza
  misc_feature (164)..(692): Homolog of NCBI NO: 34898718 NR Description: similar to VP1/ABI3 family regulatory protein
  misc_feature (4)..(92): Homolog of NCBI NO: 34898718 NR Description: similar to VP1/ABI3 family regulatory protein
  misc_feature (65)..(531): Homolog of NCBI NO: 15236645 NR Description: similar to putative VP1/ABI3 family regulatory protein id: At4g32010.1 [Arabidopsis thaliana]
  misc_feature (580)..(779): Homolog of NCBI NO: 15236645 NR Description: similar to putative VP1/ABI3 family regulatory protein id: At4g32010.1 [Arabidopsis thaliana]
  misc_feature (65)..(426): Homolog of NCBI NO: 15234504 NR Description: VP1 like protein; protein id: At4g21550.1
  misc_feature (623)..(734): Homolog of NCBI NO: 15234504 NR Description: VP1 like protein; protein id: At4g21550.1
  misc_feature (39)..(92): Homolog of NCBI NO: 15234504 NR Description: VP1 like protein; protein id: At4g21550.1

SEQ ID NO: 78348 - protein, 781 aa, Arabidopsis thaliana; identical to SEQ ID NO: 36722
  peptide (1)..(781): Ceres Seq. ID no. 12640802
  misc_feature (285)..(389): Pfam Name: B3 DNA binding domain Pfam Description: B3 DNA binding domain
  misc_feature (387)..(731): Homolog of NCBI NO: 34394741 NR Description: VP1/ABI3 family regulatory protein-like [Oryza
  misc_feature (202)..(422): Homolog of NCBI NO: 34394741 NR Description: VP1/ABI3 family regulatory protein-like [Oryza
  misc_feature (1)..(87): Homolog of NCBI NO: 34394741 NR Description: VP1/ABI3 family regulatory protein-like [Oryza
  misc_feature (160)..(688): Homolog of NCBI NO: 34898718 NR Description: similar to VP1/ABI3 family regulatory protein
  misc_feature (1)..(88): Homolog of NCBI NO: 34898718 NR Description: similar to VP1/ABI3 family regulatory protein
  misc_feature (61)..(527): Homolog of NCBI NO: 15236645 NR Description: similar to putative VP1/ABI3 family regulatory protein id: At4g32010.1 [Arabidopsis thaliana]
  misc_feature (576)..(775): Homolog of NCBI NO: 15236645 NR Description: similar to putative VP1/ABI3 family regulatory protein id: At4g32010.1 [Arabidopsis thaliana]
  misc_feature (61)..(422): Homolog of NCBI NO: 15234504 NR Description: VP1 like protein; protein id: At4g21550.1
  misc_feature (619)..(730): Homolog of NCBI NO: 15234504 NR Description: VP1 like protein; protein id: At4g21550.1
  misc_feature (35)..(88): Homolog of NCBI NO: 15234504 NR Description: VP1 like protein; protein id: At4g21550.1

SEQ ID NO: 78349 - protein, 779 aa, Arabidopsis thaliana
  peptide (1)..(779): Ceres Seq. ID no. 12640803
  misc_feature (283)..(387): Pfam Name: B3 DNA binding domain Pfam Description: B3 DNA binding domain
  misc_feature (385)..(729): Homolog of NCBI NO: 34394741 NR Description: VP1/ABI3 family regulatory protein-like [Oryza
  misc_feature (200)..(420): Homolog of NCBI NO: 34394741 NR Description: VP1/ABI3 family regulatory protein-like [Oryza
  misc_feature (1)..(85): Homolog of NCBI NO: 34394741 NR Description: VP1/ABI3 family regulatory protein-like [Oryza
  misc_feature (158)..(686): Homolog of NCBI NO: 34898718 NR Description: similar to VP1/ABI3 family regulatory protein
  misc_feature (1)..(86): Homolog of NCBI NO: 34898718 NR Description: similar to VP1/ABI3 family regulatory protein
  misc_feature (59)..(525): Homolog of NCBI NO: 15236645 NR Description: similar to putative VP1/ABI3 family regulatory protein id: At4g32010.1 [Arabidopsis thaliana]
  misc_feature (574)..(773): Homolog of NCBI NO: 15236645 NR Description: similar to putative VP1/ABI3 family regulatory protein id: At4g32010.1 [Arabidopsis thaliana]
  misc_feature (59)..(420): Homolog of NCBI NO: 15234504 NR Description: VP1 like protein; protein id: At4g21550.1
  misc_feature (617)..(728): Homolog of NCBI NO: 15234504 NR Description: VP1 like protein; protein id: At4g21550.1
  misc_feature (33)..(86): Homolog of NCBI NO: 15234504 NR Description: VP1 like protein; protein id: At4g21550.1
MNASCGTTSTVEWKKGWPLRSGLLADLCYRCGSAYESSLFCEQFHKDQSGWRECYLCSKRLHCGCIASKVTIELMDYGGVGCSTCACCHQLNLNTRGENPGVFSRLPMKTLADRQHVNGESGGRNEGDLFSQPLVMGGDKREEFMPHRGFGKLMSPESTTTGHRLDAAGEMHESSPLQPSLNMGLAVNPFSPSFATEAVEGMKHISPSQSNMVHCSASNILQKPSRPAISTPPVASKSAQARIGRPPVEGRGRGHLLPRYWPKYTDKEVQQISGNLNLNIVPLFEKTLSASDAGRIGRLVLPKACAEAYFPPISQSEGIPLKIQDVRGREWTFQFRYWPNNNSRMYVLEGVTPCIQSMMLQAGDTVTFSRVDPGGKLIMGSRKAANAGDMQGCGLTNGTSTEDTSSSGVTENPPSINGSSCISLIPKELNGMPENLNSETNGGRIGDDPTRVKEKKRTRTIGAKNKRLLLHSEESMELRLTWEEAQDLLRPSPSVKPTIVVIEEQEIEEYDEPPVFGKRTIVTTKPSGEQERWATCDDCSKWRRLPVDALLSFKWTCIDNVWDVSRCSCSAPEESLKELENVLKVGREHKKRRTGESQAAKSQQEPCGLDALASAAVLGDTIGEPEVATTTRHPRHRAGCSCIVCIQPPSGKGRHKPTCGCTVCSTVKRRFKTLMMRRKKKQLERDVTAAEDKKKKDMELAESDKSKEEKEVNTARIDLNSDPYNKEDVEAVAVEKEESRKRAIGQCSGVVAQDASDVLGVTELEGEGKNVREEPRVSS

SEQ ID NO: 78350 - DNA, 1137 bp, Arabidopsis thaliana
  misc_feature (1)..(1137): Ceres Seq. ID no. 12640822
  misc_feature: MA Experiment ID: 20000315 Result: Down-regulated in Transcription
  misc_feature: MA Experiment 20000315 PARAMETER Experiment Name: At_14day_Shoots-Roots_Sub_P Parameter: Age (day) Value: 14
  misc_feature: MA Experiment 20000315 PARAMETER Experiment Name: At_14day_Shoots-Roots_Sub_P Parameter: Organism Value: A. thaliana
  misc_feature: MA Experiment 20000315 PARAMETER Experiment Name: At_14day_Shoots-Roots_Sub_P Parameter: Plant Line Value: WS
  misc_feature: MA Experiment 20000315 PARAMETER Experiment Name: At_14day_Shoots-Roots_Sub_P Parameter: Tissue Value: Shoots vs. Whole Plant
atggcatctcaatctcaggttttggtggaagagaaatcaagtgttagaattttgacattaaaccgacccaagcagcttaatgctctgtgcttcaacatgatctctcggttgctgcaactattccgtgcatatgaggaagaccctagtgttaaacttgtcatcctaaagggtcaaggaagagccttttgtgccggtggcgacgttccacctgttgttcaaaacatggtacaaggtaaatggagacttggtgccgatttcttcagagatcaatacacgctcaattatgttatggccacgtatagcaaacctcaggtttcaattttgaatggtattgtcatgggagccggtgctggtgtctccatccatggtcgatttcgcattgcaactgagaacacggtttttgccatgccggagacatctctggggctctttccagatgtaggcgcctcctatttcctgtcacggctccctggattttttggagctaggttagatggcgctgaattgcttgcgtgtggtcttgcaactcattttgttccttcaacgaggttgacagctctagaaacagatctttgcaaagttgggtcaagtgatccaagctttgtctcaacaattcttgatgcatacactcagcatccgcaccttaaacagaagagtgcttaccacaggcaagtgcatatgattttgccaaatatcttttgtcatgccaacatcgcaagctttttagggatcatgttagatgttatcgataggtgcttctcgaagagaacaatggaagaaattatatctgcacttgagagagagaccactcaagaactagatgattggagcttaactacgattcgagctttgaagaagtcttcaccctcaagccttaaaatatctcttagatcgataagagaaggaagattgcaaggggtaggacactgtcttacccgcgagtatagaatggggtgcagagccatattgatagacaaagataggaatccaaagtgggagccaaggcgattggaggacatgaaggatagcatggtagatcagttctttgagagagtggaagaagaggagcgatgggaggatcttaagctttcaccaaggaacaacttgcatgctttaagaattgcagcaaaaaaataa

SEQ ID NO: 78351 - protein, 378 aa, Arabidopsis thaliana
  peptide (1)..(378): Ceres Seq. ID no. 12640823
  misc_feature (16)..(180): Pfam Name: Enoyl-CoA hydratase/isomerase family Pfam Description: Enoyl-CoA hydratase/isomerase family
  misc_feature (1)..(377): Homolog of NCBI NO: 15224549 NR Description: 3-hydroxyisobutyryl-coenzyme A hydrolase; protein
  misc_feature (1)..(375): Homolog of NCBI NO: 15239206 NR Description: 3-hydroxyisobutyryl-coenzyme A hydrolase; protein
  misc_feature (4)..(211): Homolog of NCBI NO: 15224539 NR Description: 3-hydroxyisobutyryl-coenzyme A hydrolase; protein
  misc_feature (246)..(377): Homolog of NCBI NO: 15224539 NR Description: 3-hydroxyisobutyryl-coenzyme A hydrolase; protein
  misc_feature (33)..(375): Homolog of NCBI NO: 6014701 NR Description: enoyl-CoA-hydratase [Avicennia marina]
  misc_feature (2)..(356): Homolog of NCBI NO: 37536724 NR Description: putative enoyl-CoA-hydratase [Oryza sativa
  misc_feature (4)..(363): Homolog of NCBI NO: 22329062 NR Description: enoyl-CoA hydratase - like protein; protein id: supported by cDNA: gi_19424018, supported by cDNA: gi_21281144
  misc_feature (103)..(369): Homolog of NCBI NO: 2688820 NR Description: enoyl-CoA hydratase [Prunus armeniaca]
  misc_feature (6)..(323): Homolog of NCBI NO: 30695218 NR Description: enoyl-CoA hydratase/isomerase family [Arabidopsis
  misc_feature (133)..(369): Homolog of NCBI NO: 11357284 NR Description: enoyl-CoA-hydratase-like protein - Arabidopsis
MASQSQVLVEEKSSVRILTLNRPKQLNALCFNMISRLLQLFRAYEEDPSVKLVILKGQGRAFCAGGDVPPVVQNMVQGKWRLGADFFRDQYTLNYVMATYSKPQVSILNGIVMGAGAGVSIHGRFRIATENTVFAMPETSLGLFPDVGASYFLSRLPGFFGARLDGAELLACGLATHFVPSTRLTALETDLCKVGSSDPSFVSTILDAYTQHPHLKQKSAYHRQVHMILPNIFCHANIASFLGIMLDVIDRCFSKRTMEEIISALERETTQELDDWSLTTIRALKKSSPSSLKISLRSIREGRLQGVGHCLTREYRMGCRAILIDKDRNPKWEPRRLEDMKDSMVDQFFERVEEEERWEDLKLSPRNNLHALRIAAKK

SEQ ID NO: 78352 - protein, 346 aa, Arabidopsis thaliana
  peptide (1)..(346): Ceres Seq. ID no. 12640824
  misc_feature (1)..(148): Pfam Name: Enoyl-CoA hydratase/isomerase family Pfam Description: Enoyl-CoA hydratase/isomerase family
  misc_feature (1)..(345): Homolog of NCBI NO: 15224549 NR Description: 3-hydroxyisobutyryl-coenzyme A hydrolase; protein
  misc_feature (1)..(343): Homolog of NCBI NO: 15239206 NR Description: 3-hydroxyisobutyryl-coenzyme A hydrolase; protein
  misc_feature (1)..(179): Homolog of NCBI NO: 15224539 NR Description: 3-hydroxyisobutyryl-coenzyme A hydrolase; protein
  misc_feature (214)..(345): Homolog of NCBI NO: 15224539 NR Description: 3-hydroxyisobutyryl-coenzyme A hydrolase; protein
  misc_feature (1)..(343): Homolog of NCBI NO: 6014701 NR Description: enoyl-CoA-hydratase [Avicennia marina]
  misc_feature (1)..(324): Homolog of NCBI NO: 37536724 NR Description: putative enoyl-CoA-hydratase [Oryza sativa
  misc_feature (1)..(331): Homolog of NCBI NO: 22329062 NR Description: enoyl-CoA hydratase - like protein; protein id: supported by cDNA: gi_19424018, supported by cDNA: gi_21281144
  misc_feature (71)..(337): Homolog of NCBI NO: 2688820 NR Description: enoyl-CoA hydratase [Prunus armeniaca]
  misc_feature (1)..(291): Homolog of NCBI NO: 30695218 NR Description: enoyl-CoA hydratase/isomerase family [Arabidopsis
  misc_feature (101)..(337): Homolog of NCBI NO: 11357284 NR Description: enoyl-CoA-hydratase-like protein - Arabidopsis
MISRLLQLFRAYEEDPSVKLVILKGQGRAFCAGGDVPPVVQNMVQGKWRLGADFFRDQYTLNYVMATYSKPQVSILNGIVMGAGAGVSIHGRFRIATENTVFAMPETSLGLFPDVGASYFLSRLPGFFGARLDGAELLACGLATHFVPSTRLTALETDLCKVGSSDPSFVSTILDAYTQHPHLKQKSAYHRQVHMILPNIFCHANIASFLGIMLDVIDRCFSKRTMEEIISALERETTQELDDWSLTTIRALKKSSPSSLKISLRSIREGRLQGVGHCLTREYRMGCRAILIDKDRNPKWEPRRLEDMKDSMVDQFFERVEEEERWEDLKLSPRNNLHALRIAAKK

SEQ ID NO: 78353 - protein, 304 aa, Arabidopsis thaliana
  peptide (1)..(304): Ceres Seq. ID no. 12640825
  misc_feature (1)..(106): Pfam Name: Enoyl-CoA hydratase/isomerase family Pfam Description: Enoyl-CoA hydratase/isomerase family
  misc_feature (1)..(303): Homolog of NCBI NO: 15224549 NR Description: 3-hydroxyisobutyryl-coenzyme A hydrolase; protein
  misc_feature (1)..(301): Homolog of NCBI NO: 15239206 NR Description: 3-hydroxyisobutyryl-coenzyme A hydrolase; protein
  misc_feature (1)..(137): Homolog of NCBI NO: 15224539 NR Description: 3-hydroxyisobutyryl-coenzyme A hydrolase; protein
  misc_feature (172)..(303): Homolog of NCBI NO: 15224539 NR Description: 3-hydroxyisobutyryl-coenzyme A hydrolase; protein
  misc_feature (1)..(301): Homolog of NCBI NO: 6014701 NR Description: enoyl-CoA-hydratase [Avicennia marina]
  misc_feature (1)..(282): Homolog of NCBI NO: 37536724 NR Description: putative enoyl-CoA-hydratase [Oryza sativa
  misc_feature (1)..(289): Homolog of NCBI NO: 22329062 NR Description: enoyl-CoA hydratase - like protein; protein id: supported by cDNA: gi_19424018, supported by cDNA: gi_21281144
  misc_feature (29)..(295): Homolog of NCBI NO: 2688820 NR Description: enoyl-CoA hydratase [Prunus armeniaca]
  misc_feature (1)..(249): Homolog of NCBI NO: 30695218 NR Description: enoyl-CoA hydratase/isomerase family [Arabidopsis
  misc_feature (59)..(295): Homolog of NCBI NO: 11357284 NR Description: enoyl-CoA-hydratase-like protein - Arabidopsis
MVQGKWRLGADFFRDQYTLNYVMATYSKPQVSILNGIVMGAGAGVSIHGRFRIATENTVFAMPETSLGLFPDVGASYFLSRLPGFFGARLDGAELLACGLATHFVPSTRLTALETDLCKVGSSDPSFVSTILDAYTQHPHLKQKSAYHRQVHMILPNIFCHANIASFLGIMLDVIDRCFSKRTMEEIISALERETTQELDDWSLTTIRALKKSSPSSLKISLRSIREGRLQGVGHCLTREYRMGCRAILIDKDRNPKWEPRRLEDMKDSMVDQFFERVEEEERWEDLKLSPRNNLHALRIAAKK

SEQ ID NO: 78354 - DNA, 1230 bp, Arabidopsis thaliana
  misc_feature (1)..(1230): Ceres Seq. ID no. 12640832
  misc_feature: MA Experiment ID: 20000496 Result: Down-regulated in Transcription
  misc_feature: MA Experiment 20000496 PARAMETER Experiment Name: At_Guard_Cells_P Parameter: Harvest Date Value: 7/19/2002
  misc_feature: MA Experiment 20000496 PARAMETER Experiment Name: At_Guard_Cells_P Parameter: Organism Value: Canola
  misc_feature: MA Experiment 20000496 PARAMETER Experiment Name: At_Guard_Cells_P Parameter: Tissue Value: Guard Cells vs. Leaves
atgagcgtcatgttcatcctcatcgatctgaagttggacggtggaggacggccacaagataagaaaatggtcagaaaattagagttgaaatatttgagcttatactctttctttcaacattttctaccttcttgtcaaagaaagagagacacaatggcgggcaactatgatcgtgctggtgaggtaaaagcattcgaccagatgaagatcggcgtgaagggtcttgtcgacgccggaatcacaaaagttcctcgcattttccatcaccaagatgtggccgttacaaaccctaaaccttcctcaacgttagaaattccaacaatcgatgttggaggtggcgtgttcgagtccacggtcacgcgaaagagcgtgatcgcgaaagtgagagctgcggttgagaagttcgggttctttcaggtgattaaccatgggattccactcgaggtgatggagagtatgaaagatgggattcgtgggtttcatgagcaggactcagaagttaagaaaacgttctatagtcgtgacatcactaaaaaggttaagtataacactaatttcgatctctatagctctcaagctgcgaattggagagatactttaactatggttatggctcctgatgttccacaagcaggggacttacccgtgatttgtcgagaaatcatgttggagtactccaagcgaatgatgaagttaggggagctaatctttgagcttttatcagaagctcttggtttaaaacctaaccaccttaaagagctaaattgcgcaaagagtttgtcgttgctctcccattactacccgccttgtccagagcctgaccgaacctttggtatcagttcacatacagatatctcttttatcactattcttcttcaagaccacattggaggacttcaagttctccatgatggttactggatcgatgttcctcctaatcccgaagctctaatcgttaaccttggagatcttttacagcttataacaaacgataagtttgtaagtgtggagcacagggttttggcaaatagaggcgaagaacctcgcatttcaagcgcatctttcttcatgcacaccataccaaatgagcaagtatatggacctatgaaagagcttctatctaaacaaaaccctcccaagtacagaaacacaaccacgaccgagatggcgaggcattacttggctagaggactcgatgggacctcaccgttgctccatttcaggatctga

SEQ ID NO: 78355 - protein, 409 aa, Arabidopsis thaliana
  peptide (1)..(409): Ceres Seq. ID no. 12640833
  misc_feature (258)..(358): Pfam Name: 2OG-Fe(II) oxygenase superfamily Pfam Description: 2OG-Fe(II) oxygenase superfamily
  misc_feature (52)..(409): Homolog of NCBI NO: 15224575 NR Description: putative dioxygenase; protein id: At2g30830.1
  misc_feature (52)..(409): Homolog of NCBI NO: 15224576 NR Description: putative dioxygenase; protein id: At2g30840.1
  misc_feature (52)..(409): Homolog of NCBI NO: 15224730 NR Description: putative dioxygenase; protein id: At2g25450.1, by cDNA: gi_15292706, supported by cDNA: gi_21280916 [Arabidopsis >gi|25285700|pir||E84648 probable dioxygenase [imported] putative
  misc_feature (57)..(409): Homolog of NCBI NO: 30679748 NR Description: 2-oxoglutarate-dependent dioxygenase, putative thaliana] >gi|30102640|gb|AAP21238.1| At1g06620 [Arabidopsis
  misc_feature (52)..(409): Homolog of NCBI NO: 15221544 NR Description: oxidoreductase, putative; protein id: supported by cDNA: gi_13430545 [Arabidopsis thaliana] putative oxidoreductase [Arabidopsis thaliana]
  misc_feature (56)..(409): Homolog of NCBI NO: 13878119 NR Description: putative oxidoreductase [Arabidopsis thaliana]
  misc_feature (56)..(409): Homolog of NCBI NO: 15221545 NR Description: oxidoreductase, putative; protein id: supported by cDNA: gi_13878118 [Arabidopsis thaliana]
  misc_feature (52)..(334): Homolog of NCBI NO: 25406927 NR Description: protein F12K11.6 [imported] - Arabidopsis >gi|6692693|gb|AAF24827.1|AC007592_20 F12K11.6 [Arabidopsis
  misc_feature (324)..(409): Homolog of NCBI NO: 25406927 NR Description: protein F12K11.6 [imported] - Arabidopsis >gi|6692693|gb|AAF24827.1|AC007592_20 F12K11.6 [Arabidopsis
  misc_feature (56)..(338): Homolog of NCBI NO: 25406927 NR Description: protein F12K11.6 [imported] - Arabidopsis >gi|6692693|gb|AAF24827.1|AC007592_20 F12K11.6 [Arabidopsis
MSVMFILIDLKLDGGGRPQDKKMVRKLELKYLSLYSFFQHFLPSCQRKRDTMAGNYDRAGEVKAFDQMKIGVKGLVDAGITKVPRIFHHQDVAVTNPKPSSTLEIPTIDVGGGVFESTVTRKSVIAKVRAAVEKFGFFQVINHGIPLEVMESMKDGIRGFHEQDSEVKKTFYSRDITKKVKYNTNFDLYSSQAANWRDTLTMVMAPDVPQAGDLPVICREIMLEYSKRMMKLGELIFELLSEALGLKPNHLKELNCAKSLSLLSHYYPPCPEPDRTFGISSHTDISFITILLQDHIGGLQVLHDGYWIDVPPNPEALIVNLGDLLQLITNDKFVSVEHRVLANRGEEPRISSASFFMHTIPNEQVYGPMKELLSKQNPPKYRNTTTTEMARHYLARGLDGTSPLLHFRI

SEQ ID NO: 78356 - protein, 406 aa, Arabidopsis thaliana
  peptide (1)..(406): Ceres Seq. ID no. 12640834
  misc_feature (255)..(355): Pfam Name: 2OG-Fe(II) oxygenase superfamily Pfam Description: 2OG-Fe(II) oxygenase superfamily
  misc_feature (49)..(406): Homolog of NCBI NO: 15224575 NR Description: putative dioxygenase; protein id: At2g30830.1
  misc_feature (49)..(406): Homolog of NCBI NO: 15224576 NR Description: putative dioxygenase; protein id: At2g30840.1
  misc_feature (49)..(406): Homolog of NCBI NO: 15224730 NR Description: putative dioxygenase; protein id: At2g25450.1, by cDNA: gi_15292706, supported by cDNA: gi_21280916 [Arabidopsis >gi|25285700|pir||E84648 probable dioxygenase [imported] putative
  misc_feature (54)..(406): Homolog of NCBI NO: 30679748 NR Description: 2-oxoglutarate-dependent dioxygenase, putative thaliana] >gi|30102640|gb|AAP21238.1| At1g06620 [Arabidopsis
  misc_feature (49)..(406): Homolog of NCBI NO: 15221544 NR Description: oxidoreductase, putative; protein id: supported by cDNA: gi_13430545 [Arabidopsis thaliana] putative oxidoreductase [Arabidopsis thaliana]
  misc_feature (53)..(406): Homolog of NCBI NO: 13878119 NR Description: putative oxidoreductase [Arabidopsis thaliana]
  misc_feature (53)..(406): Homolog of NCBI NO: 15221545 NR Description: oxidoreductase, putative; protein id: supported by cDNA: gi_13878118 [Arabidopsis thaliana]
  misc_feature (49)..(331): Homolog of NCBI NO: 25406927 NR Description: protein F12K11.6 [imported] - Arabidopsis >gi|6692693|gb|AAF24827.1|AC007592_20 F12K11.6 [Arabidopsis
  misc_feature (321)..(406): Homolog of NCBI NO: 25406927 NR Description: protein F12K11.6 [imported] - Arabidopsis >gi|6692693|gb|AAF24827.1|AC007592_20 F12K11.6 [Arabidopsis
  misc_feature (53)..(335): Homolog of NCBI NO: 25406927 NR Description: protein F12K11.6 [imported] - Arabidopsis >gi|6692693|gb|AAF24827.1|AC007592_20 F12K11.6 [Arabidopsis
MFILIDLKLDGGGRPQDKKMVRKLELKYLSLYSFFQHFLPSCQRKRDTMAGNYDRAGEVKAFDQMKIGVKGLVDAGITKVPRIFHHQDVAVTNPKPSSTLEIPTIDVGGGVFESTVTRKSVIAKVRAAVEKFGFFQVINHGIPLEVMESMKDGIRGFHEQDSEVKKTFYSRDITKKVKYNTNFDLYSSQAANWRDTLTMVMAPDVPQAGDLPVICREIMLEYSKRMMKLGELIFELLSEALGLKPNHLKELNCAKSLSLLSHYYPPCPEPDRTFGISSHTDISFITILLQDHIGGLQVLHDGYWIDVPPNPEALIVNLGDLLQLITNDKFVSVEHRVLANRGEEPRISSASFFMHTIPNEQVYGPMKELLSKQNPPKYRNTTTTEMARHYLARGLDGTSPLLHFRI

SEQ ID NO: 78357 - protein, 387 aa, Arabidopsis thaliana
  peptide (1)..(387): Ceres Seq. ID no. 12640835
  misc_feature (236)..(336): Pfam Name: 2OG-Fe(II) oxygenase superfamily Pfam Description: 2OG-Fe(II) oxygenase superfamily
  misc_feature (30)..(387): Homolog of NCBI NO: 15224575 NR Description: putative dioxygenase; protein id: At2g30830.1
  misc_feature (30)..(387): Homolog of NCBI NO: 15224576 NR Description: putative dioxygenase; protein id: At2g30840.1
  misc_feature (30)..(387): Homolog of NCBI NO: 15224730 NR Description: putative dioxygenase; protein id: At2g25450.1, by cDNA: gi_15292706, supported by cDNA: gi_21280916 [Arabidopsis >gi|25285700|pir||E84648 probable dioxygenase [imported] putative
  misc_feature (35)..(387): Homolog of NCBI NO: 30679748 NR Description: 2-oxoglutarate-dependent dioxygenase, putative thaliana] >gi|30102640|gb|AAP21238.1| At1g06620 [Arabidopsis
  misc_feature (30)..(387): Homolog of NCBI NO: 15221544 NR Description: oxidoreductase, putative; protein id: supported by cDNA: gi_13430545 [Arabidopsis thaliana] putative oxidoreductase [Arabidopsis thaliana]
  misc_feature (34)..(387): Homolog of NCBI NO: 13878119 NR Description: putative oxidoreductase [Arabidopsis thaliana]
  misc_feature (34)..(387): Homolog of NCBI NO: 15221545 NR Description: oxidoreductase, putative; protein id: supported by cDNA: gi_13878118 [Arabidopsis thaliana]
  misc_feature (30)..(312): Homolog of NCBI NO: 25406927 NR Description: protein F12K11.6 [imported] - Arabidopsis >gi|6692693|gb|AAF24827.1|AC007592_20 F12K11.6 [Arabidopsis
  misc_feature (302)..(387): Homolog of NCBI NO: 25406927 NR Description: protein F12K11.6 [imported] - Arabidopsis >gi|6692693|gb|AAF24827.1|AC007592_20 F12K11.6 [Arabidopsis
  misc_feature (34)..(316): Homolog of NCBI NO: 25406927 NR Description: protein F12K11.6 [imported] - Arabidopsis >gi|6692693|gb|AAF24827.1|AC007592_20 F12K11.6 [Arabidopsis
MVRKLELKYLSLYSFFQHFLPSCQRKRDTMAGNYDRAGEVKAFDQMKIGVKGLVDAGITKVPRIFHHQDVAVTNPKPSSTLEIPTIDVGGGVFESTVTRKSVIAKVRAAVEKFGFFQVINHGIPLEVMESMKDGIRGFHEQDSEVKKTFYSRDITKKVKYNTNFDLYSSQAANWRDTLTMVMAPDVPQAGDLPVICREIMLEYSKRMMKLGELIFELLSEALGLKPNHLKELNCAKSLSLLSHYYPPCPEPDRTFGISSHTDISFITILLQDHIGGLQVLHDGYWIDVPPNPEALIVNLGDLLQLITNDKFVSVEHRVLANRGEEPRISSASFFMHTIPNEQVYGPMKELLSKQNPPKYRNTTTTEMARHYLARGLDGTSPLLHFRI

SEQ ID NO: 78358 - DNA, 1119 bp, Arabidopsis thaliana
  misc_feature (1)..(1119): Ceres Seq. ID no. 12640836
  misc_feature: MA Experiment ID: 20000185 Result: Up-regulated in Transcription
  misc_feature: MA Experiment 20000185 PARAMETER Experiment Name: At_Roots__P Parameter: Age (day) Value: 7 vs. 21
  misc_feature: MA Experiment 20000185 PARAMETER Experiment Name: At_Roots__P Parameter: Organism Value: A. thaliana
  misc_feature: MA Experiment 20000185 PARAMETER Experiment Name: At_Roots__P Parameter: Tissue Value: Roots vs. Whole Plant
  misc_feature: MA Experiment ID: 20000227 Result: Down-regulated in Transcription
  misc_feature: MA Experiment 20000227 PARAMETER Experiment Name: At_Root-Tips-vs-Tops_P Parameter: Tissue Value: Root Tips vs. Root Tops
  misc_feature: MA Experiment ID: 20000439 Result: Up-regulated in Transcription
  misc_feature: MA Experiment 20000439 PARAMETER Experiment Name: At_Roots__P Parameter: Age (day) Value: 14 vs. 21
  misc_feature: MA Experiment 20000439 PARAMETER Experiment Name: At_Roots__P Parameter: Organism Value: A. thaliana
  misc_feature: MA Experiment 20000439 PARAMETER Experiment Name: At_Roots__P Parameter: Tissue Value: Roots vs. Whole Plant
  misc_feature: MA Experiment ID: 20000496 Result: Down-regulated in Transcription
  misc_feature: MA Experiment 20000496 PARAMETER Experiment Name: At_Guard_Cells_P Parameter: Harvest Date Value: 7/19/2002
  misc_feature: MA Experiment 20000496 PARAMETER Experiment Name: At_Guard_Cells_P Parameter: Organism Value: Canola
  misc_feature: MA Experiment 20000496 PARAMETER Experiment Name: At_Guard_Cells_P Parameter: Tissue Value: Guard Cells vs. Leaves
  misc_feature: MA Experiment ID: 20001905 Result: Down-regulated in Transcription
  misc_feature: MA Experiment 20001905 PARAMETER Experiment Name: At_Drought_Reproduction_P Parameter: Age (day) Value: 40
  misc_feature: MA Experiment 20001905 PARAMETER Experiment Name: At_Drought_Reproduction_P Parameter: Organism Value: A. thaliana
  misc_feature: MA Experiment 20001905 PARAMETER Experiment Name: At_Drought_Reproduction_P Parameter: Plant Line Value: WS
  misc_feature: MA Experiment 20001905 PARAMETER Experiment Name: At_Drought_Reproduction_P Parameter: Timepoint (day) Value: 10
  misc_feature: MA Experiment 20001905 PARAMETER Experiment Name: At_Drought_Reproduction_P Parameter: Tissue Value: Rosettes
  misc_feature: MA Experiment 20001905 PARAMETER Experiment Name: At_Drought_Reproduction_P Parameter: Treatment Value: Drought vs. No Drought
atggaagcaacatacgatcgtgctagtgaggtaaaagcttttgacgagttgaagatcggcgtaaaaggtctcctagacgccggagttactcagatcccacgtatcttccatcatccacatcttaatttaaccgactcaaatctacttctttcctctacaacgatggttataccaacaatcgatcttaaaggaggcgtgttcgacgagtacacagtcacgcgagagagcgtcatcgcgatgatcagagacgcggttgagagattcgggtttttccaggtgattaaccatgggattagtaatgatgttatggagaagatgaaagatgggattcgtgggtttcatgagcaagactcagacgttaggaaaaagttttatactcgtgacgtcaccaaaacagttaagtataacagtaattttgatctttatagctctccttcagcgaactggagagataccttgagttgctttatggctcctgatgttccagaaacagaggacttaccagatatttgtggggaaatcatgttggaatatgcgaaacgagtgatgaaactaggggaactaatctttgagcttttatcagaagctttagggctgaatcctaaccacttgaaagaaatggattgcacaaaaggtttattgatgctttctcattactacccgccttgtcctgagcctggtttaacttttggcacaagtccgcattcagacagatcttttctcactattcttcttcaagatcacattggtgggcttcaagttcgtcagaatggttattgggttgatgttcctcctgttccgggagctcttctcgttaacctcggagatcttttacaggcaagttgttattgtgacatgatacaaactcttatgaccaatgatcagtttgtgagcgtagagcatagagttctggctaataaaggtgaaaagccgcggatctcagtagcatctttctttgtgcatcctttaccgagtttacgagtttatggaccgataaaagaacttttgtctgagcaaaaccttcccaagtatagagacactaccgtcactgagtacacgagtcattacatggcaagaggactttatggaaattctgtgttgcttgatttcaagatctga

SEQ ID NO: 78359 - protein, 372 aa, Arabidopsis thaliana
  peptide (1)..(372): Ceres Seq. ID no. 12640837
  misc_feature (211)..(321): Pfam Name: 2OG-Fe(II) oxygenase superfamily Pfam Description: 2OG-Fe(II) oxygenase superfamily
  misc_feature (1)..(372): Homolog of NCBI NO: 15224576 NR Description: putative dioxygenase; protein id: At2g30840.1
  misc_feature (1)..(372): Homolog of NCBI NO: 15224575 NR Description: putative dioxygenase; protein id: At2g30830.1
  misc_feature (1)..(372): Homolog of NCBI NO: 15224730 NR Description: putative dioxygenase; protein id: At2g25450.1, by cDNA: gi_15292706, supported by cDNA: gi_21280916 [Arabidopsis >gi|25285700|pir||E84648 probable dioxygenase [imported] putative
  misc_feature (3)..(372): Homolog of NCBI NO: 30679748 NR Description: 2-oxoglutarate-dependent dioxygenase, putative thaliana] >gi|30102640|gb|AAP21238.1| At1g06620 [Arabidopsis
  misc_feature (1)..(372): Homolog of NCBI NO: 13878119 NR Description: putative oxidoreductase [Arabidopsis thaliana]
  misc_feature (1)..(372): Homolog of NCBI NO: 15221545 NR Description: oxidoreductase, putative; protein id: supported by cDNA: gi_13878118 [Arabidopsis thaliana]
  misc_feature (1)..(290): Homolog of NCBI NO: 25406927 NR Description: protein F12K11.6 [imported] - Arabidopsis >gi|6692693|gb|AAF24827.1|AC007592_20 F12K11.6 [Arabidopsis
  misc_feature (286)..(372): Homolog of NCBI NO: 25406927 NR Description: protein F12K11.6 [imported] - Arabidopsis >gi|6692693|gb|AAF24827.1|AC007592_20 F12K11.6 [Arabidopsis
  misc_feature (4)..(372): Homolog of NCBI NO: 15221544 NR Description: oxidoreductase, putative; protein id: supported by cDNA: gi_13430545 [Arabidopsis thaliana] putative oxidoreductase [Arabidopsis thaliana]
  misc_feature (4)..(281): Homolog of NCBI NO: 25406927 NR Description: protein F12K11.6 [imported] - Arabidopsis >gi|6692693|gb|AAF24827.1|AC007592_20 F12K11.6 [Arabidopsis
MEATYDRASEVKAFDELKIGVKGLLDAGVTQIPRIFHHPHLNLTDSNLLLSSTTMVIPTIDLKGGVFDEYTVTRESVIAMIRDAVERFGFFQVINHGISNDVMEKMKDGIRGFHEQDSDVRKKFYTRDVTKTVKYNSNFDLYSSPSANWRDTLSCFMAPDVPETEDLPDICGEIMLEYAKRVMKLGELIFELLSEALGLNPNHLKEMDCTKGLLMLSHYYPPCPEPGLTFGTSPHSDRSFLTILLQDHIGGLQVRQNGYWVDVPPVPGALLVNLGDLLQASCYCDMIQTLMTNDQFVSVEHRVLANKGEKPRISVASFFVHPLPSLRVYGPIKELLSEQNLPKYRDTTVTEYTSHYMARGLYGNSVLLDFKI

SEQ ID NO: 78360 - protein, 318 aa, Arabidopsis thaliana
  peptide (1)..(318): Ceres Seq. ID no. 12640838
  misc_feature (157)..(267): Pfam Name: 2OG-Fe(II) oxygenase superfamily Pfam Description: 2OG-Fe(II) oxygenase superfamily
  misc_feature (1)..(318): Homolog of NCBI NO: 15224576 NR Description: putative dioxygenase; protein id: At2g30840.1
  misc_feature (1)..(318): Homolog of NCBI NO: 15224575 NR Description: putative dioxygenase; protein id: At2g30830.1
  misc_feature (1)..(318): Homolog of NCBI NO: 15224730 NR Description: putative dioxygenase; protein id: At2g25450.1, by cDNA: gi_15292706, supported by cDNA: gi_21280916 [Arabidopsis >gi|25285700|pir||E84648 probable dioxygenase [imported] putative
  misc_feature (1)..(318): Homolog of NCBI NO: 30679748 NR Description: 2-oxoglutarate-dependent dioxygenase, putative thaliana] >gi|30102640|gb|AAP21238.1| At1g06620 [Arabidopsis
  misc_feature (1)..(318): Homolog of NCBI NO: 13878119 NR Description: putative oxidoreductase [Arabidopsis thaliana]
  misc_feature (1)..(318): Homolog of NCBI NO: 15221545 NR Description: oxidoreductase, putative; protein id: supported by cDNA: gi_13878118 [Arabidopsis thaliana]
  misc_feature (1)..(236): Homolog of NCBI NO: 25406927 NR Description: protein F12K11.6 [imported] - Arabidopsis >gi|6692693|gb|AAF24827.1|AC007592_20 F12K11.6 [Arabidopsis
  misc_feature (232)..(318): Homolog of NCBI NO: 25406927 NR Description: protein F12K11.6 [imported] - Arabidopsis >gi|6692693|gb|AAF24827.1|AC007592_20 F12K11.6 [Arabidopsis
  misc_feature (1)..(318): Homolog of NCBI NO: 15221544 NR Description: oxidoreductase, putative; protein id: supported by cDNA: gi_13430545 [Arabidopsis thaliana] putative oxidoreductase [Arabidopsis thaliana]
  misc_feature (1)..(227): Homolog of NCBI NO: 25406927 NR Description: protein F12K11.6 [imported] - Arabidopsis >gi|6692693|gb|AAF24827.1|AC007592_20 F12K11.6 [Arabidopsis
MVIPTIDLKGGVFDEYTVTRESVIAMIRDAVERFGFFQVINHGISNDVMEKMKDGIRGFHEQDSDVRKKFYTRDVTKTVKYNSNFDLYSSPSANWRDTLSCFMAPDVPETEDLPDICGEIMLEYAKRVMKLGELIFELLSEALGLNPNHLKEMDCTKGLLMLSHYYPPCPEPGLTFGTSPHSDRSFLTILLQDHIGGLQVRQNGYWVDVPPVPGALLVNLGDLLQASCYCDMIQTLMTNDQFVSVEHRVLANKGEKPRISVASFFVHPLPSLRVYGPIKELLSEQNLPKYRDTTVTEYTSHYMARGLYGNSVLLDFKI

SEQ ID NO: 78361 - protein, 293 aa, Arabidopsis thaliana
  peptide (1)..(293): Ceres Seq. ID no. 12640839
  misc_feature (132)..(242): Pfam Name: 2OG-Fe(II) oxygenase superfamily Pfam Description: 2OG-Fe(II) oxygenase superfamily
  misc_feature (1)..(293): Homolog of NCBI NO: 15224576 NR Description: putative dioxygenase; protein id: At2g30840.1
  misc_feature (1)..(293): Homolog of NCBI NO: 15224575 NR Description: putative dioxygenase; protein id: At2g30830.1
  misc_feature (1)..(293): Homolog of NCBI NO: 15224730 NR Description: putative dioxygenase; protein id: At2g25450.1, by cDNA: gi_15292706, supported by cDNA: gi_21280916 [Arabidopsis >gi|25285700|pir||E84648 probable dioxygenase [imported] putative
  misc_feature (1)..(293): Homolog of NCBI NO: 30679748 NR Description: 2-oxoglutarate-dependent dioxygenase, putative thaliana] >gi|30102640|gb|AAP21238.1| At1g06620 [Arabidopsis
  misc_feature (1)..(293): Homolog of NCBI NO: 13878119 NR Description: putative oxidoreductase [Arabidopsis thaliana]
  misc_feature (1)..(293): Homolog of NCBI NO: 15221545 NR Description: oxidoreductase, putative; protein id: supported by cDNA: gi_13878118 [Arabidopsis thaliana]
  misc_feature (1)..(211): Homolog of NCBI NO: 25406927 NR Description: protein F12K11.6 [imported] - Arabidopsis >gi|6692693|gb|AAF24827.1|AC007592_20 F12K11.6 [Arabidopsis
  misc_feature (207)..(293): Homolog of NCBI NO: 25406927 NR Description: protein F12K11.6 [imported] - Arabidopsis >gi|6692693|gb|AAF24827.1|AC007592_20 F12K11.6 [Arabidopsis
  misc_feature (1)..(293): Homolog of NCBI NO: 15221544 NR Description: oxidoreductase, putative; protein id: supported by cDNA: gi_13430545 [Arabidopsis thaliana] putative oxidoreductase [Arabidopsis thaliana]
  misc_feature (1)..(202): Homolog of NCBI NO: 25406927 NR Description: protein F12K11.6 [imported] - Arabidopsis >gi|6692693|gb|AAF24827.1|AC007592_20 F12K11.6 [Arabidopsis
MIRDAVERFGFFQVINHGISNDVMEKMKDGIRGFHEQDSDVRKKFYTRDVTKTVKYNSNFDLYSSPSANWRDTLSCFMAPDVPETEDLPDICGEIMLEYAKRVMKLGELIFELLSEALGLNPNHLKEMDCTKGLLMLSHYYPPCPEPGLTFGTSPHSDRSFLTILLQDHIGGLQVRQNGYWVDVPPVPGALLVNLGDLLQASCYCDMIQTLMTNDQFVSVEHRVLANKGEKPRISVASFFVHPLPSLRVYGPIKELLSEQNLPKYRDTTVTEYTSHYMARGLYGNSVLLDFKI

SEQ ID NO: 78362 - DNA, 2328 bp, Arabidopsis thaliana
  misc_feature (1)..(2328): Ceres Seq. ID no. 12640858
  misc_feature: MA Experiment ID: 20000171 Result: Down-regulated in Transcription
  misc_feature: MA Experiment 20000171 PARAMETER Experiment Name: At_42deg_Heat_P Parameter: Age (day) Value: 14
  misc_feature: MA Experiment 20000171 PARAMETER Experiment Name: At_42deg_Heat_P Parameter: Organism Value: A. thaliana
  misc_feature: MA Experiment 20000171 PARAMETER Experiment Name: At_42deg_Heat_P Parameter: Plant Line Value: WS
  misc_feature: MA Experiment 20000171 PARAMETER Experiment Name: At_42deg_Heat_P Parameter: Temperature (deg C) Value: 42 vs. 22
  misc_feature: MA Experiment 20000171 PARAMETER Experiment Name: At_42deg_Heat_P Parameter: Timepoint (hr) Value: 1
  misc_feature: MA Experiment 20000171 PARAMETER Experiment Name: At_42deg_Heat_P Parameter: Tissue Value: Aerial
  misc_feature: MA Experiment ID: 20000173 Result: Down-regulated in Transcription
  misc_feature: MA Experiment 20000173 PARAMETER Experiment Name: At_42deg_Heat_P Parameter: Age (day) Value: 14
  misc_feature: MA Experiment 20000173 PARAMETER Experiment Name: At_42deg_Heat_P Parameter: Organism Value: A. thaliana
  misc_feature: MA Experiment 20000173 PARAMETER Experiment Name: At_42deg_Heat_P Parameter: Plant Line Value: WS
  misc_feature: MA Experiment 20000173 PARAMETER Experiment Name: At_42deg_Heat_P Parameter: Temperature (deg C) Value: 42 vs. 22
  misc_feature: MA Experiment 20000173 PARAMETER Experiment Name: At_42deg_Heat_P Parameter: Timepoint (hr) Value: 6
  misc_feature: MA Experiment 20000173 PARAMETER Experiment Name: At_42deg_Heat_P Parameter: Tissue Value: Aerial
  misc_feature: MA Experiment ID: 20000438 Result: Down-regulated in Transcription
  misc_feature: MA Experiment 20000438 PARAMETER Experiment Name: At_Shoots__P Parameter: Age (day) Value: 14
  misc_feature: MA Experiment 20000438 PARAMETER Experiment Name: At_Shoots__P Parameter: Tissue Value: Shoots vs. Whole Plant
  misc_feature: MA Experiment ID: 20000573 Result: Up-regulated in Transcription
  misc_feature: MA Experiment 20000573 PARAMETER Experiment Name: At_100uM_ABA_Mutants__P Parameter: Organism Value: A. thaliana
  misc_feature: MA Experiment 20000573 PARAMETER Experiment Name: At_100uM_ABA_Mutants__P Parameter: Plant Line Value: CS22 vs. Ler wt
  misc_feature: MA Experiment 20000573 PARAMETER Experiment Name: At_100uM_ABA_Mutants__P Parameter: Timepoint (hr) Value: N/A
  misc_feature: MA Experiment 20000573 PARAMETER Experiment Name: At_100uM_ABA_Mutants__P Parameter: Tissue Value: Whole Plant
  misc_feature: MA Experiment 20000573 PARAMETER Experiment Name: At_100uM_ABA_Mutants__P Parameter: Treatment Value: None
  misc_feature: MA Experiment ID: 20000574 Result: Up-regulated in Transcription
  misc_feature: MA Experiment 20000574 PARAMETER Experiment Name: At_100uM_ABA_Mutants__P Parameter: Organism Value: A. thaliana
  misc_feature: MA Experiment 20000574 PARAMETER Experiment Name: At_100uM_ABA_Mutants__P Parameter: Plant Line Value: CS23 vs. Ler wt
  misc_feature: MA Experiment 20000574 PARAMETER Experiment Name: At_100uM_ABA_Mutants__P Parameter: Timepoint (hr) Value: N/A
  misc_feature: MA Experiment 20000574 PARAMETER Experiment Name: At_100uM_ABA_Mutants__P Parameter: Tissue Value: Whole Plant
  misc_feature: MA Experiment 20000574 PARAMETER Experiment Name: At_100uM_ABA_Mutants__P Parameter: Treatment Value: None
  misc_feature: MA Experiment ID: 20001247 Result: Up-regulated in Transcription
  misc_feature: MA Experiment 20001247 PARAMETER Experiment Name: At_Far-red-induction_P Parameter: Age (day) Value: 7
  misc_feature: MA Experiment 20001247 PARAMETER Experiment Name: At_Far-red-induction_P Parameter: Light Value: Far-red vs. White
  misc_feature: MA Experiment 20001247 PARAMETER Experiment Name: At_Far-red-induction_P Parameter: Organism Value: A. thaliana
  misc_feature: MA Experiment 20001247 PARAMETER Experiment Name: At_Far-red-induction_P Parameter: Plant Line Value: Columbia
  misc_feature: MA Experiment 20001247 PARAMETER Experiment Name: At_Far-red-induction_P Parameter: Timepoint (hr) Value: 1
  misc_feature: MA Experiment 20001247 PARAMETER Experiment Name: At_Far-red-induction_P Parameter: Tissue Value: Whole Plant
  misc_feature: MA Experiment ID: 20001248 Result: Up-regulated in Transcription
  misc_feature: MA Experiment 20001248 PARAMETER Experiment Name: At_Far-red-induction_P Parameter: Age (day) Value: 7
  misc_feature: MA Experiment 20001248 PARAMETER Experiment Name: At_Far-red-induction_P Parameter: Light Value: Far-red vs. White
  misc_feature: MA Experiment 20001248 PARAMETER Experiment Name: At_Far-red-induction_P Parameter: Organism Value: A. thaliana
  misc_feature: MA Experiment 20001248 PARAMETER Experiment Name: At_Far-red-induction_P Parameter: Plant Line Value: Columbia
  misc_feature: MA Experiment 20001248 PARAMETER Experiment Name: At_Far-red-induction_P Parameter: Timepoint (hr) Value: 4
  misc_feature: MA Experiment 20001248 PARAMETER Experiment Name: At_Far-red-induction_P Parameter: Tissue Value: Whole Plant
  misc_feature: MA Experiment ID: 20001450 Result: Up-regulated in Transcription
  misc_feature: MA Experiment 20001450 PARAMETER Experiment Name: At_Far-red-induction_P Parameter: Age (day) Value: 7
  misc_feature: MA Experiment 20001450 PARAMETER Experiment Name: At_Far-red-induction_P Parameter: Light Value: Far-red vs. White
  misc_feature: MA Experiment 20001450 PARAMETER Experiment Name: At_Far-red-induction_P Parameter: Organism Value: A. thaliana
  misc_feature: MA Experiment 20001450 PARAMETER Experiment Name: At_Far-red-induction_P Parameter: Plant Line Value: Columbia
  misc_feature: MA Experiment 20001450 PARAMETER Experiment Name: At_Far-red-induction_P Parameter: Timepoint (hr) Value: 8
  misc_feature: MA Experiment 20001450 PARAMETER Experiment Name: At_Far-red-induction_P Parameter: Tissue Value: Whole Plant
  misc_feature: MA Experiment ID: 20001451 Result: Down-regulated in Transcription
  misc_feature: MA Experiment 20001451 PARAMETER Experiment Name: At_Far-red-induction_P Parameter: Age (day) Value: 7
  misc_feature: MA Experiment 20001451 PARAMETER Experiment Name: At_Far-red-induction_P Parameter: Light Value: Far-red vs. White
  misc_feature: MA Experiment 20001451 PARAMETER Experiment Name: At_Far-red-induction_P Parameter: Organism Value: A. thaliana
  misc_feature: MA Experiment 20001451 PARAMETER Experiment Name: At_Far-red-induction_P Parameter: Plant Line Value: Columbia
  misc_feature: MA Experiment 20001451 PARAMETER Experiment Name: At_Far-red-induction_P Parameter: Timepoint (hr) Value: 24
  misc_feature: MA Experiment 20001451 PARAMETER Experiment Name: At_Far-red-induction_P Parameter: Tissue Value: Whole Plant
  misc_feature: MA Experiment ID: 20001557 Result: Up-regulated in Transcription
  misc_feature: MA Experiment 20001557 PARAMETER Experiment Name: At_Drought_Soil_Dry_P Parameter: Age (day) Value: 27
  misc_feature: MA Experiment 20001557 PARAMETER Experiment Name: At_Drought_Soil_Dry_P Parameter: Organism Value: A. thaliana
  misc_feature: MA Experiment 20001557 PARAMETER Experiment Name: At_Drought_Soil_Dry_P Parameter: Plant Line Value: WS
  misc_feature: MA Experiment 20001557 PARAMETER Experiment Name: At_Drought_Soil_Dry_P Parameter: Post Timepoint (hr) Value: 3
  misc_feature: MA Experiment 20001557 PARAMETER Experiment Name: At_Drought_Soil_Dry_P Parameter: Post-Treatment Value: Re-Water vs. No Drought
  misc_feature: MA Experiment 20001557 PARAMETER Experiment Name: At_Drought_Soil_Dry_P Parameter: Timepoint (day) Value: 13
  misc_feature: MA Experiment 20001557 PARAMETER Experiment Name: At_Drought_Soil_Dry_P Parameter: Treatment Value: Drought vs. No Drought
atggaagagagacgagatgatgaatcaagccctacacaccagggatcagaacttgcggaaagggtgaagttgctttcttttgaatctcaaggtgaagctttgagtaaggactcccctagaagtgttgaacaggattgctctccaggtcaaagagcatcacagcatctttgggatactggaatactctctgaacctattcctaatggtttctactcagttgttccggataagagagtaaaggagctatataatagactacctactccgagtgagcttcatgctttgggagaggaaggtgtcagaattgaagttattcttgttgattttcaaaaagataagaagctcgcaatgcttaaacagttgatcactacacttgtcagcggcagcggcacaaatcctgctttggtgattaagaaaatagcaggaacggtctctgacttttacaaacgtccaacactagaaagcccttcaaaacttgctctagaggaaaatgcgttcttgtttgaaaaccatggtgctcagttgcttggccagattaagcgtggttgctgtcgagctcgggcaattttgttcaaagttctagctgatactgtaggacttgaaagtcggctggtggtgggtttgcctagtgatgggactgtgaattgcatggactctaacaaacacatgtctgttatagttgtgctgaattccgttgaactactagtcgatcttattcggtttcctggtcagttggtaccgcgatcagccaaggcaattttcatgtcacacatctcgcctgctggagagagtgattctgcagaaaacgactcttgtgactcacctttggagccaaatagtcctttatatgagagaagagatcctgagagtacagaaaaagatgaaaatcttcaattttatcggaagttagaaggatatccaaatgcatctggttcatcactgcgtagtttgatgctcagaccttctacagctattgaaaggaaattgagcaacacctcgcatagtgaaccaaatgttgctactgtattctggaggcgtagccgcagaaaagtaattgctgaacagagaacagctagctcaagcccagaacacccatctatgcgacgtggacgatcaatgttgagcactggtaggaattcttttagggattacactggtgaagcatcatctccttcaagttcatccacatcagaaattcgtaaaactagacggcgaagttttaggatcacaccagaaattggcgatgacattgcaagcgctgtacgagaaatgtatgagaaatcaaagcaaaaccgtctcttgcagggtcgagaggatgaaaacagctcagttatcgataacaacgtgtctggtctccatcttgatgatgagttaaattctaagaagacaatgtcattgccctcatctccccatgcttacaggtgtcaaacatttggacgaagagggccttcagaatttgccgtgaaggatacatggaataaagtggttgagtcttccacattgcagaatcagcctttattaccctatcaagaatgggacattgacttctcagagctgactgttggaactcgggtggggattggtttttttggtgaagtttttcgtggagtatggaatgggacagatgttgcaatcaaattgtttctggagcaagatcttactgccgaaaacatggaagatttctgcaatgagatatcaattctcagccgtgttcgccacccaaatgttgtactatttttgggtgcatgcacaaaacctccacgcttatccatgatcacggagtacatggagctgggatcgttgtattatttgatccacatgagtggtcagaagaagaaacttagctggcacagaaggctcaggatgcttagagacatctgcaggggtttgatgtgcatacaccggatgaagatagtccaccgcgacctaaagagtgccaactgtctagtggacaaacattggacagtcaagatctgtgattttgggctgtcaagaataatgactgatgaaaacatgaaggacacttcatctgctgggacaccagagtggatggctccagagctcattcgcaacaggccttttacagagaaatgtgatatctttagtcttggggtcataatgtgggaactttcaactttacgtaaaccatgggaaggagttccacctgagaaggttgtctttgctgttgcacatgaagggtcacgtttggagattcctgatggtccactcagcaaactaattgcagattgttgggcagagcctgaagaacgcccaaattgtgaagagatacttagaggcttactcgattgtgagtacacactgtgctaa

SEQ ID NO: 78363 - protein, 775 aa, Arabidopsis thaliana
  peptide (1)..(775): Ceres Seq. ID no. 12640859
  misc_feature (1)..(443): Homolog of NCBI NO: 22655056 NR Description: unknown protein [Arabidopsis thaliana]
  misc_feature (442)..(775): Homolog of NCBI NO: 22655056 NR Description: unknown protein [Arabidopsis thaliana]
  misc_feature (1)..(443): Homolog of NCBI NO: 18411001 NR Description: putative protein; protein id: At3g58640.1, by cDNA: gi_15146175 [Arabidopsis thaliana] AT3g58640/F14P22_230 [Arabidopsis thaliana]
  misc_feature (408)..(775): Homolog of NCBI NO: 18411001 NR Description: putative protein; protein id: At3g58640.1, by cDNA: gi_15146175 [Arabidopsis thaliana] AT3g58640/F14P22_230 [Arabidopsis thaliana]
  misc_feature (1)..(443): Homolog of NCBI NO: 11346387 NR Description: hypothetical protein F14P22.230 - Arabidopsis >gi|6735381|emb|CAB68202.1| putative protein [Arabidopsis
  misc_feature (408)..(775): Homolog of NCBI NO: 11346387 NR Description: hypothetical protein F14P22.230 - Arabidopsis >gi|6735381|emb|CAB68202.1| putative protein [Arabidopsis
  misc_feature (11)..(292): Homolog of NCBI NO: 34911062 NR Description: P0485G01.18 [Oryza sativa (japonica
  misc_feature (629)..(774): Homolog of NCBI NO: 34911062 NR Description: P0485G01.18 [Oryza sativa (japonica
  misc_feature (382)..(457): Homolog of NCBI NO: 34911062 NR Description: P0485G01.18 [Oryza sativa (japonica
  misc_feature (505)..(576): Homolog of NCBI NO: 34911062 NR Description: P0485G01.18 [Oryza sativa (japonica
MEERRDDESSPTHQGSELAERVKLLSFESQGEALSKDSPRSVEQDCSPGQRASQHLWDTGILSEPIPNGFYSVVPDKRVKELYNRLPTPSELHALGEEGVRIEVILVDFQKDKKLAMLKQLITTLVSGSGTNPALVIKKIAGTVSDFYKRPTLESPSKLALEENAFLFENHGAQLLGQIKRGCCRARAILFKVLADTVGLESRLVVGLPSDGTVNCMDSNKHMSVIVVLNSVELLVDLIRFPGQLVPRSAKAIFMSHISPAGESDSAENDSCDSPLEPNSPLYERRDPESTEKDENLQFYRKLEGYPNASGSSLRSLMLRPSTAIERKLSNTSHSEPNVATVFWRRSRRKVIAEQRTASSSPEHPSMRRGRSMLSTGRNSFRDYTGEASSPSSSSTSEIRKTRRRSFRITPEIGDDIASAVREMYEKSKQNRLLQGREDENSSVIDNNVSGLHLDDELNSKKTMSLPSSPHAYRCQTFGRRGPSEFAVKDTWNKVVESSTLQNQPLLPYQEWDIDFSELTVGTRVGIGFFGEVFRGVWNGTDVAIKLFLEQDLTAENMEDFCNEISILSRVRHPNVVLFLGACTKPPRLSMITEYMELGSLYYLIHMSGQKKKLSWHRRLRMLRDICRGLMCIHRMKIVHRDLKSANCLVDKHWTVKICDFGLSRIMTDENMKDTSSAGTPEWMAPELIRNRPFTEKCDIFSLGVIMWELSTLRKPWEGVPPEKVVFAVAHEGSRLEIPDGPLSKLIADCWAEPEERPNCEEILRGLLDCEYTLC

SEQ ID NO: 78364 - protein, 659 aa, Arabidopsis thaliana
  peptide (1)..(659): Ceres Seq. ID no. 12640860
  misc_feature (1)..(327): Homolog of NCBI NO: 22655056 NR Description: unknown protein [Arabidopsis thaliana]
  misc_feature (326)..(659): Homolog of NCBI NO: 22655056 NR Description: unknown protein [Arabidopsis thaliana]
  misc_feature (1)..(327): Homolog of NCBI NO: 18411001 NR Description: putative protein; protein id: At3g58640.1, by cDNA: gi_15146175 [Arabidopsis thaliana] AT3g58640/F14P22_230 [Arabidopsis thaliana]
  misc_feature (292)..(659): Homolog of NCBI NO: 18411001 NR Description: putative protein; protein id: At3g58640.1, by cDNA: gi_15146175 [Arabidopsis thaliana] AT3g58640/F14P22_230 [Arabidopsis thaliana]
  misc_feature (1)..(327): Homolog of NCBI NO: 11346387 NR Description: hypothetical protein F14P22.230 - Arabidopsis >gi|6735381|emb|CAB68202.1| putative protein [Arabidopsis
  misc_feature (292)..(659): Homolog of NCBI NO: 11346387 NR Description: hypothetical protein F14P22.230 - Arabidopsis >gi|6735381|emb|CAB68202.1| putative protein [Arabidopsis
  misc_feature (1)..(176): Homolog of NCBI NO: 34911062 NR Description: P0485G01.18 [Oryza sativa (japonica
  misc_feature (513)..(658): Homolog of NCBI NO: 34911062 NR Description: P0485G01.18 [Oryza sativa (japonica
  misc_feature (266)..(341): Homolog of NCBI NO: 34911062 NR Description: P0485G01.18 [Oryza sativa (japonica
  misc_feature (389)..(460): Homolog of NCBI NO: 34911062 NR Description: P0485G01.18 [Oryza sativa (japonica
MLKQLITTLVSGSGTNPALVIKKIAGTVSDFYKRPTLESPSKLALEENAFLFENHGAQLLGQIKRGCCRARAILFKVLADTVGLESRLVVGLPSDGTVNCMDSNKHMSVIVVLNSVELLVDLIRFPGQLVPRSAKAIFMSHISPAGESDSAENDSCDSPLEPNSPLYERRDPESTEKDENLQFYRKLEGYPNASGSSLRSLMLRPSTAIERKLSNTSHSEPNVATVFWRRSRRKVIAEQRTASSSPEHPSMRRGRSMLSTGRNSFRDYTGEASSPSSSSTSEIRKTRRRSFRITPEIGDDIASAVREMYEKSKQNRLLQGREDENSSVIDNNVSGLHLDDELNSKKTMSLPSSPHAYRCQTFGRRGPSEFAVKDTWNKVVESSTLQNQPLLPYQEWDIDFSELTVGTRVGIGFFGEVFRGVWNGTDVAIKLFLEQDLTAENMEDFCNEISILSRVRHPNVVLFLGACTKPPRLSMITEYMELGSLYYLIHMSGQKKKLSWHRRLRMLRDICRGLMCIHRMKIVHRDLKSANCLVDKHWTVKICDFGLSRIMTDENMKDTSSAGTPEWMAPELIRNRPFTEKCDIFSLGVIMWELSTLRKPWEGVPPEKVVFAVAHEGSRLEIPDGPLSKLIADCWAEPEERPNCEEILRGLLDCEYTLC

SEQ ID NO: 78365 - protein, 559 aa, Arabidopsis thaliana
  peptide (1)..(559): Ceres Seq. ID no. 12640861
  misc_feature (1)..(227): Homolog of NCBI NO: 22655056 NR Description: unknown protein [Arabidopsis thaliana]
  misc_feature (226)..(559): Homolog of NCBI NO: 22655056 NR Description: unknown protein [Arabidopsis thaliana]
  misc_feature (1)..(227): Homolog of NCBI NO: 18411001 NR Description: putative protein; protein id: At3g58640.1, by cDNA: gi_15146175 [Arabidopsis thaliana] AT3g58640/F14P22_230 [Arabidopsis thaliana]
  misc_feature (192)..(559): Homolog of NCBI NO: 18411001 NR Description: putative protein; protein id: At3g58640.1, by cDNA: gi_15146175 [Arabidopsis thaliana] AT3g58640/F14P22_230 [Arabidopsis thaliana]
  misc_feature (1)..(227): Homolog of NCBI NO: 11346387 NR Description: hypothetical protein F14P22.230 - Arabidopsis >gi|6735381|emb|CAB68202.1| putative protein [Arabidopsis
  misc_feature (192)..(559): Homolog of NCBI NO: 11346387 NR Description: hypothetical protein F14P22.230 - Arabidopsis >gi|6735381|emb|CAB68202.1| putative protein [Arabidopsis
  misc_feature (1)..(76): Homolog of NCBI NO: 34911062 NR Description: P0485G01.18 [Oryza sativa (japonica
  misc_feature (413)..(558): Homolog of NCBI NO: 34911062 NR Description: P0485G01.18 [Oryza sativa (japonica
  misc_feature (166)..(241): Homolog of NCBI NO: 34911062 NR Description: P0485G01.18 [Oryza sativa (japonica
  misc_feature (289)..(360): Homolog of NCBI NO: 34911062 NR Description: P0485G01.18 [Oryza sativa (japonica
MDSNKHMSVIVVLNSVELLVDLIRFPGQLVPRSAKAIFMSHISPAGESDSAENDSCDSPLEPNSPLYERRDPESTEKDENLQFYRKLEGYPNASGSSLRSLMLRPSTAIERKLSNTSHSEPNVATVFWRRSRRKVIAEQRTASSSPEHPSMRRGRSMLSTGRNSFRDYTGEASSPSSSSTSEIRKTRRRSFRITPEIGDDIASAVREMYEKSKQNRLLQGREDENSSVIDNNVSGLHLDDELNSKKTMSLPSSPHAYRCQTFGRRGPSEFAVKDTWNKVVESSTLQNQPLLPYQEWDIDFSELTVGTRVGIGFFGEVFRGVWNGTDVAIKLFLEQDLTAENMEDFCNEISILSRVRHPNVVLFLGACTKPPRLSMITEYMELGSLYYLIHMSGQKKKLSWHRRLRMLRDICRGLMCIHRMKIVHRDLKSANCLVDKHWTVKICDFGLSRIMTDENMKDTSSAGTPEWMAPELIRNRPFTEKCDIFSLGVIMWELSTLRKPWEGVPPEKVVFAVAHEGSRLEIPDGPLSKLIADCWAEPEERPNCEEILRGLLDCEYTLC

SEQ ID NO: 78366 - DNA, 2337 bp, Arabidopsis thaliana
  misc_feature (1)..(2337): Ceres Seq. ID no. 12640870
  misc_feature: MA Experiment ID: 20000307 Result: Up-regulated in Transcription
  misc_feature: MA Experiment 20000307 PARAMETER Experiment Name: At_Germinating_Seeds_Sub_P Parameter: Age (hr) Value: 24 vs. 0
  misc_feature: MA Experiment 20000307 PARAMETER Experiment Name: At_Germinating_Seeds_Sub_P Parameter: Organism Value: A. thaliana
  misc_feature: MA Experiment 20000307 PARAMETER Experiment Name: At_Germinating_Seeds_Sub_P Parameter: Plant Line Value: WS
  misc_feature: MA Experiment 20000307 PARAMETER Experiment Name: At_Germinating_Seeds_Sub_P Parameter: Tissue Value: Germinating Seeds
  misc_feature: MA Experiment ID: 20000347 Result: Up-regulated in Transcription
  misc_feature: MA Experiment 20000347 PARAMETER Experiment Name: At_2mM_SA_Sub_P Parameter: Age (day) Value: 14
  misc_feature: MA Experiment 20000347 PARAMETER Experiment Name: At_2mM_SA_Sub_P Parameter: Organism Value: A. thaliana
  misc_feature: MA Experiment 20000347 PARAMETER Experiment Name: At_2mM_SA_Sub_P Parameter: Plant Line Value: WS
  misc_feature: MA Experiment 20000347 PARAMETER Experiment Name: At_2mM_SA_Sub_P Parameter: Timepoint (hr) Value: 6
  misc_feature: MA Experiment 20000347 PARAMETER Experiment Name: At_2mM_SA_Sub_P Parameter: Tissue Value: Aerial
  misc_feature: MA Experiment 20000347 PARAMETER Experiment Name: At_2mM_SA_Sub_P Parameter: Treatment Value: 2mM SA vs. No Treatment
  misc_feature: MA Experiment ID: 20000440 Result: Down-regulated in Transcription
  misc_feature: MA Experiment 20000440 PARAMETER Experiment Name: At_Closed-Flower__Sub_P Parameter: Tissue Value: Closed Flower vs. Whole Plant
atgcatcctttctgttgtgtctccgatcactccccttccacgccgtcgttctccatgtacgccgccacacccgaaactcctttcggttccgcgagatcacaaccggttattacccgatctgtctcacaacgatataaccatccaggtcaaagtaatcaccatcatctcctccacagtctctcatttaaccaccagaacgtactagccttaccggcagcagcaagggagccgcctgtggatgtcaagattaacgatatcgctgggaattcgattgccgggatattgtacaaatgggtgaactatgggaaaggatggagaccaagatggtttgttttgcaagatggagtgctttcatattataaaatcaagggacctgataagatcgttgttatccatgagactgagaaaggatcaagagtgatcggagaggagtccacacgtatgatctctaggaataagcgtcacgccgccactaacaacaccaaccaccagctccgccgcaagccattcggcgaagttcatctcaaggtttcatcgattcgggagagtagatcagatgataagagattttcaatattcaccggcaccaagaggcttcacctacgtgcagagacaagagaggacagagaagcttggatagaggctttacaagctgtcaaagatatgtttccaagaatgtcaaactgcgagttgatggcaccgaccaacaacttagacatctcgatagagaagcttaggctgcgattggttgaggaaggagtgagtgagtcagccattcaagactgcgaacaaatcacgaggtctgagttctcggcaattcagagccagcttttgcttcttaaacaaaagcaatggcttctcattgatacactcagacaattagagacagagaaagtagatttggaaaacacggttgtagatgagactcaacgacaagctggcaacggagactcagaagaaacaattagtgaatctgatgatgataatgaacaatttgatgaggctgaggaggaaatggatacatgtgactctctttcttcaagttcattcaaaagtattggatccgtttttcgcacatcatcattctcttcagatgatgatggacttactaatggttttgagtcagagaatgatgatgttgatccttctatcaagactattggatttaactatccacatgtcaaaagacgaaagaagttacctgatccggttgaaaaagagaaaagtgttagcctttggtcaatgatcaaagacaacattggcaaggatctcacaaaagtttgtcttcctgtctacttcaatgagcctttatcttctctacaaaaatgctttgaagatttggagtattcatatcttcttgatcaagcttctgaatggggaaagaggggcaataacctcatgaggattctgaatgtagctgcatttgccgtatctggttatgcatcaactgaaggaagaatttgcaaaccttttaatccaatgttaggtgaaacatatgaggctgactatcccgataaaggccttcgatttttctcggaaaaggtgagtcatcatcctatgattgtggcatgtcattgtgatggcaccggatggaaattttggggagatagcaacttaaaaagcaaattttggggtcgatcaattcaacttgatcctattggtttgttgactttgcaatttgatgatggtgaaattgtgcaatggagtaaggtgactacatcaatatacaatctcatacttggtaaattgtattgtgatcactacgggacaatgaagattgaaggcaacggtgaatattcatgtaaacttaaattcaaggaacagtcgatgatcgatagaaatccgcatcaagttcaaggtatagtagaagacaagaatggaaaaacagtggctaggttgtttggaaaatgggatgagagtatacactatgtgatggttgatcaaggaaaggtgaatgaatcccatcttctgtggaaacgaaacaaacagcccgaaaacccgacaaagtataatctaacacggtttgggatcacattaaacgagctcacgcctggtttaaaggagaagttgccaccaacagattcaagacttagaccggaccagaggtatttagagaagggagagtatgaaatgggaaacgcagagaagttgaggttggaacaaagacaaagacaggcgagagagatgcaagagagaggttggaaaccaaagtggtttagaaaagagaaaggaagtgagacttatagatacattggaggttattgggaagctcgagattctggtagttgggatgattgtcctgacatctttggtcaagttcaccaatccatcaagtaa

SEQ ID NO: 78367 - protein, 778 aa, Arabidopsis thaliana
  peptide (1)..(778): Ceres Seq. ID no. 12640871
  misc_feature (371)..(760): Pfam Name: Oxysterol-binding protein Pfam Description: Oxysterol-binding protein
  misc_feature (51)..(762): Homolog of NCBI NO: 7486872 NR Description: hypothetical protein T12G13.20 - Arabidopsis >gi|5262191|emb|CAB45788.1| putative protein [Arabidopsis >gi|7267458|emb|CAB81154.1| putative protein [Arabidopsis
  misc_feature (316)..(774): Homolog of NCBI NO: 15224598 NR Description: putative oxysterol-binding protein; protein id:
  misc_feature (77)..(773): Homolog of NCBI NO: 22450593 NR Description: putative oxysterol binding protein [Oryza sativa
  misc_feature (334)..(777): Homolog of NCBI NO: 15235381 NR Description: putative SWH1 protein; protein id: At4g12460.1
  misc_feature (87)..(356): Homolog of NCBI NO: 15235381 NR Description: putative SWH1 protein; protein id: At4g12460.1
  misc_feature (350)..(777): Homolog of NCBI NO: 18415950 NR Description: putative protein; protein id: At4g22540.1, by cDNA: gi_15450518 [Arabidopsis thaliana] AT4g22540/F7K2_120 [Arabidopsis thaliana]
  misc_feature (55)..(338): Homolog of NCBI NO: 18415950 NR Description: putative protein; protein id: At4g22540.1, by cDNA: gi_15450518 [Arabidopsis thaliana] AT4g22540/F7K2_120 [Arabidopsis thaliana]
  misc_feature (293)..(617): Homolog of NCBI NO: 18568266 NR Description: putative oxysterol-binding protein [Zea mays]
  misc_feature (1)..(295): Homolog of NCBI NO: 18568266 NR Description: putative oxysterol-binding protein [Zea mays]
  misc_feature (168)..(775): Homolog of NCBI NO: 15222204 NR Description: putative oxysterol-binding protein; protein id: [Arabidopsis thaliana] >gi|25295691|pir||A86266 hypothetical
MHPFCCVSDHSPSTPSFSMYAATPETPFGSARSQPVITRSVSQRYNHPGQSNHHHLLHSLSFNHQNVLALPAAAREPPVDVKINDIAGNSIAGILYKWVNYGKGWRPRWFVLQDGVLSYYKIKGPDKIVVIHETEKGSRVIGEESTRMISRNKRHAATNNTNHQLRRKPFGEVHLKVSSIRESRSDDKRFSIFTGTKRLHLRAETREDREAWIEALQAVKDMFPRMSNCELMAPTNNLDISIEKLRLRLVEEGVSESAIQDCEQITRSEFSAIQSQLLLLKQKQWLLIDTLRQLETEKVDLENTVVDETQRQAGNGDSEETISESDDDNEQFDEAEEEMDTCDSLSSSSFKSIGSVFRTSSFSSDDDGLTNGFESENDDVDPSIKTIGFNYPHVKRRKKLPDPVEKEKSVSLWSMIKDNIGKDLTKVCLPVYFNEPLSSLQKCFEDLEYSYLLDQASEWGKRGNNLMRILNVAAFAVSGYASTEGRICKPFNPMLGETYEADYPDKGLRFFSEKVSHHPMIVACHCDGTGWKFWGDSNLKSKFWGRSIQLDPIGLLTLQFDDGEIVQWSKVTTSIYNLILGKLYCDHYGTMKIEGNGEYSCKLKFKEQSMIDRNPHQVQGIVEDKNGKTVARLFGKWDESIHYVMVDQGKVNESHLLWKRNKQPENPTKYNLTRFGITLNELTPGLKEKLPPTDSRLRPDQRYLEKGEYEMGNAEKLRLEQRQRQAREMQERGWKPKWFRKEKGSETYRYIGGYWEARDSGSWDDCPDIFGQVHQSIK

SEQ ID NO: 78368 - protein, 760 aa, Arabidopsis thaliana; identical to SEQ ID NO: 70533
  peptide (1)..(760): Ceres Seq. ID no. 12640872
  misc_feature (353)..(742): Pfam Name: Oxysterol-binding protein Pfam Description: Oxysterol-binding protein
  misc_feature (33)..(744): Homolog of NCBI NO: 7486872 NR Description: hypothetical protein T12G13.20 - Arabidopsis >gi|5262191|emb|CAB45788.1| putative protein [Arabidopsis >gi|7267458|emb|CAB81154.1| putative protein [Arabidopsis
  misc_feature (298)..(756): Homolog of NCBI NO: 15224598 NR Description: putative oxysterol-binding protein; protein id:
  misc_feature (59)..(755): Homolog of NCBI NO: 22450593 NR Description: putative oxysterol binding protein [Oryza sativa
  misc_feature (316)..(759): Homolog of NCBI NO: 15235381 NR Description: putative SWH1 protein; protein id: At4g12460.1
  misc_feature (69)..(338): Homolog of NCBI NO: 15235381 NR Description: putative SWH1 protein; protein id: At4g12460.1
  misc_feature (332)..(759): Homolog of NCBI NO: 18415950 NR Description: putative protein; protein id: At4g22540.1, by cDNA: gi_15450518 [Arabidopsis thaliana] AT4g22540/F7K2_120 [Arabidopsis thaliana]
  misc_feature (37)..(320): Homolog of NCBI NO: 18415950 NR Description: putative protein; protein id: At4g22540.1, by cDNA: gi_15450518 [Arabidopsis thaliana] AT4g22540/F7K2_120 [Arabidopsis thaliana]
  misc_feature (275)..(599): Homolog of NCBI NO: 18568266 NR Description: putative oxysterol-binding protein [Zea mays]
  misc_feature (1)..(277): Homolog of NCBI NO: 18568266 NR Description: putative oxysterol-binding protein [Zea mays]
  misc_feature (150)..(757): Homolog of NCBI NO: 15222204 NR Description: putative oxysterol-binding protein; protein id: [Arabidopsis thaliana] >gi|25295691|pir||A86266 hypothetical

SEQ ID NO: 78369 - protein, 631 aa, Arabidopsis thaliana; identical to SEQ ID NO: 70534
  peptide (1)..(631): Ceres Seq. ID no. 12640873
  misc_feature (224)..(613): Pfam Name: Oxysterol-binding protein Pfam Description: Oxysterol-binding protein
  misc_feature (1)..(615): Homolog of NCBI NO: 7486872 NR Description: hypothetical protein T12G13.20 - Arabidopsis >gi|5262191|emb|CAB45788.1| putative protein [Arabidopsis >gi|7267458|emb|CAB81154.1| putative protein [Arabidopsis
  misc_feature (169)..(627): Homolog of NCBI NO: 15224598 NR Description: putative oxysterol-binding protein; protein id:
  misc_feature (1)..(626): Homolog of NCBI NO: 22450593 NR Description: putative oxysterol binding protein [Oryza sativa
  misc_feature (187)..(630): Homolog of NCBI NO: 15235381 NR Description: putative SWH1 protein; protein id: At4g12460.1
  misc_feature (1)..(209): Homolog of NCBI NO: 15235381 NR Description: putative SWH1 protein; protein id: At4g12460.1
  misc_feature (203)..(630): Homolog of NCBI NO: 18415950 NR Description: putative protein; protein id: At4g22540.1, by cDNA: gi_15450518 [Arabidopsis thaliana] AT4g22540/F7K2_120 [Arabidopsis thaliana]
  misc_feature (1)..(191): Homolog of NCBI NO: 18415950 NR Description: putative protein; protein id: At4g22540.1, by cDNA: gi_15450518 [Arabidopsis thaliana] AT4g22540/F7K2_120 [Arabidopsis thaliana]
  misc_feature (146)..(470): Homolog of NCBI NO: 18568266 NR Description: putative oxysterol-binding protein [Zea mays]
  misc_feature (1)..(148): Homolog of NCBI NO: 18568266 NR Description: putative oxysterol-binding protein [Zea mays]
  misc_feature (21)..(628): Homolog of NCBI NO: 15222204 NR Description: putative oxysterol-binding protein; protein id: [Arabidopsis thaliana] >gi|25295691|pir||A86266 hypothetical

SEQ ID NO: 78370 - DNA, 1167 bp, Arabidopsis thaliana
  misc_feature (1)..(1167): Ceres Seq. ID no. 12640889
  misc_feature: MA Experiment ID: 20000440 Result: Up-regulated in Transcription
  misc_feature: MA Experiment 20000440 PARAMETER Experiment Name: At_Closed-Flower__Sub_P Parameter: Tissue Value: Closed Flower vs. Whole Plant
atggtaggagacatcgccacgagatggaaagaattgagcggtagtagcaagtggaaagacctgcttgatcctcttgacttggatctacgccgttatatcctacactatggtgatatggctgaggtagggtaccttgcctttaatagtgaccgccggtctaaatatgtaggagatagctgctacaccaaagaagagctctttgctcgaaccggttacctcaaagccaaccctttcaggtacgaggtgaccaagtacatatatggaacttcgtctataaggttaccagaatacgaaggcaagaagttgttagggaggaggggcattgttgttgcatggcgagggaccattcagctgtacgagtgggctaacgatttcgatttcccacttgaatcagctgttatggttttccctggagctaacccgaatgacgagcctcgcgtagcaaatggttggctatccctttatacatccactgatccacgatcacgttttgacaagaccagtgcacaagaacaggttcaagaagagctcaaaaggttactagaattgtacaaaaacgaagacgttaccatcaccttaacaggccatagcttgggcgcagttatgtcgattctatccgccgcagactttctccataacgaatggcctaagatcacaccaagtctacaacacagcctatgtgtcacagtatttgctttcgggagtccccaaatcggtgaccgaagcttcaaaagactcgtagagtctctcgaacacctccacatcctaagagtaacaaacgtcccggacctcattccccgttaccccgtattcaggttcacagatataggcgaggagcttcaaatcaacacattaaaatcagagtacctaaaacgatctctaaacctgggacatttccataacctggaggcttacttacacggcgtggcagggacacaacacaaccaaggagaattcaaactagagattaaccgagatatagcactggtaaacaaaggtttagatgctcttgaagataagtacttagtaccaggacattggtgggttcttgagaacaaaggaatggttcaaagtgatgatgggacatggaaactaaatggtgacaggtcaaagaagaaacaagaagaagaagacgaaaaagaagaaaacaattgcaaattcccatga

SEQ ID NO: 78371 - protein, 388 aa, Arabidopsis thaliana
  peptide (1)..(388): Ceres Seq. ID no. 12640890
  misc_feature (89)..(388): Homolog of NCBI NO: 15224613 NR Description: putative lipase; protein id: At2g31100.1
  misc_feature (1)..(41): Homolog of NCBI NO: 15224613 NR Description: putative lipase; protein id: At2g31100.1
  misc_feature (98)..(384): Homolog of NCBI NO: 21537306 NR Description: lipase-like protein [Arabidopsis thaliana]
  misc_feature (1)..(95): Homolog of NCBI NO: 21537306 NR Description: lipase-like protein [Arabidopsis thaliana]
  misc_feature (39)..(384): Homolog of NCBI NO: 15221426 NR Description: lipase-like protein; protein id: At1g06250.1, by cDNA: 12912. [Arabidopsis thaliana] >gi|25406908|pir||C86198
  misc_feature (92)..(365): Homolog of NCBI NO: 15233922 NR Description: lipase-like protein; protein id: At4g18550.1
  misc_feature (4)..(96): Homolog of NCBI NO: 15233922 NR Description: lipase-like protein; protein id: At4g18550.1
  misc_feature (98)..(365): Homolog of NCBI NO: 34911830 NR Description: lipase-like protein [Oryza sativa (japonica
  misc_feature (2)..(96): Homolog of NCBI NO: 34911830 NR Description: lipase-like protein [Oryza sativa (japonica
  misc_feature (168)..(377): Homolog of NCBI NO: 34911870 NR Description: lipase-like protein [Oryza sativa (japonica
MVGDIATRWKELSGSSKWKDLLDPLDLDLRRYILHYGDMAEVGYLAFNSDRRSKYVGDSCYTKEELFARTGYLKANPFRYEVTKYIYGTSSIRLPEYEGKKLLGRRGIVVAWRGTIQLYEWANDFDFPLESAVMVFPGANPNDEPRVANGWLSLYTSTDPRSRFDKTSAQEQVQEELKRLLELYKNEDVTITLTGHSLGAVMSILSAADFLHNEWPKITPSLQHSLCVTVFAFGSPQIGDRSFKRLVESLEHLHILRVTNVPDLIPRYPVFRFTDIGEELQINTLKSEYLKRSLNLGHFHNLEAYLHGVAGTQHNQGEFKLEINRDIALVNKGLDALEDKYLVPGHWWVLENKGMVQSDDGTWKLNGDRSKKKQEEEDEKEENNCKFP

SEQ ID NO: 78372 - protein, 350 aa, Arabidopsis thaliana
  peptide (1)..(350): Ceres Seq. ID no. 12640891
  misc_feature (51)..(350): Homolog of NCBI NO: 15224613 NR Description: putative lipase; protein id: At2g31100.1
  misc_feature (60)..(346): Homolog of NCBI NO: 21537306 NR Description: lipase-like protein [Arabidopsis thaliana]
  misc_feature (1)..(57): Homolog of NCBI NO: 21537306 NR Description: lipase-like protein [Arabidopsis thaliana]
  misc_feature (1)..(346): Homolog of NCBI NO: 15221426 NR Description: lipase-like protein; protein id: At1g06250.1, by cDNA: 12912. [Arabidopsis thaliana] >gi|25406908|pir||C86198
  misc_feature (54)..(327): Homolog of NCBI NO: 15233922 NR Description: lipase-like protein; protein id: At4g18550.1
  misc_feature (1)..(58): Homolog of NCBI NO: 15233922 NR Description: lipase-like protein; protein id: At4g18550.1
  misc_feature (60)..(327): Homolog of NCBI NO: 34911830 NR Description: lipase-like protein [Oryza sativa (japonica
  misc_feature (1)..(58): Homolog of NCBI NO: 34911830 NR Description: lipase-like protein [Oryza sativa (japonica
  misc_feature (130)..(339): Homolog of NCBI NO: 34911870 NR Description: lipase-like protein [Oryza sativa (japonica
  misc_feature (61)..(152): Homolog of NCBI NO: 34911870 NR Description: lipase-like protein [Oryza sativa (japonica
MAEVGYLAFNSDRRSKYVGDSCYTKEELFARTGYLKANPFRYEVTKYIYGTSSIRLPEYEGKKLLGRRGIVVAWRGTIQLYEWANDFDFPLESAVMVFPGANPNDEPRVANGWLSLYTSTDPRSRFDKTSAQEQVQEELKRLLELYKNEDVTITLTGHSLGAVMSILSAADFLHNEWPKITPSLQHSLCVTVFAFGSPQIGDRSFKRLVESLEHLHILRVTNVPDLIPRYPVFRFTDIGEELQINTLKSEYLKRSLNLGHFHNLEAYLHGVAGTQHNQGEFKLEINRDIALVNKGLDALEDKYLVPGHWWVLENKGMVQSDDGTWKLNGDRSKKKQEEEDEKEENNCKFP

SEQ ID NO: 78373 - protein, 255 aa, Arabidopsis thaliana; identical to SEQ ID NO: 70567
  peptide (1)..(255): Ceres Seq. ID no. 12640892
  misc_feature (1)..(255): Homolog of NCBI NO: 15224613 NR Description: putative lipase; protein id: At2g31100.1
  misc_feature (1)..(251): Homolog of NCBI NO: 21537306 NR Description: lipase-like protein [Arabidopsis thaliana]
  misc_feature (1)..(251): Homolog of NCBI NO: 15221426 NR Description: lipase-like protein; protein id: At1g06250.1, by cDNA: 12912. [Arabidopsis thaliana] >gi|25406908|pir||C86198
  misc_feature (1)..(232): Homolog of NCBI NO: 15233922 NR Description: lipase-like protein; protein id: At4g18550.1
  misc_feature (1)..(232): Homolog of NCBI NO: 34911830 NR Description: lipase-like protein [Oryza sativa (japonica
  misc_feature (35)..(244): Homolog of NCBI NO: 34911870 NR Description: lipase-like protein [Oryza sativa (japonica
  misc_feature (1)..(57): Homolog of NCBI NO: 34911870 NR Description: lipase-like protein [Oryza sativa (japonica
  misc_feature (1)..(232): Homolog of NCBI NO: 34911842 NR Description: lipase-like protein [Oryza sativa (japonica
  misc_feature (1)..(248): Homolog of NCBI NO: 34911832 NR Description: lipase-like protein [Oryza sativa (japonica
  misc_feature (9)..(232): Homolog of NCBI NO: 4103627 NR Description: lipase [Dianthus caryophyllus]

SEQ ID NO: 78374 - DNA, 1104 bp, Arabidopsis thaliana
  misc_feature (1)..(1104): Ceres Seq. ID no. 12640904
  misc_feature: MA Experiment ID: 20000180 Result: Down-regulated in Transcription
  misc_feature: MA Experiment 20000180 PARAMETER Experiment Name: At_Germinating_Seeds_P Parameter: Age (hr) Value: 24 vs. 0
  misc_feature: MA Experiment 20000180 PARAMETER Experiment Name: At_Germinating_Seeds_P Parameter: Tissue Value: Germinating Seeds
  misc_feature: MA Experiment ID: 20000184 Result: Down-regulated in Transcription
  misc_feature: MA Experiment 20000184 PARAMETER Experiment Name: At_Shoots__P Parameter: Age (day) Value: 7
  misc_feature: MA Experiment 20000184 PARAMETER Experiment Name: At_Shoots__P Parameter: Tissue Value: Shoots vs. Whole Plant
  misc_feature: MA Experiment ID: 20001451 Result: Down-regulated in Transcription
  misc_feature: MA Experiment 20001451 PARAMETER Experiment Name: At_Far-red-induction_P Parameter: Age (day) Value: 7
  misc_feature: MA Experiment 20001451 PARAMETER Experiment Name: At_Far-red-induction_P Parameter: Light Value: Far-red vs. White
  misc_feature: MA Experiment 20001451 PARAMETER Experiment Name: At_Far-red-induction_P Parameter: Organism Value: A. thaliana
  misc_feature: MA Experiment 20001451 PARAMETER Experiment Name: At_Far-red-induction_P Parameter: Plant Line Value: Columbia
  misc_feature: MA Experiment 20001451 PARAMETER Experiment Name: At_Far-red-induction_P Parameter: Timepoint (hr) Value: 24
  misc_feature: MA Experiment 20001451 PARAMETER Experiment Name: At_Far-red-induction_P Parameter: Tissue Value: Whole Plant
atgggtgttgcgaatcggagtcttgctgatgcttatgttgcggttttgaattttaatgaggctttgccttatgcgttgaaggcgttggagattcataagaaggagttggggaataattcagctgaggttgcgcaggatcggaggctactcggtgtgatttatagtggtttggagcaacatgacaaggcgttggagcagaaccgattgtctcagagagtgttaaagaattgggggatgaagttggagctgattcgtgcggagattgatgctgctaacatgaaggttgctttgggtaaatacgaggaagcgattgatatattgaagagcgttgttcaacaaactgacaaggacagtgagatgagagctatggtgtttatatcaatgtcgaaagctttggtaaaccaacagaagtttgctgaatcaaagagatgtttggagtttgcttgtgaaatcctcgagaaaaaagaaacagctttgccagttgaagtcgctgaagcatactctgaggtagcaatgcagtacgagtcaatgaacgaatttgaaaccgccatctctttattgcagaaaactttaggtatactagagaagcttcctcaagaacagcactcagaaggaagtgtttctgctaggataggttggttgcttctattctcaggccgagtctcacaagcggttccttacttggaaagtgcagccgagaggttaaaagaaagctttggtgctaaacattttggagttggatatgtatataacaatctcggtgctgcttatttagaactcggaagacctcaatccgctgctcaaatgtttgcagttgctaaagacattatggatgtttcacttggtccaaaccatgtggattccatcgatgcttgccagaatctttctaaagcttacgctggaatgggaaattatagcctcgcagtggaatttcaacagcgagtaatcaatgcttgggataatcatggagatagcgcgaaagacgaaatgaaagaagcgaaaagacttcttgaggatttgcgattgaaggctcgaggaggtgtatcaacgaataagcttctgaataaggctttacctttgcccaagccaagccattcatcttag

SEQ ID NO: 78375 - protein, 367 aa, Arabidopsis thaliana
  peptide (1)..(367): Ceres Seq. ID no. 12640905
  misc_feature (289)..(322): Pfam Name: TPR Domain Pfam Description: TPR Domain
  misc_feature (1)..(367): Homolog of NCBI NO: 25408142 NR Description: probable kinesin light chain [imported] - thaliana >gi|4432819|gb|AAD20669.1| putative kinesin light chain
  misc_feature (1)..(367): Homolog of NCBI NO: 30684882 NR Description: tetratricopeptide repeat (TPR)-containing protein thaliana] >gi|17380952|gb|AAL36288.1| putative kinesin light
  misc_feature (1)..(346): Homolog of NCBI NO: 27261475 NR Description: Hypothetical protein [Oryza sativa (japonica
  misc_feature (1)..(363): Homolog of NCBI NO: 21554384 NR Description: putative kinesin light chain [Arabidopsis
  misc_feature (1)..(363): Homolog of NCBI NO: 15236944 NR Description: putative protein; protein id: At4g10840.1, by cDNA: 2538., supported by cDNA: gi_18176147, supported by
  misc_feature (1)..(358): Homolog of NCBI NO: 19387245 NR Description: putative kinesin light chain gene [Oryza sativa
  misc_feature (1)..(358): Homolog of NCBI NO: 20152971 NR Description: similar to A. thaliana protein BAB01483 similar
  misc_feature (1)..(354): Homolog of NCBI NO: 15232873 NR Description: hypothetical protein; protein id: At3g27960.1 thaliana] >gi|9294312|dbj|BAB01483.1| contains similarity to
  misc_feature (1)..(354): Homolog of NCBI NO: 33589662 NR Description: At3g27960 [Arabidopsis thaliana]
  misc_feature (1)..(352): Homolog of NCBI NO: 15223528 NR Description: hypothetical protein; protein id: At1g27500.1
MGVANRSLADAYVAVLNFNEALPYALKALEIHKKELGNNSAEVAQDRRLLGVIYSGLEQHDKALEQNRLSQRVLKNWGMKLELIRAEIDAANMKVALGKYEEAIDILKSVVQQTDKDSEMRAMVFISMSKALVNQQKFAESKRCLEFACEILEKKETALPVEVAEAYSEVAMQYESMNEFETAISLLQKTLGILEKLPQEQHSEGSVSARIGWLLLFSGRVSQAVPYLESAAERLKESFGAKHFGVGYVYNNLGAAYLELGRPQSAAQMFAVAKDIMDVSLGPNHVDSIDACQNLSKAYAGMGNYSLAVEFQQRVINAWDNHGDSAKDEMKEAKRLLEDLRLKARGGVSTNKLLNKALPLPKPSHSS

SEQ ID NO: 78376 - protein, 289 aa, Arabidopsis thaliana
  peptide (1)..(289): Ceres Seq. ID no. 12640906
  misc_feature (211)..(244): Pfam Name: TPR Domain Pfam Description: TPR Domain
  misc_feature (1)..(289): Homolog of NCBI NO: 25408142 NR Description: probable kinesin light chain [imported] - thaliana >gi|4432819|gb|AAD20669.1| putative kinesin light chain
  misc_feature (1)..(289): Homolog of NCBI NO: 30684882 NR Description: tetratricopeptide repeat (TPR)-containing protein thaliana] >gi|17380952|gb|AAL36288.1| putative kinesin light
  misc_feature (1)..(268): Homolog of NCBI NO: 27261475 NR Description: Hypothetical protein [Oryza sativa (japonica
  misc_feature (1)..(285): Homolog of NCBI NO: 21554384 NR Description: putative kinesin light chain [Arabidopsis
  misc_feature (1)..(285): Homolog of NCBI NO: 15236944 NR Description: putative protein; protein id: At4g10840.1, by cDNA: 2538., supported by cDNA: gi_18176147, supported by
  misc_feature (1)..(280): Homolog of NCBI NO: 19387245 NR Description: putative kinesin light chain gene [Oryza sativa
  misc_feature (1)..(280): Homolog of NCBI NO: 20152971 NR Description: similar to A. thaliana protein BAB01483 similar
  misc_feature (1)..(276): Homolog of NCBI NO: 15232873 NR Description: hypothetical protein; protein id: At3g27960.1 thaliana] >gi|9294312|dbj|BAB01483.1| contains similarity to
  misc_feature (1)..(276): Homolog of NCBI NO: 33589662 NR Description: At3g27960 [Arabidopsis thaliana]
  misc_feature (1)..(274): Homolog of NCBI NO: 15223528 NR Description: hypothetical protein; protein id: At1g27500.1
MKLELIRAEIDAANMKVALGKYEEAIDILKSVVQQTDKDSEMRAMVFISMSKALVNQQKFAESKRCLEFACEILEKKETALPVEVAEAYSEVAMQYESMNEFETAISLLQKTLGILEKLPQEQHSEGSVSARIGWLLLFSGRVSQAVPYLESAAERLKESFGAKHFGVGYVYNNLGAAYLELGRPQSAAQMFAVAKDIMDVSLGPNHVDSIDACQNLSKAYAGMGNYSLAVEFQQRVINAWDNHGDSAKDEMKEAKRLLEDLRLKARGGVSTNKLLNKALPLPKPSHSS

SEQ ID NO: 78377 - protein, 275 aa, Arabidopsis thaliana
  peptide (1)..(275): Ceres Seq. ID no. 12640907
  misc_feature (197)..(230): Pfam Name: TPR Domain Pfam Description: TPR Domain
  misc_feature (1)..(275): Homolog of NCBI NO: 25408142 NR Description: probable kinesin light chain [imported] - thaliana >gi|4432819|gb|AAD20669.1| putative kinesin light chain
  misc_feature (1)..(275): Homolog of NCBI NO: 30684882 NR Description: tetratricopeptide repeat (TPR)-containing protein thaliana] >gi|17380952|gb|AAL36288.1| putative kinesin light
  misc_feature (1)..(254): Homolog of NCBI NO: 27261475 NR Description: Hypothetical protein [Oryza sativa (japonica
  misc_feature (1)..(271): Homolog of NCBI NO: 21554384 NR Description: putative kinesin light chain [Arabidopsis
  misc_feature (1)..(271): Homolog of NCBI NO: 15236944 NR Description: putative protein; protein id: At4g10840.1, by cDNA: 2538., supported by cDNA: gi_18176147, supported by
  misc_feature (1)..(266): Homolog of NCBI NO: 19387245 NR Description: putative kinesin light chain gene [Oryza sativa
  misc_feature (1)..(266): Homolog of NCBI NO: 20152971 NR Description: similar to A. thaliana protein BAB01483 similar
  misc_feature (1)..(262): Homolog of NCBI NO: 15232873 NR Description: hypothetical protein; protein id: At3g27960.1 thaliana] >gi|9294312|dbj|BAB01483.1| contains similarity to
  misc_feature (1)..(262): Homolog of NCBI NO: 33589662 NR Description: At3g27960 [Arabidopsis thaliana]
  misc_feature (1)..(260): Homolog of NCBI NO: 15223528 NR Description: hypothetical protein; protein id: At1g27500.1
MKVALGKYEEAIDILKSVVQQTDKDSEMRAMVFISMSKALVNQQKFAESKRCLEFACEILEKKETALPVEVAEAYSEVAMQYESMNEFETAISLLQKTLGILEKLPQEQHSEGSVSARIGWLLLFSGRVSQAVPYLESAAERLKESFGAKHFGVGYVYNNLGAAYLELGRPQSAAQMFAVAKDIMDVSLGPNHVDSIDACQNLSKAYAGMGNYSLAVEFQQRVINAWDNHGDSAKDEMKEAKRLLEDLRLKARGGVSTNKLLNKALPLPKPSHSS

SEQ ID NO: 78378 - DNA, 2896 bp, Arabidopsis thaliana
  misc_feature (1)..(2896): Ceres Seq. ID no. 12640920
  misc_feature: MA Experiment ID: 108576 Result: Down-regulated in Transcription
  misc_feature: MA Experiment 108576 PARAMETER Experiment Name: At_42deg_Heat_cDNA_P Parameter: Temperature (deg C) Value: 42 vs. 22
  misc_feature: MA Experiment 108576 PARAMETER Experiment Name: At_42deg_Heat_cDNA_P Parameter: Timepoint (hr) Value: 1
  misc_feature: MA Experiment 108576 PARAMETER Experiment Name: At_42deg_Heat_cDNA_P Parameter: Tissue Value: Aerial
  misc_feature: MA Experiment ID: 108595 Result: Down-regulated in Transcription
  misc_feature: MA Experiment 108595 PARAMETER Experiment Name: At_Ler-pi_Ovule_cDNA_P Parameter: Plant Line Value: null
  misc_feature: MA Experiment ID: 20000144 Result: Down-regulated in Transcription
  misc_feature: MA Experiment 20000144 PARAMETER Experiment Name: At_42deg_Heat_cDNA_P Parameter: Temperature (deg C) Value: 42 vs. 22
  misc_feature: MA Experiment 20000144 PARAMETER Experiment Name: At_42deg_Heat_cDNA_P Parameter: Timepoint (hr) Value: 1
  misc_feature: MA Experiment 20000144 PARAMETER Experiment Name: At_42deg_Heat_cDNA_P Parameter: Tissue Value: Aerial
  misc_feature: MA Experiment ID: 20000224 Result: Up-regulated in Transcription
  misc_feature: MA Experiment ID: 20001451 Result: Down-regulated in Transcription
  misc_feature: MA Experiment 20001451 PARAMETER Experiment Name: At_Far-red-induction_P Parameter: Age (day) Value: 7
  misc_feature: MA Experiment 20001451 PARAMETER Experiment Name: At_Far-red-induction_P Parameter: Light Value: Far-red vs. White
  misc_feature: MA Experiment 20001451 PARAMETER Experiment Name: At_Far-red-induction_P Parameter: Organism Value: A. thaliana
  misc_feature: MA Experiment 20001451 PARAMETER Experiment Name: At_Far-red-induction_P Parameter: Plant Line Value: Columbia
  misc_feature: MA Experiment 20001451 PARAMETER Experiment Name: At_Far-red-induction_P Parameter: Timepoint (hr) Value: 24
  misc_feature: MA Experiment 20001451 PARAMETER Experiment Name: At_Far-red-induction_P Parameter: Tissue Value: Whole Plant
atggcgtcaacgccgcctcactgggtcaccaccaccaacaaccaccgtccatggcttcctcagcgtcctcgtcccggtcgctccgttacctcagctcctccctcttcttcagcctctgtttcttcagctcatctttcacagactactccaaatttctctcctttgcaaacccccaaatcagatttctccggtcgtcaatctacccgattcgtctcccccgccaccaataaccaccgtcagaccaggcaaaacccaaactacaaccaccgtccgtatggtgcctcttcttctcctcgtggctcagctcctccgccttcatctgtagctactgtagctccagctcaactatcacaacctcctaacttttcgcctctccaaaccccaaaatccgatctttcatcggatttttcaggtagacgatcgactagattcgtctccaagatgcatttcgggcggcagaagacgacaatggctacgagacatagctctgctgctgaagatgcacttcaaaacgctattgatttctctggagacgatgagatgtttcatagtctaatgttgagctttgagtcaaagctgtgtggctctgacgactgtacctatataatccgtgagttagggaatcgtaatgagtgcgataaagctgttggcttttatgagtttgcggttaaacgagagaggagaaagaacgagcaggggaagttagctagtgctatgataagtactcttggtagatatggtaaagtaactattgctaagaggattttcgaaactgcttttgctggtggatatggaaacacggtttacgccttctcggctttgatcagcgcttatgggagaagtgggctacatgaggaagccattagtgtcttcaactccatgaaagagtatggcttgaggccgaatttggttacctacaatgctgtgattgacgcttgcggtaaaggcgggatggagtttaagcaagtagccaagtttttcgatgagatgcagaggaacggtgtgcagccagatagaataactttcaactcgttgcttgctgtttgcagtagaggagggttgtgggaagcagcaaggaatctgtttgatgagatgacgaatagaaggattgagcaagatgttttttcttataatacgcttttggatgcaatttgcaaaggtgggcagatggaccttgctttcgaaatccttgctcagatgccagttaagagaatcatgcctaatgttgtaagttatagcaccgttattgatgggtttgcaaaagccggaagatttgatgaagctcttaacttgtttggtgaaatgagatatcttggtattgcattagatagagtttcttacaatacattgctttcaatctacactaaagttggtagatctgaagaagctttggatattctgagagaaatggcatctgttgggattaaaaaggatgttgtgacttataatgctcttcttggaggatatgggaaacaagggaaatatgatgaagtgaagaaagttttcactgagatgaagcgagagcatgtgttgcctaacttactgacttattcaactttgatcgatgggtactcgaaggggggtttgtataaagaggcaatggagatatttagggagtttaagagcgccggattaagagctgatgttgttttgtacagtgcattgattgatgcattgtgcaagaatgggttggtgggttctgctgtttctttgatcgatgagatgacaaaggaaggaattagtcctaatgttgtaacttataattccataatcgatgcctttggtcgttctgcaactatggacagatcagccgattatagcaatggtggatctttgcctttctcttcttctgctctgagtgcattgactgaaacagagggtaatcgggtaatacagttatttgggcagttaacaactgagagtaacaaccgaacgacgaaagattgtgaggagggtatgcaggagctctcctgtatattggaagttttccgcaaaatgcatcagctggaaattaaaccaaatgttgtaaccttttcagcgattctgaatgcttgcagtcggtgtaactcatttgaagatgcatcaatgctactagaggagctcaggctgtttgataataaggtatatggtgttgttcatggacttctcatgggccagagagagaatgtatggctccaagctcagagcttatttgacaaagtaaatgaaatggatggttcgactgcttctgccttctacaatgccctaactgacatgctttggcactttggccagaaacgaggtgcagaactggtggcacttgagggaagatctaggcaagtttgggaaaacgtgtggtctgattcttgcttggacttacacctcatgtcttctggagctgcacgtgcaatggtccatgcgtggctactaaacatacgctccattgtctatgaaggtcatgagttacctaaagtcttgagtatattgactggctgggggaaacacagcaaagtggttggagacggagcactaagacgagcggttgaagttcttttgaggggaatggatgcaccattccacctgtcaaaatgcaacatgggacggttcacatcaagcggttcggtggtagcaacttggctgcgtgaatcagccacactgaaactcttaatcctccatgaccacataacaaccgccacagctactactacaacaatgaaatcaacagaccaacaacaacggaaacagacgtcgtttgctttacagcctcttcttttgtagcttagtgtatgatgtaaaagtaaaacaatttgtgttgatcattaaagtgtataggaccaatggtcctaacaatgtttggctctgtgctaatatttgtaacaaagcaactcgattgattatgtgaaaatcgttttgtctt

SEQ ID NO: 78379 - protein, 918 aa, Arabidopsis thaliana
  peptide (1)..(918): Ceres Seq. ID no. 12640921
  misc_feature (304)..(339): Pfam Name: PPR repeat Pfam Description: PPR repeat
  misc_feature (189)..(719): Homolog of NCBI NO: 15221411 NR Description: hypothetical protein; protein id: At1g74850.1
  misc_feature (661)..(861): Homolog of NCBI NO: 15221411 NR Description: hypothetical protein; protein id: At1g74850.1
  misc_feature (83)..(640): Homolog of NCBI NO: 15242557 NR Description: putative protein; protein id: At5g02860.1
  misc_feature (99)..(603): Homolog of NCBI NO: 34393454 NR Description: putative pentatricopeptide (PPR)
  misc_feature (266)..(704): Homolog of NCBI NO: 15242446 NR Description: putative protein; protein id: At5g39710.1
  misc_feature (167)..(595): Homolog of NCBI NO: 10177016 NR Description: maize crp1 protein-like [Arabidopsis thaliana]
  misc_feature (167)..(595): Homolog of NCBI NO: 15238925 NR Description: maize crp1 protein-like; protein id: At5g42310.1
  misc_feature (239)..(632): Homolog of NCBI NO: 15221635 NR Description: unknown protein; protein id: At1g62930.1
  misc_feature (237)..(602): Homolog of NCBI NO: 34393454 NR Description: putative pentatricopeptide (PPR)
  misc_feature (237)..(615): Homolog of NCBI NO: 15221549 NR Description: PPR-repeat protein; protein id: At1g62670.1
MASTPPHWVTTTNNHRPWLPQRPRPGRSVTSAPPSSSASVSSAHLSQTTPNFSPLQTPKSDFSGRQSTRFVSPATNNHRQTRQNPNYNHRPYGASSSPRGSAPPPSSVATVAPAQLSQPPNFSPLQTPKSDLSSDFSGRRSTRFVSKMHFGRQKTTMATRHSSAAEDALQNAIDFSGDDEMFHSLMLSFESKLCGSDDCTYIIRELGNRNECDKAVGFYEFAVKRERRKNEQGKLASAMISTLGRYGKVTIAKRIFETAFAGGYGNTVYAFSALISAYGRSGLHEEAISVFNSMKEYGLRPNLVTYNAVIDACGKGGMEFKQVAKFFDEMQRNGVQPDRITFNSLLAVCSRGGLWEAARNLFDEMTNRRIEQDVFSYNTLLDAICKGGQMDLAFEILAQMPVKRIMPNVVSYSTVIDGFAKAGRFDEALNLFGEMRYLGIALDRVSYNTLLSIYTKVGRSEEALDILREMASVGIKKDVVTYNALLGGYGKQGKYDEVKKVFTEMKREHVLPNLLTYSTLIDGYSKGGLYKEAMEIFREFKSAGLRADVVLYSALIDALCKNGLVGSAVSLIDEMTKEGISPNVVTYNSIIDAFGRSATMDRSADYSNGGSLPFSSSALSALTETEGNRVIQLFGQLTTESNNRTTKDCEEGMQELSCILEVFRKMHQLEIKPNVVTFSAILNACSRCNSFEDASMLLEELRLFDNKVYGVVHGLLMGQRENVWLQAQSLFDKVNEMDGSTASAFYNALTDMLWHFGQKRGAELVALEGRSRQVWENVWSDSCLDLHLMSSGAARAMVHAWLLNIRSIVYEGHELPKVLSILTGWGKHSKVVGDGALRRAVEVLLRGMDAPFHLSKCNMGRFTSSGSVVATWLRESATLKLLILHDHITTATATTTTMKSTDQQQRKQTSFALQPLLL

SEQ ID NO: 78380 - protein, 771 aa, Arabidopsis thaliana
  peptide (1)..(771): Ceres Seq. ID no. 12640922
  misc_feature (157)..(192): Pfam Name: PPR repeat Pfam Description: PPR repeat
  misc_feature (42)..(572): Homolog of NCBI NO: 15221411 NR Description: hypothetical protein; protein id: At1g74850.1
  misc_feature (514)..(714): Homolog of NCBI NO: 15221411 NR Description: hypothetical protein; protein id: At1g74850.1
  misc_feature (1)..(493): Homolog of NCBI NO: 15242557 NR Description: putative protein; protein id: At5g02860.1
  misc_feature (1)..(456): Homolog of NCBI NO: 34393454 NR Description: putative pentatricopeptide (PPR)
  misc_feature (119)..(557): Homolog of NCBI NO: 15242446 NR Description: putative protein; protein id: At5g39710.1
  misc_feature (20)..(448): Homolog of NCBI NO: 10177016 NR Description: maize crp1 protein-like [Arabidopsis thaliana]
  misc_feature (20)..(448): Homolog of NCBI NO: 15238925 NR Description: maize crp1 protein-like; protein id: At5g42310.1
  misc_feature (92)..(485): Homolog of NCBI NO: 15221635 NR Description: unknown protein; protein id: At1g62930.1
  misc_feature (90)..(455): Homolog of NCBI NO: 34393454 NR Description: putative pentatricopeptide (PPR)
  misc_feature (90)..(468): Homolog of NCBI NO: 15221549 NR Description: PPR-repeat protein; protein id: At1g62670.1
MHFGRQKTTMATRHSSAAEDALQNAIDFSGDDEMFHSLMLSFESKLCGSDDCTYIIRELGNRNECDKAVGFYEFAVKRERRKNEQGKLASAMISTLGRYGKVTIAKRIFETAFAGGYGNTVYAFSALISAYGRSGLHEEAISVFNSMKEYGLRPNLVTYNAVIDACGKGGMEFKQVAKFFDEMQRNGVQPDRITFNSLLAVCSRGGLWEAARNLFDEMTNRRIEQDVFSYNTLLDAICKGGQMDLAFEILAQMPVKRIMPNVVSYSTVIDGFAKAGRFDEALNLFGEMRYLGIALDRVSYNTLLSIYTKVGRSEEALDILREMASVGIKKDVVTYNALLGGYGKQGKYDEVKKVFTEMKREHVLPNLLTYSTLIDGYSKGGLYKEAMEIFREFKSAGLRADVVLYSALIDALCKNGLVGSAVSLIDEMTKEGISPNVVTYNSIIDAFGRSATMDRSADYSNGGSLPFSSSALSALTETEGNRVIQLFGQLTTESNNRTTKDCEEGMQELSCILEVFRKMHQLEIKPNVVTFSAILNACSRCNSFEDASMLLEELRLFDNKVYGVVHGLLMGQRENVWLQAQSLFDKVNEMDGSTASAFYNALTDMLWHFGQKRGAELVALEGRSRQVWENVWSDSCLDLHLMSSGAARAMVHAWLLNIRSIVYEGHELPKVLSILTGWGKHSKVVGDGALRRAVEVLLRGMDAPFHLSKCNMGRFTSSGSVVATWLRESATLKLLILHDHITTATATTTTMKSTDQQQRKQTSFALQPLLL

SEQ ID NO: 78381 - protein, 762 aa, Arabidopsis thaliana
  peptide (1)..(762): Ceres Seq. ID no. 12640923
  misc_feature (148)..(183): Pfam Name: PPR repeat Pfam Description: PPR repeat
  misc_feature (33)..(563): Homolog of NCBI NO: 15221411 NR Description: hypothetical protein; protein id: At1g74850.1
  misc_feature (505)..(705): Homolog of NCBI NO: 15221411 NR Description: hypothetical protein; protein id: At1g74850.1
  misc_feature (1)..(484): Homolog of NCBI NO: 15242557 NR Description: putative protein; protein id: At5g02860.1
  misc_feature (1)..(447): Homolog of NCBI NO: 34393454 NR Description: putative pentatricopeptide (PPR)
  misc_feature (110)..(548): Homolog of NCBI NO: 15242446 NR Description: putative protein; protein id: At5g39710.1
  misc_feature (11)..(439): Homolog of NCBI NO: 10177016 NR Description: maize crp1 protein-like [Arabidopsis thaliana]
  misc_feature (11)..(439): Homolog of NCBI NO: 15238925 NR Description: maize crp1 protein-like; protein id: At5g42310.1
  misc_feature (83)..(476): Homolog of NCBI NO: 15221635 NR Description: unknown protein; protein id: At1g62930.1
  misc_feature (81)..(446): Homolog of NCBI NO: 34393454 NR Description: putative pentatricopeptide (PPR)
  misc_feature (81)..(459): Homolog of NCBI NO: 15221549 NR Description: PPR-repeat protein; protein id: At1g62670.1
MATRHSSAAEDALQNAIDFSGDDEMFHSLMLSFESKLCGSDDCTYIIRELGNRNECDKAVGFYEFAVKRERRKNEQGKLASAMISTLGRYGKVTIAKRIFETAFAGGYGNTVYAFSALISAYGRSGLHEEAISVFNSMKEYGLRPNLVTYNAVIDACGKGGMEFKQVAKFFDEMQRNGVQPDRITFNSLLAVCSRGGLWEAARNLFDEMTNRRIEQDVFSYNTLLDAICKGGQMDLAFEILAQMPVKRIMPNVVSYSTVIDGFAKAGRFDEALNLFGEMRYLGIALDRVSYNTLLSIYTKVGRSEEALDILREMASVGIKKDVVTYNALLGGYGKQGKYDEVKKVFTEMKREHVLPNLLTYSTLIDGYSKGGLYKEAMEIFREFKSAGLRADVVLYSALIDALCKNGLVGSAVSLIDEMTKEGISPNVVTYNSIIDAFGRSATMDRSADYSNGGSLPFSSSALSALTETEGNRVIQLFGQLTTESNNRTTKDCEEGMQELSCILEVFRKMHQLEIKPNVVTFSAILNACSRCNSFEDASMLLEELRLFDNKVYGVVHGLLMGQRENVWLQAQSLFDKVNEMDGSTASAFYNALTDMLWHFGQKRGAELVALEGRSRQVWENVWSDSCLDLHLMSSGAARAMVHAWLLNIRSIVYEGHELPKVLSILTGWGKHSKVVGDGALRRAVEVLLRGMDAPFHLSKCNMGRFTSSGSVVATWLRESATLKLLILHDHITTATATTTTMKSTDQQQRKQTSFALQPLLL

SEQ ID NO: 78382 - DNA, 1011 bp, Arabidopsis thaliana
  misc_feature (1)..(1011): Ceres Seq. ID no. 12640955
  misc_feature: MA Experiment ID: 20000355 Result: Up-regulated in Transcription
  misc_feature: MA Experiment 20000355 PARAMETER Experiment Name: At_Siliques_Sub_P Parameter: Age (day) Value: 21
  misc_feature: MA Experiment 20000355 PARAMETER Experiment Name: At_Siliques_Sub_P Parameter: Organism Value: A. thaliana
  misc_feature: MA Experiment 20000355 PARAMETER Experiment Name: At_Siliques_Sub_P Parameter: Plant Line Value: WS
  misc_feature: MA Experiment 20000355 PARAMETER Experiment Name: At_Siliques_Sub_P Parameter: Tissue Value: Less Than 5mm Siliques vs. Whole Plant
atgtcgacttctaaagccataaccttaactctcttcatcacaacaacattactagcgtcctgcgacgcagccgcaaatgcaacaacgaaaccgctcttcccagcgattctaatcttcggcgattcaaccgtcgacacaggcaacaacaactaccctttaccaacaatcttcagagctgaacactttccttacggcatggatcttccagacggaaaagctaacggaagattctcaaacggaaaacttatctccgacataatcgcaaccaaactcaacatcaaagactggtgcggttacgacgacctaaccagtctctcgacacaagccattcgtgtctcggaacaaccaaacatgttcaagagttacattgctcgtctcaaaggtatcgtgggagacaagaaagcgatggagatcataaacaatgctttcgtggttgtgagtgcagggcctaatgatttcattttgaactattacgatattccctcaaggcgtctcgagtatcctttcatttctggttaccaagattttattcttaagaggcttgaaaatttcgtgcgggagctttacagtttaggtgtccggaatgttttggttggaggtttaccgccaatggggtgtttaccgatccatatgactgctaaattccgcaacatttttagattctgcttggaacaccataacaaagactctgttttgtacaatgagaaacttcagaagctcttgccccaaatcgaagcatctcttccaggaagcaaattcctttacgccgatgtctataatcctatgatggagatgatccaaaaccctagcaaatacgggttcaaagagacgaagagaggatgttgtggaacagggttcttggagacgagcttcatgtgtaatgtcttttctcctgtgtgtcaaaatcggtcggagtttatgttctttgactcgattcatccatcggaagctacctataatgtcataggcaatcgtctggatcctctgattcgtgggaagtttcaggcttaa

SEQ ID NO: 78383 - protein, 336 aa, Arabidopsis thaliana
  peptide (1)..(336): Ceres Seq. ID no. 12640956
  misc_feature (36)..(96): Pfam Name: GDSL-like Lipase/Acylhydrolase Pfam Description: GDSL-like Lipase/Acylhydrolase
  misc_feature (98)..(336): Homolog of NCBI NO: 21537117 NR Description: putative GDSL-motif lipase/hydrolase [Arabidopsis
  misc_feature (1)..(96): Homolog of NCBI NO: 21537117 NR Description: putative GDSL-motif lipase/hydrolase [Arabidopsis
  misc_feature (98)..(336): Homolog of NCBI NO: 15225096 NR Description: putative GDSL-motif lipase/hydrolase; protein id:
  misc_feature (1)..(96): Homolog of NCBI NO: 15225096 NR Description: putative GDSL-motif lipase/hydrolase; protein id:
  misc_feature (1)..(336): Homolog of NCBI NO: 25336273 NR Description: probable GDSL-motif lipase/hydrolase [imported] -
  misc_feature (98)..(336): Homolog of NCBI NO: 15217963 NR Description: proline-rich protein, putative; protein id:
  misc_feature (1)..(96): Homolog of NCBI NO: 15217963 NR Description: proline-rich protein, putative; protein id:
  misc_feature (98)..(336): Homolog of NCBI NO: 25336283 NR Description: hypothetical protein RXF26 [imported] -
  misc_feature (1)..(96): Homolog of NCBI NO: 25336283 NR Description: hypothetical protein RXF26 [imported] -
  misc_feature (98)..(336): Homolog of NCBI NO: 21592974 NR Description: proline-rich protein, putative [Arabidopsis
MSTSKAITLTLFITTTLLASCDAAANATTKPLFPAILIFGDSTVDTGNNNYPLPTIFRAEHFPYGMDLPDGKANGRFSNGKLISDIIATKLNIKDWCGYDDLTSLSTQAIRVSEQPNMFKSYIARLKGIVGDKKAMEIINNAFVVVSAGPNDFILNYYDIPSRRLEYPFISGYQDFILKRLENFVRELYSLGVRNVLVGGLPPMGCLPIHMTAKFRNIFRFCLEHHNKDSVLYNEKLQKLLPQIEASLPGSKFLYADVYNPMMEMIQNPSKYGFKETKRGCCGTGFLETSFMCNVFSPVCQNRSEFMFFDSIHPSEATYNVIGNRLDPLIRGKFQA

SEQ ID NO: 78384 - protein, 271 aa, Arabidopsis thaliana
  peptide (1)..(271): Ceres Seq. ID no. 12640957
  misc_feature (33)..(261): Pfam Name: GDSL-like Lipase/Acylhydrolase Pfam Description: GDSL-like Lipase/Acylhydrolase
  misc_feature (33)..(271): Homolog of NCBI NO: 21537117 NR Description: putative GDSL-motif lipase/hydrolase [Arabidopsis
  misc_feature (1)..(31): Homolog of NCBI NO: 21537117 NR Description: putative GDSL-motif lipase/hydrolase [Arabidopsis
  misc_feature (33)..(271): Homolog of NCBI NO: 15225096 NR Description: putative GDSL-motif lipase/hydrolase; protein id:
  misc_feature (1)..(31): Homolog of NCBI NO: 15225096 NR Description: putative GDSL-motif lipase/hydrolase; protein id:
  misc_feature (1)..(271): Homolog of NCBI NO: 25336273 NR Description: probable GDSL-motif lipase/hydrolase [imported] -
  misc_feature (33)..(271): Homolog of NCBI NO: 15217963 NR Description: proline-rich protein, putative; protein id:
  misc_feature (1)..(31): Homolog of NCBI NO: 15217963 NR Description: proline-rich protein, putative; protein id:
  misc_feature (33)..(271): Homolog of NCBI NO: 25336283 NR Description: hypothetical protein RXF26 [imported] -
  misc_feature (1)..(31): Homolog of NCBI NO: 25336283 NR Description: hypothetical protein RXF26 [imported] -
  misc_feature (33)..(271): Homolog of NCBI NO: 21592974 NR Description: proline-rich protein, putative [Arabidopsis
MDLPDGKANGRFSNGKLISDIIATKLNIKDWCGYDDLTSLSTQAIRVSEQPNMFKSYIARLKGIVGDKKAMEIINNAFVVVSAGPNDFILNYYDIPSRRLEYPFISGYQDFILKRLENFVRELYSLGVRNVLVGGLPPMGCLPIHMTAKFRNIFRFCLEHHNKDSVLYNEKLQKLLPQIEASLPGSKFLYADVYNPMMEMIQNPSKYGFKETKRGCCGTGFLETSFMCNVFSPVCQNRSEFMFFDSIHPSEATYNVIGNRLDPLIRGKFQA

SEQ ID NO: 78385 - protein, 219 aa, Arabidopsis thaliana
  peptide (1)..(219): Ceres Seq. ID no. 12640958
  misc_feature (1)..(209): Pfam Name: GDSL-like Lipase/Acylhydrolase Pfam Description: GDSL-like Lipase/Acylhydrolase
  misc_feature (1)..(219): Homolog of NCBI NO: 21537117 NR Description: putative GDSL-motif lipase/hydrolase [Arabidopsis
  misc_feature (1)..(219): Homolog of NCBI NO: 15225096 NR Description: putative GDSL-motif lipase/hydrolase; protein id:
  misc_feature (1)..(219): Homolog of NCBI NO: 25336273 NR Description: probable GDSL-motif lipase/hydrolase [imported] -
  misc_feature (1)..(219): Homolog of NCBI NO: 15217963 NR Description: proline-rich protein, putative; protein id:
  misc_feature (1)..(219): Homolog of NCBI NO: 25336283 NR Description: hypothetical protein RXF26 [imported] -
  misc_feature (1)..(219): Homolog of NCBI NO: 21592974 NR Description: proline-rich protein, putative [Arabidopsis
  misc_feature (1)..(219): Homolog of NCBI NO: 15227734 NR Description: putative GDSL-motif lipase/hydrolase; protein id:
  misc_feature (1)..(160): Homolog of NCBI NO: 15224162 NR Description: putative GDSL-motif lipase/hydrolase; protein id:
  misc_feature (1)..(214): Homolog of NCBI NO: 15227723 NR Description: putative GDSL-motif lipase hydrolase; protein id:
  misc_feature (1)..(219): Homolog of NCBI NO: 18402700 NR Description: putative GDSL-motif lipase/hydrolase; protein id:
MFKSYIARLKGIVGDKKAMEIINNAFVVVSAGPNDFILNYYDIPSRRLEYPFISGYQDFILKRLENFVRELYSLGVRNVLVGGLPPMGCLPIHMTAKFRNIFRFCLEHHNKDSVLYNEKLQKLLPQIEASLPGSKFLYADVYNPMMEMIQNPSKYGFKETKRGCCGTGFLETSFMCNVFSPVCQNRSEFMFFDSIHPSEATYNVIGNRLDPLIRGKFQA

SEQ ID NO: 78386 - DNA, 914 bp, Arabidopsis thaliana
  misc_feature (1)..(914): Ceres Seq. ID no. 12640989
  misc_feature: MA Experiment ID: 108434 Result: Down-regulated in Transcription
  misc_feature: MA Experiment 108434 PARAMETER Experiment Name: At_Root_Tips_cDNA_P Parameter: Tissue Value: Root Tips
atttcctttgccagctccatctctctctctctctctctaaaaccagtctgcaactttctctctctcaaaatcagaaacaaaaaaaacgatgtcgtccgatgacgaaggaggagaagagtatctattcaagatagtgataatcggcgactctgccgtcgggaaatcgaaccttctctctcgctatgctcgtaacgagttcaacgctcattccaaggccacgatcggcgtcgagttccagacgcagaatatggaaatcgaaggtaaagaagttaaagctcagatttgggatactgctggtcaagaacggtttcgtgccgtcacttccgcttattatcgcggcgccgtcggagctctcgtcgtttacgatattagtcgtcgatccacgtttgagagtgttggtcgttggcttgatgagctcaagacacattcggatacaacggttgcgaggatgctggtgggaaacaaatgcgatctagaaagcataagagcggtgagcgtggaagaaggcaaagcactagctgaaaccgaaggactatttttcatggaaacatcagctctcgattcaacaaatgttaaaacagctttcgaaatggtaatccgtgacatctataccaatataagccggaaacaactcaactccgacacttataaaaccgaactaagcatgaaaaacagagtcagtctcgttaaggacgataataaaagctccacacaaggctttggtttctcttgctgttcttcctcgtgacctgaattttgatcccaaattatttttcttttgcttcatttgtggattttttttcttttgaatttttttcaaccatagaaaaaagggcagatcatatagattcaaaaattgtagtgtttatgtgtggatcgtatagtaaacaatttatacgataattatttattgc

SEQ ID NO: 78387 - protein, 219 aa, Arabidopsis thaliana
  peptide (1)..(219): Ceres Seq. ID no. 12640990
  misc_feature (14)..(175): Pfam Name: Ras family Pfam Description: Ras family
  misc_feature (1)..(219): Homolog of NCBI NO: 15225121 NR Description: GTP-binding protein, putative; protein id: supported by cDNA: 15416. [Arabidopsis thaliana]
  misc_feature (1)..(219): Homolog of NCBI NO: 21553627 NR Description: putative RAS superfamily GTP-binding protein
  misc_feature (1)..(219): Homolog of NCBI NO: 29893534 NR Description: putative RAS-related protein ARA-1 [Arabidopsis
  misc_feature (1)..(219): Homolog of NCBI NO: 1076457 NR Description: GTP-binding protein bra - rape
  misc_feature (1)..(219): Homolog of NCBI NO: 18390575 NR Description: RAS-related GTP-binding protein (ARA-1); protein At1g05810.1, supported by cDNA: gi_12083321 [Arabidopsis
  misc_feature (1)..(219): Homolog of NCBI NO: 17380746 NR Description: putative RAS-related protein ARA-1 [Arabidopsis
  misc_feature (1)..(217): Homolog of NCBI NO: 15224226 NR Description: Ras-related GTP-binding protein (ARA-4); protein
  misc_feature (2)..(218): Homolog of NCBI NO: 1370154 NR Description: RAB11G [Lotus japonicus]
MSSDDEGGEEYLFKIVIIGDSAVGKSNLLSRYARNEFNAHSKATIGVEFQTQNMEIEGKEVKAQIWDTAGQERFRAVTSAYYRGAVGALVVYDISRRSTFESVGRWLDELKTHSDTTVARMLVGNKCDLESIRAVSVEEGKALAETEGLFFMETSALDSTNVKTAFEMVIRDIYTNISRKQLNSDTYKTELSMKNRVSLVKDDNKSSTQGFGFSCCSSS

SEQ ID NO: 78388 - protein, 166 aa, Arabidopsis thaliana
  peptide (1)..(166): Ceres Seq. ID no. 12640991
  misc_feature (1)..(122): Pfam Name: Ras family Pfam Description: Ras family
  misc_feature (1)..(166): Homolog of NCBI NO: 15225121 NR Description: GTP-binding protein, putative; protein id: supported by cDNA: 15416. [Arabidopsis thaliana]
  misc_feature (1)..(166): Homolog of NCBI NO: 21553627 NR Description: putative RAS superfamily GTP-binding protein
  misc_feature (1)..(166): Homolog of NCBI NO: 29893534 NR Description: putative RAS-related protein ARA-1 [Arabidopsis
  misc_feature (1)..(166): Homolog of NCBI NO: 1076457 NR Description: GTP-binding protein bra - rape
  misc_feature (1)..(166): Homolog of NCBI NO: 18390575 NR Description: RAS-related GTP-binding protein (ARA-1); protein At1g05810.1, supported by cDNA: gi_12083321 [Arabidopsis
  misc_feature (1)..(166): Homolog of NCBI NO: 17380746 NR Description: putative RAS-related protein ARA-1 [Arabidopsis
  misc_feature (1)..(164): Homolog of NCBI NO: 15224226 NR Description: Ras-related GTP-binding protein (ARA-4); protein
  misc_feature (1)..(165): Homolog of NCBI NO: 1370154 NR Description: RAB11G [Lotus japonicus]
MEIEGKEVKAQIWDTAGQERFRAVTSAYYRGAVGALVVYDISRRSTFESVGRWLDELKTHSDTTVARMLVGNKCDLESIRAVSVEEGKALAETEGLFFMETSALDSTNVKTAFEMVIRDIYTNISRKQLNSDTYKTELSMKNRVSLVKDDNKSSTQGFGFSCCSSS

SEQ ID NO: 78389 - DNA, 1980 bp, Arabidopsis thaliana
  misc_feature (1)..(1980): Ceres Seq. ID no. 12641005
  misc_feature: MA Experiment ID: 20000184 Result: Down-regulated in Transcription
  misc_feature: MA Experiment 20000184 PARAMETER Experiment Name: At_Shoots__P Parameter: Age (day) Value: 7
  misc_feature: MA Experiment 20000184 PARAMETER Experiment Name: At_Shoots__P Parameter: Tissue Value: Shoots vs. Whole Plant
  misc_feature: MA Experiment ID: 20000235 Result: Down-regulated in Transcription
  misc_feature: MA Experiment 20000235 PARAMETER Experiment Name: At_Siliques_P Parameter: Age (day) Value: 21
  misc_feature: MA Experiment 20000235 PARAMETER Experiment Name: At_Siliques_P Parameter: Organism Value: A. thaliana
  misc_feature: MA Experiment 20000235 PARAMETER Experiment Name: At_Siliques_P Parameter: Plant Line Value: WS
  misc_feature: MA Experiment 20000235 PARAMETER Experiment Name: At_Siliques_P Parameter: Tissue Value: 5-10mm Siliques vs. Whole Plant
atggaggagaagcagaacaacagtcctgtgggagagaagcaacagagctttaatggtataataataaaccaaacacaagagaatcagacaaaatcaatggagaaacaacagagtttccgatgtgtggtggagaatcaaccgagaaaggcgagagctttagagaaacaagtgagtttccaaggtgtgaatgtagagaactatcagcaaagcagactcggaagatcaatggagaagcaacagagttttcgaggtgtcaacgttgagaatcataaacgtggagttatggagaagctaccgagttttggtagagcaacaatggagaggcagaagagtttccgtggtgggtttttggagaagcagaagagcttccgtgtggtgatggagaggcaattgagttttataggtgagaggaggaagaagaatgaatcaccagggaaaagaggagactcttctcttcatatcgctgcgagaaccgggaacttaagtaaggttaaagaactgattcgaggttgtggtgatgagttgaaagagttgttgtcaaagcaaaatcttgaaggagagactcctctttatactgcagcagagaatgggcattcaattgttgttgaggagatgttgaagcatatggaccttgaaactgcttccatcgctgctagaaacgggtttgatccatttcatgtcgccgccaaacaaggccatctcgaggtgttgaagatactgttggagacattccctaatttggcaatgacaacggatttatcgtgtacaactgcgttacacactgctgcaacacagggacatattgatgtggtgaatcttcttttggagacagactctaatttggctaagattgctaagaacaacggtaaaactgcgcttcactctgcagcaaggatgggtcatgtggaagttgttaaatctctgataggtaaggatccaagcattgggtttagaaccgataaaaaagggcaaactgctcttcacatggctgtaaaaggtcaaaatgatgggattgttgttgagttggtgaaacctgatgttgctgttttgagcgttgaggataataaaggaaatacaccattgcacattgccacaaacaaggggcgtattaagatagtacggtgtttggtatcttttgaaggcataaacctcaacccaataaacaaagctggagatacgccactcgatgtctctgagaagataggaaacgcagagcttgtgtcagttctgaaggaagcaggagctgctacagctaaagatctcggaaagcctcagaacccagctaagcaactgaagcaaacagtcagcgacatcaaacatgaagtacaatctcagcttcagcaatccagacaaacaggtgtaagagtccagaagatagcaaaaagactcaagaagctacacattagtggtctaaacaacgctataaactcagcaactgttgtggcagtgcttattgccacagtggctttcgcagcaatcttcacaatacccggtcagtacgaagaggaccggtcgaaaggagagttgctaggacaagctcatatagcaaacaaagcaccgtttctggtcttcttcatctttgacagcttggcactgtttatatccttagctgttgttgtggtgcagacttcagttgttgtgattgagcagaaggcgaaaaagaagcttgtgtttgtaatcaacaagctcatgtggtgtgcttgtctgttcatatccattgcctttgtttctctctcttatattgttgttggcaaagaggagatgtggttggctgtttgcgcgactgttatcggcggcacgattatgttgactacgattggtgcgatgtgctattgtgtggtcatgcataggatggaagaatctaaattgaggagcataaggaaagaaagaagcaagtctcagtctttctctatgtctcgtatgccgtctgattcagatattctaaatggtgaatacaataagagaatgtatgccctctga

SEQ ID NO: 78390 - protein, 659 aa, Arabidopsis thaliana; identical to SEQ ID NO: 70301
  peptide (1)..(659): Ceres Seq. ID no. 12641006
  misc_feature (356)..(389): Pfam Name: Ankyrin repeat Pfam Description: Ankyrin repeat
  misc_feature (42)..(659): Homolog of NCBI NO: 15220595 NR Description: unknown protein; protein id: At1g05640.1
  misc_feature (132)..(659): Homolog of NCBI NO: 15222993 NR Description: hypothetical protein; protein id: At1g07710.1
  misc_feature (145)..(659): Homolog of NCBI NO: 15238604 NR Description: ankyrin-like protein; protein id: At5g60070.1
  misc_feature (137)..(659): Homolog of NCBI NO: 24796797 NR Description: putative ankyrin repeat containing protein [Oryza
  misc_feature (146)..(659): Homolog of NCBI NO: 11357168 NR Description: ankyrin-like protein - Arabidopsis thaliana
  misc_feature (146)..(659): Homolog of NCBI NO: 30679697 NR Description: ankyrin repeat protein family [Arabidopsis
  misc_feature (178)..(651): Homolog of NCBI NO: 15230470 NR Description: ankyrin-like protein; protein id: At3g12360.1
  misc_feature (129)..(187): Homolog of NCBI NO: 15230470 NR Description: ankyrin-like protein; protein id: At3g12360.1
  misc_feature (178)..(651): Homolog of NCBI NO: 21553618 NR Description: ankyrin-like protein [Arabidopsis thaliana]
  misc_feature (135)..(187): Homolog of NCBI NO: 21553618 NR Description: ankyrin-like protein [Arabidopsis thaliana]

SEQ ID NO: 78391 - protein, 627 aa, Arabidopsis thaliana; identical to SEQ ID NO: 70302
  peptide (1)..(627): Ceres Seq. ID no. 12641007
  misc_feature (324)..(357): Pfam Name: Ankyrin repeat Pfam Description: Ankyrin repeat
  misc_feature (10)..(627): Homolog of NCBI NO: 15220595 NR Description: unknown protein; protein id: At1g05640.1
  misc_feature (100)..(627): Homolog of NCBI NO: 15222993 NR Description: hypothetical protein; protein id: At1g07710.1
  misc_feature (113)..(627): Homolog of NCBI NO: 15238604 NR Description: ankyrin-like protein; protein id: At5g60070.1
  misc_feature (105)..(627): Homolog of NCBI NO: 24796797 NR Description: putative ankyrin repeat containing protein [Oryza
  misc_feature (114)..(627): Homolog of NCBI NO: 11357168 NR Description: ankyrin-like protein - Arabidopsis thaliana
  misc_feature (114)..(627): Homolog of NCBI NO: 30679697 NR Description: ankyrin repeat protein family [Arabidopsis
  misc_feature (146)..(619): Homolog of NCBI NO: 15230470 NR Description: ankyrin-like protein; protein id: At3g12360.1
  misc_feature (97)..(155): Homolog of NCBI NO: 15230470 NR Description: ankyrin-like protein; protein id: At3g12360.1
  misc_feature (146)..(619): Homolog of NCBI NO: 21553618 NR Description: ankyrin-like protein [Arabidopsis thaliana]
  misc_feature (103)..(155): Homolog of NCBI NO: 21553618 NR Description: ankyrin-like protein [Arabidopsis thaliana]

SEQ ID NO: 78392 - protein, 584 aa, Arabidopsis thaliana
  peptide (1)..(584): Ceres Seq. ID no. 12641008
  misc_feature (281)..(314): Pfam Name: Ankyrin repeat Pfam Description: Ankyrin repeat
  misc_feature (1)..(584): Homolog of NCBI NO: 15220595 NR Description: unknown protein; protein id: At1g05640.1
  misc_feature (57)..(584): Homolog of NCBI NO: 15222993 NR Description: hypothetical protein; protein id: At1g07710.1
  misc_feature (70)..(584): Homolog of NCBI NO: 15238604 NR Description: ankyrin-like protein; protein id: At5g60070.1
  misc_feature (62)..(584): Homolog of NCBI NO: 24796797 NR Description: putative ankyrin repeat containing protein [Oryza
  misc_feature (71)..(584): Homolog of NCBI NO: 11357168 NR Description: ankyrin-like protein - Arabidopsis thaliana
  misc_feature (71)..(584): Homolog of NCBI NO: 30679697 NR Description: ankyrin repeat protein family [Arabidopsis
  misc_feature (103)..(576): Homolog of NCBI NO: 15230470 NR Description: ankyrin-like protein; protein id: At3g12360.1
  misc_feature (54)..(112): Homolog of NCBI NO: 15230470 NR Description: ankyrin-like protein; protein id: At3g12360.1
  misc_feature (103)..(576): Homolog of NCBI NO: 21553618 NR Description: ankyrin-like protein [Arabidopsis thaliana]
  misc_feature (60)..(112): Homolog of NCBI NO: 21553618 NR Description: ankyrin-like protein [Arabidopsis thaliana]
MEKQQSFRGVNVENHKRGVMEKLPSFGRATMERQKSFRGGFLEKQKSFRVVMERQLSFIGERRKKNESPGKRGDSSLHIAARTGNLSKVKELIRGCGDELKELLSKQNLEGETPLYTAAENGHSIVVEEMLKHMDLETASIAARNGFDPFHVAAKQGHLEVLKILLETFPNLAMTTDLSCTTALHTAATQGHIDVVNLLLETDSNLAKIAKNNGKTALHSAARMGHVEVVKSLIGKDPSIGFRTDKKGQTALHMAVKGQNDGIVVELVKPDVAVLSVEDNKGNTPLHIATNKGRIKIVRCLVSFEGINLNPINKAGDTPLDVSEKIGNAELVSVLKEAGAATAKDLGKPQNPAKQLKQTVSDIKHEVQSQLQQSRQTGVRVQKIAKRLKKLHISGLNNAINSATVVAVLIATVAFAAIFTIPGQYEEDRSKGELLGQAHIANKAPFLVFFIFDSLALFISLAVVVVQTSVVVIEQKAKKKLVFVINKLMWCACLFISIAFVSLSYIVVGKEEMWLAVCATVIGGTIMLTTIGAMCYCVVMHRMEESKLRSIRKERSKSQSFSMSRMPSDSDILNGEYNKRMYAL

SEQ ID NO: 78393 - DNA, 1221 bp, Arabidopsis thaliana
  misc_feature (1)..(1221): Ceres Seq. ID no. 12641078
  misc_feature: MA Experiment ID: 20000171 Result: Down-regulated in Transcription
  misc_feature: MA Experiment 20000171 PARAMETER Experiment Name: At_42deg_Heat_P Parameter: Age (day) Value: 14
  misc_feature: MA Experiment 20000171 PARAMETER Experiment Name: At_42deg_Heat_P Parameter: Organism Value: A. thaliana
  misc_feature: MA Experiment 20000171 PARAMETER Experiment Name: At_42deg_Heat_P Parameter: Plant Line Value: WS
  misc_feature: MA Experiment 20000171 PARAMETER Experiment Name: At_42deg_Heat_P Parameter: Temperature (deg C) Value: 42 vs. 22
  misc_feature: MA Experiment 20000171 PARAMETER Experiment Name: At_42deg_Heat_P Parameter: Timepoint (hr) Value: 1
  misc_feature: MA Experiment 20000171 PARAMETER Experiment Name: At_42deg_Heat_P Parameter: Tissue Value: Aerial
  misc_feature: MA Experiment ID: 20000173 Result: Down-regulated in Transcription
  misc_feature: MA Experiment 20000173 PARAMETER Experiment Name: At_42deg_Heat_P Parameter: Age (day) Value: 14
  misc_feature: MA Experiment 20000173 PARAMETER Experiment Name: At_42deg_Heat_P Parameter: Organism Value: A. thaliana
  misc_feature: MA Experiment 20000173 PARAMETER Experiment Name: At_42deg_Heat_P Parameter: Plant Line Value: WS
  misc_feature: MA Experiment 20000173 PARAMETER Experiment Name: At_42deg_Heat_P Parameter: Temperature (deg C) Value: 42 vs. 22
  misc_feature: MA Experiment 20000173 PARAMETER Experiment Name: At_42deg_Heat_P Parameter: Timepoint (hr) Value: 6
  misc_feature: MA Experiment 20000173 PARAMETER Experiment Name: At_42deg_Heat_P Parameter: Tissue Value: Aerial
  misc_feature: MA Experiment ID: 20000224 Result: Down-regulated in Transcription
  misc_feature: MA Experiment ID: 20001248 Result: Down-regulated in Transcription
  misc_feature: MA Experiment 20001248 PARAMETER Experiment Name: At_Far-red-induction_P Parameter: Age (day) Value: 7
  misc_feature: MA Experiment 20001248 PARAMETER Experiment Name: At_Far-red-induction_P Parameter: Light Value: Far-red vs. White
  misc_feature: MA Experiment 20001248 PARAMETER Experiment Name: At_Far-red-induction_P Parameter: Organism Value: A. thaliana
  misc_feature: MA Experiment 20001248 PARAMETER Experiment Name: At_Far-red-induction_P Parameter: Plant Line Value: Columbia
  misc_feature: MA Experiment 20001248 PARAMETER Experiment Name: At_Far-red-induction_P Parameter: Timepoint (hr) Value: 4
  misc_feature: MA Experiment 20001248 PARAMETER Experiment Name: At_Far-red-induction_P Parameter: Tissue Value: Whole Plant
  misc_feature: MA Experiment ID: 20001450 Result: Down-regulated in Transcription
  misc_feature: MA Experiment 20001450 PARAMETER Experiment Name: At_Far-red-induction_P Parameter: Age (day) Value: 7
  misc_feature: MA Experiment 20001450 PARAMETER Experiment Name: At_Far-red-induction_P Parameter: Light Value: Far-red vs. White
  misc_feature: MA Experiment 20001450 PARAMETER Experiment Name: At_Far-red-induction_P Parameter: Organism Value: A. thaliana
  misc_feature: MA Experiment 20001450 PARAMETER Experiment Name: At_Far-red-induction_P Parameter: Plant Line Value: Columbia
  misc_feature: MA Experiment 20001450 PARAMETER Experiment Name: At_Far-red-induction_P Parameter: Timepoint (hr) Value: 8
  misc_feature: MA Experiment 20001450 PARAMETER Experiment Name: At_Far-red-induction_P Parameter: Tissue Value: Whole Plant
  misc_feature: MA Experiment ID: 20001560 Result: Up-regulated in Transcription
  misc_feature: MA Experiment 20001560 PARAMETER Experiment Name: At_Drought_Soil_Dry_P Parameter: Age (day) Value: 28
  misc_feature: MA Experiment 20001560 PARAMETER Experiment Name: At_Drought_Soil_Dry_P Parameter: Organism Value: A. thaliana
  misc_feature: MA Experiment 20001560 PARAMETER Experiment Name: At_Drought_Soil_Dry_P Parameter: Plant Line Value: WS
  misc_feature: MA Experiment 20001560 PARAMETER Experiment Name: At_Drought_Soil_Dry_P Parameter: Post Timepoint (hr) Value: None
  misc_feature: MA Experiment 20001560 PARAMETER Experiment Name: At_Drought_Soil_Dry_P Parameter: Post-Treatment Value: None
  misc_feature: MA Experiment 20001560 PARAMETER Experiment Name: At_Drought_Soil_Dry_P Parameter: Timepoint (day) Value: 14
  misc_feature: MA Experiment 20001560 PARAMETER Experiment Name: At_Drought_Soil_Dry_P Parameter: Treatment Value: Drought vs. No Drought
  misc_feature: MA Experiment ID: 20001905 Result: Down-regulated in Transcription
  misc_feature: MA Experiment 20001905 PARAMETER Experiment Name: At_Drought_Reproduction_P Parameter: Age (day) Value: 40
  misc_feature: MA Experiment 20001905 PARAMETER Experiment Name: At_Drought_Reproduction_P Parameter: Organism Value: A. thaliana
  misc_feature: MA Experiment 20001905 PARAMETER Experiment Name: At_Drought_Reproduction_P Parameter: Plant Line Value: WS
  misc_feature: MA Experiment 20001905 PARAMETER Experiment Name: At_Drought_Reproduction_P Parameter: Timepoint (day) Value: 10
  misc_feature: MA Experiment 20001905 PARAMETER Experiment Name: At_Drought_Reproduction_P Parameter: Tissue Value: Rosettes
  misc_feature: MA Experiment 20001905 PARAMETER Experiment Name: At_Drought_Reproduction_P Parameter: Treatment Value: Drought vs. No Drought
  misc_feature: MA Experiment ID: 20001911 Result: Down-regulated in Transcription
  misc_feature: MA Experiment 20001911 PARAMETER Experiment Name: At_Drought_Reproduction_P Parameter: Age (day) Value: 40
  misc_feature: MA Experiment 20001911 PARAMETER Experiment Name: At_Drought_Reproduction_P Parameter: Organism Value: A. thaliana
  misc_feature: MA Experiment 20001911 PARAMETER Experiment Name: At_Drought_Reproduction_P Parameter: Plant Line Value: WS
  misc_feature: MA Experiment 20001911 PARAMETER Experiment Name: At_Drought_Reproduction_P Parameter: Timepoint (day) Value: 10
  misc_feature: MA Experiment 20001911 PARAMETER Experiment Name: At_Drought_Reproduction_P Parameter: Tissue Value: Flowers
  misc_feature: MA Experiment 20001911 PARAMETER Experiment Name: At_Drought_Reproduction_P Parameter: Treatment Value: Drought vs. No Drought
atgtctataaattgttttcgaacagcgaaggctccgcttcaatcatttgtagcagtaagaacgaattcgagacctagaaattcatcgaaccgtctcgtttctgtattcggacgcaagtcttcttctccttcatttgttactctcagagttgtttcatcgatggcttacgagaaagagcttgatgctgctaagaaagctgcttcactcgctgctcgtctctgtcagaaagttcaaaaggctttgttgcaatcagatgtgcaatcaaaatctgataaaagtccagtgaccgttgctgattatggttcacaagcagttgttagtttagtcttagaaaaagagctcagttctgaacccttttcattggtggctgaagaggactcaggcgatctacgcaaggatggttctcaggatactctggagcgcatcacaaaactcgtgaacgacactttggctaccgaggaatcgtttaatggctctactttgtctactgatgatctacttagagccattgactgtggaacatctgaaggtggtccaaatggtcgacactgggtcttggatccaattgatggcactaaaggatttctgaggggagatcaatacgcagtagcactaggattgctcgaggaagggaaagtagttttaggtgtgcttgcttgtccaaacttgccgttagcatccatagcaggaaacaacaagaacaaatcttcgtcagacgaaattggatgcctcttctttgctacaattggttcagggacatatatgcagctcctagattcaaaatcttctcctgtaaaagtgcaagtctctagtgttgagaatcctgaagaggcatcgttcttcgagtcattcgaaggagctcactctctacatgacttatccagctccattgccaataaactcggtgtcaaagctccaccagtccgtattgatagccaagcaaagtatggagctttatcaagaggagatggagctatatacttacggtttcctcataaaggataccgcgaaaagatttgggaccatgtcgctggtgctatagttgttacagaggcgggtggaatagtgacagatgcagcaggaaagccactggatttctcgaaagggaagtatcttgatttggacacaggcattatcgttgctaacgagaagctaatgcctctgcttttgaaagcagttcgtgactccatagctgagcaagagaaagcttcagctctctga

SEQ ID NO: 78394 - protein, 406 aa, Arabidopsis thaliana
  peptide (1)..(406): Ceres Seq. ID no. 12641079
  misc_feature (54)..(406): Homolog of NCBI NO: 15237567 NR Description: 3(2),5-bisphosphate nucleotidase; protein id:
  misc_feature (50)..(406): Homolog of NCBI NO: 14268820 NR Description: diphosphonucleotide phosphatase 1 [Zea mays]
  misc_feature (56)..(405): Homolog of NCBI NO: 3913517 NR Description: 3'(2'),5'-BISPHOSPHATE NUCLEOTIDASE (3'(2'),5-
  misc_feature (54)..(400): Homolog of NCBI NO: 15237589 NR Description: 3(2),5-bisphosphate nucleotidase protein id: At5g64000.1, supported by cDNA: gi_20466006
  misc_feature (54)..(402): Homolog of NCBI NO: 18424775 NR Description: 3(2),5-bisphosphate nucleotidase; protein id: supported by cDNA: 98980. [Arabidopsis thaliana]
  misc_feature (54)..(402): Homolog of NCBI NO: 21618152 NR Description: 3(2),5-bisphosphate nucleotidase [Arabidopsis
  misc_feature (54)..(400): Homolog of NCBI NO: 34395640 NR Description: Probable SAL4 phosphatase (3'(2'),5'-bisphosphate
  misc_feature (54)..(402): Homolog of NCBI NO: 8777312 NR Description: 3'(2'),5'-bisphosphate nucleotidase [Arabidopsis
  misc_feature (54)..(400): Homolog of NCBI NO: 15242383 NR Description: 3'(2'),5'-bisphosphate nucleotidase-like protein;
  misc_feature (186)..(406): Homolog of NCBI NO: 17017951 NR Description: 3'(2'),5'-bisphosphate nucleotidase [Gossypium
MSINCFRTAKAPLQSFVAVRTNSRPRNSSNRLVSVFGRKSSSPSFVTLRVVSSMAYEKELDAAKKAASLAARLCQKVQKALLQSDVQSKSDKSPVTVADYGSQAVVSLVLEKELSSEPFSLVAEEDSGDLRKDGSQDTLERITKLVNDTLATEESFNGSTLSTDDLLRAIDCGTSEGGPNGRHWVLDPIDGTKGFLRGDQYAVALGLLEEGKVVLGVLACPNLPLASIAGNNKNKSSSDEIGCLFFATIGSGTYMQLLDSKSSPVKVQVSSVENPEEASFFESFEGAHSLHDLSSSIANKLGVKAPPVRIDSQAKYGALSRGDGAIYLRFPHKGYREKIWDHVAGAIVVTEAGGIVTDAAGKPLDFSKGKYLDLDTGIIVANEKLMPLLLKAVRDSIAEQEKASAL

SEQ ID NO: 78395 - protein, 353 aa, Arabidopsis thaliana
  peptide (1)..(353): Ceres Seq. ID no. 12641080
  misc_feature (1)..(353): Homolog of NCBI NO: 15237567 NR Description: 3(2),5-bisphosphate nucleotidase; protein id:
  misc_feature (1)..(353): Homolog of NCBI NO: 14268820 NR Description: diphosphonucleotide phosphatase 1 [Zea mays]
  misc_feature (3)..(352): Homolog of NCBI NO: 3913517 NR Description: 3'(2'),5'-BISPHOSPHATE NUCLEOTIDASE (3'(2'),5-
  misc_feature (1)..(347): Homolog of NCBI NO: 15237589 NR Description: 3(2),5-bisphosphate nucleotidase protein id: At5g64000.1, supported by cDNA: gi_20466006
  misc_feature (1)..(349): Homolog of NCBI NO: 18424775 NR Description: 3(2),5-bisphosphate nucleotidase; protein id: supported by cDNA: 98980. [Arabidopsis thaliana]
  misc_feature (1)..(349): Homolog of NCBI NO: 21618152 NR Description: 3(2),5-bisphosphate nucleotidase [Arabidopsis
  misc_feature (1)..(347): Homolog of NCBI NO: 34395640 NR Description: Probable SAL4 phosphatase (3'(2'),5'-bisphosphate
  misc_feature (1)..(349): Homolog of NCBI NO: 8777312 NR Description: 3'(2'),5'-bisphosphate nucleotidase [Arabidopsis
  misc_feature (1)..(347): Homolog of NCBI NO: 15242383 NR Description: 3'(2'),5'-bisphosphate nucleotidase-like protein;
  misc_feature (133)..(353): Homolog of NCBI NO: 17017951 NR Description: 3'(2'),5'-bisphosphate nucleotidase [Gossypium
MAYEKELDAAKKAASLAARLCQKVQKALLQSDVQSKSDKSPVTVADYGSQAVVSLVLEKELSSEPFSLVAEEDSGDLRKDGSQDTLERITKLVNDTLATEESFNGSTLSTDDLLRAIDCGTSEGGPNGRHWVLDPIDGTKGFLRGDQYAVALGLLEEGKVVLGVLACPNLPLASIAGNNKNKSSSDEIGCLFFATIGSGTYMQLLDSKSSPVKVQVSSVENPEEASFFESFEGAHSLHDLSSSIANKLGVKAPPVRIDSQAKYGALSRGDGAIYLRFPHKGYREKIWDHVAGAIVVTEAGGIVTDAAGKPLDFSKGKYLDLDTGIIVANEKLMPLLLKAVRDSIAEQEKASAL

SEQ ID NO: 78396 - DNA, 1284 bp, Arabidopsis thaliana
  misc_feature (1)..(1284): Ceres Seq. ID no. 12641098
  misc_feature: MA Experiment ID: 108434 Result: Down-regulated in Transcription
  misc_feature: MA Experiment 108434 PARAMETER Experiment Name: At_Root_Tips_cDNA_P Parameter: Tissue Value: Root Tips
  misc_feature: MA Experiment ID: 108435 Result: Down-regulated in Transcription
  misc_feature: MA Experiment 108435 PARAMETER Experiment Name: At_stm_Mutants_cDNA_P Parameter: Plant Line Value: wt Landsburg vs stm
  misc_feature: MA Experiment 108435 PARAMETER Experiment Name: At_stm_Mutants_cDNA_P Parameter: Tissue Value: Shoot Apical Meristem Region
  misc_feature: MA Experiment ID: 108462 Result: Up-regulated in Transcription
  misc_feature: MA Experiment 108462 PARAMETER Experiment Name: At_Germinating_Seeds_cDNA_P Parameter: Age (day) Value: 2 vs. 0
  misc_feature: MA Experiment 108462 PARAMETER Experiment Name: At_Germinating_Seeds_cDNA_P Parameter: Tissue Value: Germinating Seeds
  misc_feature: MA Experiment ID: 108464 Result: Up-regulated in Transcription
  misc_feature: MA Experiment 108464 PARAMETER Experiment Name: At_Germinating_Seeds_cDNA_P Parameter: Age (day) Value: 4 vs. 0
  misc_feature: MA Experiment 108464 PARAMETER Experiment Name: At_Germinating_Seeds_cDNA_P Parameter: Tissue Value: Germinating Seeds
  misc_feature: MA Experiment ID: 108569 Result: Up-regulated in Transcription
  misc_feature: MA Experiment 108569 PARAMETER Experiment Name: At_0.001%_MeJA__cDNA_P Parameter: Timepoint (hr) Value: 6
  misc_feature: MA Experiment 108569 PARAMETER Experiment Name: At_0.001%_MeJA__cDNA_P Parameter: Tissue Value: Aerial
  misc_feature: MA Experiment 108569 PARAMETER Experiment Name: At_0.001%_MeJA__cDNA_P Parameter: Treatment Value: 0.001% MeJA vs. No Treatment
  misc_feature: MA Experiment ID: 108572 Result: Down-regulated in Transcription
  misc_feature: MA Experiment 108572 PARAMETER Experiment Name: At_Drought_cDNA_P Parameter: Timepoint (hr) Value: 1
  misc_feature: MA Experiment 108572 PARAMETER Experiment Name: At_Drought_cDNA_P Parameter: Tissue Value: Aerial
  misc_feature: MA Experiment 108572 PARAMETER Experiment Name: At_Drought_cDNA_P Parameter: Treatment Value: Drought vs. No Drought
  misc_feature: MA Experiment ID: 108573 Result: Down-regulated in Transcription
  misc_feature: MA Experiment 108573 PARAMETER Experiment Name: At_Drought_cDNA_P Parameter: Timepoint (hr) Value: 6
  misc_feature: MA Experiment 108573 PARAMETER Experiment Name: At_Drought_cDNA_P Parameter: Tissue Value: Aerial
  misc_feature: MA Experiment 108573 PARAMETER Experiment Name: At_Drought_cDNA_P Parameter: Treatment Value: Drought vs. No Drought
  misc_feature: MA Experiment ID: 108585 Result: Up-regulated in Transcription
  misc_feature: MA Experiment 108585 PARAMETER Experiment Name: At_5mM_NaNP_cDNA_P Parameter: Timepoint (hr) Value: 6
  misc_feature: MA Experiment 108585 PARAMETER Experiment Name: At_5mM_NaNP_cDNA_P Parameter: Tissue Value: Aerial
  misc_feature: MA Experiment 108585 PARAMETER Experiment Name: At_5mM_NaNP_cDNA_P Parameter: Treatment Value: null
  misc_feature: MA Experiment ID: 108594 Result: Down-regulated in Transcription
  misc_feature: MA Experiment 108594 PARAMETER Experiment Name: At_Ler-rhl_Root_cDNA_P Parameter: Plant Line Value: null
  misc_feature: MA Experiment ID: 108595 Result: Up-regulated in Transcription
  misc_feature: MA Experiment 108595 PARAMETER Experiment Name: At_Ler-pi_Ovule_cDNA_P Parameter: Plant Line Value: null
  misc_feature: MA Experiment ID: 108668 Result: Up-regulated in Transcription
  misc_feature: MA Experiment 108668 PARAMETER Experiment Name: At_2mM_SA_cDNA_P Parameter: Plant Line Value: WS
  misc_feature: MA Experiment 108668 PARAMETER Experiment Name: At_2mM_SA_cDNA_P Parameter: Timepoint (hr) Value: 6
  misc_feature: MA Experiment 108668 PARAMETER Experiment Name: At_2mM_SA_cDNA_P Parameter: Treatment Value: 2mM SA vs. No Treatment
  misc_feature: MA Experiment ID: 20000070 Result: Up-regulated in Transcription
  misc_feature: MA Experiment 20000070 PARAMETER Experiment Name: At_100uM_ABA_Mutants_cDNA_P Parameter: Plant Line Value: CS24
  misc_feature: MA Experiment 20000070 PARAMETER Experiment Name: At_100uM_ABA_Mutants_cDNA_P Parameter: Timepoint (hr) Value: 6
  misc_feature: MA Experiment 20000070 PARAMETER Experiment Name: At_100uM_ABA_Mutants_cDNA_P Parameter: Tissue Value: Aerial
  misc_feature: MA Experiment 20000070 PARAMETER Experiment Name: At_100uM_ABA_Mutants_cDNA_P Parameter: Treatment Value: 100uM ABA vs. No Treatment
  misc_feature: MA Experiment ID: 20000087 Result: Up-regulated in Transcription
  misc_feature: MA Experiment 20000087 PARAMETER Experiment Name: At_100uM_ABA_Mutants_cDNA_P Parameter: Plant Line Value: WS
  misc_feature: MA Experiment 20000087 PARAMETER Experiment Name: At_100uM_ABA_Mutants_cDNA_P Parameter: Timepoint (hr) Value: 6
  misc_feature: MA Experiment 20000087 PARAMETER Experiment Name: At_100uM_ABA_Mutants_cDNA_P Parameter: Tissue Value: Aerial
  misc_feature: MA Experiment 20000087 PARAMETER Experiment Name: At_100uM_ABA_Mutants_cDNA_P Parameter: Treatment Value: 100uM ABA vs. No Treatment
  misc_feature: MA Experiment ID: 20000089 Result: Up-regulated in Transcription
  misc_feature: MA Experiment ID: 20000090 Result: Up-regulated in Transcription
  misc_feature: MA Experiment ID: 20000180 Result: Up-regulated in Transcription
  misc_feature: MA Experiment 20000180 PARAMETER Experiment Name: At_Germinating_Seeds_P Parameter: Age (hr) Value: 24 vs. 0
  misc_feature: MA Experiment 20000180 PARAMETER Experiment Name: At_Germinating_Seeds_P Parameter: Tissue Value: Germinating Seeds
  misc_feature: MA Experiment ID: 20000182 Result: Up-regulated in Transcription
  misc_feature: MA Experiment 20000182 PARAMETER Experiment Name: At_2mM_SA_P Parameter: Age (day) Value: 14
  misc_feature: MA Experiment 20000182 PARAMETER Experiment Name: At_2mM_SA_P Parameter: Organism Value: A. thaliana
  misc_feature: MA Experiment 20000182 PARAMETER Experiment Name: At_2mM_SA_P Parameter: Plant Line Value: WS
  misc_feature: MA Experiment 20000182 PARAMETER Experiment Name: At_2mM_SA_P Parameter: Timepoint (hr) Value: 6
  misc_feature: MA Experiment 20000182 PARAMETER Experiment Name: At_2mM_SA_P Parameter: Tissue Value: Aerial
  misc_feature: MA Experiment 20000182 PARAMETER Experiment Name: At_2mM_SA_P Parameter: Treatment Value: 2mM SA vs. No Treatment
  misc_feature: MA Experiment ID: 20000185 Result: Up-regulated in Transcription
  misc_feature: MA Experiment 20000185 PARAMETER Experiment Name: At_Roots__P Parameter: Age (day) Value: 7 vs. 21
  misc_feature: MA Experiment 20000185 PARAMETER Experiment Name: At_Roots__P Parameter: Organism Value: A. thaliana
  misc_feature: MA Experiment 20000185 PARAMETER Experiment Name: At_Roots__P Parameter: Tissue Value: Roots vs. Whole Plant
  misc_feature: MA Experiment ID: 20000224 Result: Up-regulated in Transcription
  misc_feature: MA Experiment ID: 20000227 Result: Down-regulated in Transcription
  misc_feature: MA Experiment 20000227 PARAMETER Experiment Name: At_Root-Tips-vs-Tops_P Parameter: Tissue Value: Root Tips vs. Root Tops
  misc_feature: MA Experiment ID: 20000265 Result: Down-regulated in Transcription
  misc_feature: MA Experiment 20000265 PARAMETER Experiment Name: At_Open_Flower_P Parameter: Age (day) Value: 21
  misc_feature: MA Experiment 20000265 PARAMETER Experiment Name: At_Open_Flower_P Parameter: Plant Line Value: WS
  misc_feature: MA Experiment 20000265 PARAMETER Experiment Name: At_Open_Flower_P Parameter: Tissue Value: Closed Flower vs. Whole Plant
  misc_feature: MA Experiment ID: 20000267 Result: Down-regulated in Transcription
  misc_feature: MA Experiment 20000267 PARAMETER Experiment Name: At_Drought_P Parameter: Age (day) Value: 7
  misc_feature: MA Experiment 20000267 PARAMETER Experiment Name: At_Drought_P Parameter: Organism Value: A. thaliana
  misc_feature: MA Experiment 20000267 PARAMETER Experiment Name: At_Drought_P Parameter: Plant Line Value: WS
  misc_feature: MA Experiment 20000267 PARAMETER Experiment Name: At_Drought_P Parameter: Timepoint (hr) Value: 6
  misc_feature: MA Experiment 20000267 PARAMETER Experiment Name: At_Drought_P Parameter: Tissue Value: Whole Plant
  misc_feature: MA Experiment 20000267 PARAMETER Experiment Name: At_Drought_P Parameter: Treatment Value: Drought vs. No Drought
  misc_feature: MA Experiment ID: 20000268 Result: Down-regulated in Transcription
  misc_feature: MA Experiment 20000268 PARAMETER Experiment Name: At_100mM_NaCl__P Parameter: Age (day) Value: 14
  misc_feature: MA Experiment 20000268 PARAMETER Experiment Name: At_100mM_NaCl__P Parameter: Organism Value: A. thaliana
  misc_feature: MA Experiment 20000268 PARAMETER Experiment Name: At_100mM_NaCl__P Parameter: Plant Line Value: WS
  misc_feature: MA Experiment 20000268 PARAMETER Experiment Name: At_100mM_NaCl__P Parameter: Timepoint (hr) Value: 6
  misc_feature: MA Experiment 20000268 PARAMETER Experiment Name: At_100mM_NaCl__P Parameter: Tissue Value: Whole Plant
  misc_feature: MA Experiment 20000268 PARAMETER Experiment Name: At_100mM_NaCl__P Parameter: Treatment Value: 100mM NaCl vs. No Treatment
  misc_feature: MA Experiment ID: 20000436 Result: Down-regulated in Transcription
  misc_feature: MA Experiment 20000436 PARAMETER Experiment Name: At_Drought_P Parameter: Age (day) Value: 7
  misc_feature: MA Experiment 20000436 PARAMETER Experiment Name: At_Drought_P Parameter: Organism Value: A. thaliana
  misc_feature: MA Experiment 20000436 PARAMETER Experiment Name: At_Drought_P Parameter: Plant Line Value: WS
  misc_feature: MA Experiment 20000436 PARAMETER Experiment Name: At_Drought_P Parameter: Timepoint (hr) Value: 12
  misc_feature: MA Experiment 20000436 PARAMETER Experiment Name: At_Drought_P Parameter: Tissue Value: Whole Plant
  misc_feature: MA Experiment 20000436 PARAMETER Experiment Name: At_Drought_P Parameter: Treatment Value: Drought vs. No Drought
  misc_feature: MA Experiment ID: 20000437 Result: Down-regulated in Transcription
  misc_feature: MA Experiment 20000437 PARAMETER Experiment Name: At_Drought_P Parameter: Age (day) Value: 8
  misc_feature: MA Experiment 20000437 PARAMETER Experiment Name: At_Drought_P Parameter: Organism Value: A. thaliana
  misc_feature: MA Experiment 20000437 PARAMETER Experiment Name: At_Drought_P Parameter: Plant Line Value: WS
  misc_feature: MA Experiment 20000437 PARAMETER Experiment Name: At_Drought_P Parameter: Timepoint (hr) Value: 24
  misc_feature: MA Experiment 20000437 PARAMETER Experiment Name: At_Drought_P Parameter: Tissue Value: Whole Plant
  misc_feature: MA Experiment 20000437 PARAMETER Experiment Name: At_Drought_P Parameter: Treatment Value: Drought vs. No Drought
  misc_feature: MA Experiment ID: 20000439 Result: Up-regulated in Transcription
  misc_feature: MA Experiment 20000439 PARAMETER Experiment Name: At_Roots__P Parameter: Age (day) Value: 14 vs. 21
  misc_feature: MA Experiment 20000439 PARAMETER Experiment Name: At_Roots__P Parameter: Organism Value: A. thaliana
  misc_feature: MA Experiment 20000439 PARAMETER Experiment Name: At_Roots__P Parameter: Tissue Value: Roots vs. Whole Plant
  misc_feature: MA Experiment ID: 20000441 Result: Up-regulated in Transcription
  misc_feature: MA Experiment 20000441 PARAMETER Experiment Name: At_1uM_BR-BRZ__P Parameter: Tissue Value: Shoot Apices
  misc_feature: MA Experiment 20000441 PARAMETER Experiment Name: At_1uM_BR-BRZ__P Parameter: Treatment Value: 1uM BR vs. No Treatment
  misc_feature: MA Experiment ID: 20000443 Result: Up-regulated in Transcription
  misc_feature: MA Experiment 20000443 PARAMETER Experiment Name: At_1uM_BR-BRZ__P Parameter: Tissue Value: Shoot Apices
  misc_feature: MA Experiment 20000443 PARAMETER Experiment Name: At_1uM_BR-BRZ__P Parameter: Treatment Value: 1uM BRZ vs. No Treatment
  misc_feature: MA Experiment ID: 20000573 Result: Up-regulated in Transcription
  misc_feature: MA Experiment 20000573 PARAMETER Experiment Name: At_100uM_ABA_Mutants__P Parameter: Organism Value: A. thaliana
  misc_feature: MA Experiment 20000573 PARAMETER Experiment Name: At_100uM_ABA_Mutants__P Parameter: Plant Line Value: CS22 vs. Ler wt
  misc_feature: MA Experiment 20000573 PARAMETER Experiment Name: At_100uM_ABA_Mutants__P Parameter: Timepoint (hr) Value: N/A
  misc_feature: MA Experiment 20000573 PARAMETER Experiment Name: At_100uM_ABA_Mutants__P Parameter: Tissue Value: Whole Plant
  misc_feature: MA Experiment 20000573 PARAMETER Experiment Name: At_100uM_ABA_Mutants__P Parameter: Treatment Value: None
  misc_feature: MA Experiment ID: 20000574 Result: Up-regulated in Transcription
  misc_feature: MA Experiment 20000574 PARAMETER Experiment Name: At_100uM_ABA_Mutants__P Parameter: Organism Value: A. thaliana
  misc_feature: MA Experiment 20000574 PARAMETER Experiment Name: At_100uM_ABA_Mutants__P Parameter: Plant Line Value: CS23 vs. Ler wt
  misc_feature: MA Experiment 20000574 PARAMETER Experiment Name: At_100uM_ABA_Mutants__P Parameter: Timepoint (hr) Value: N/A
  misc_feature: MA Experiment 20000574 PARAMETER Experiment Name: At_100uM_ABA_Mutants__P Parameter: Tissue Value: Whole Plant
  misc_feature: MA Experiment 20000574 PARAMETER Experiment Name: At_100uM_ABA_Mutants__P Parameter: Treatment Value: None
  misc_feature: MA Experiment ID: 20000576 Result: Down-regulated in Transcription
  misc_feature: MA Experiment 20000576 PARAMETER Experiment Name: At_100uM_ABA_Mutants__P Parameter: Organism Value: A. thaliana
  misc_feature: MA Experiment 20000576 PARAMETER Experiment Name: At_100uM_ABA_Mutants__P Parameter: Plant Line Value: CS23
  misc_feature: MA Experiment 20000576 PARAMETER Experiment Name: At_100uM_ABA_Mutants__P Parameter: Timepoint (hr) Value: 6
  misc_feature: MA Experiment 20000576 PARAMETER Experiment Name: At_100uM_ABA_Mutants__P Parameter: Tissue Value: Whole Plant
  misc_feature: MA Experiment 20000576 PARAMETER Experiment Name: At_100uM_ABA_Mutants__P Parameter: Treatment Value: 1uM ABA vs. No Treatment
  misc_feature: MA Experiment ID: 20000709 Result: Down-regulated in Transcription
  misc_feature: MA Experiment 20000709 PARAMETER Experiment Name: At_15mM_NH4NO3_L-to-H_P Parameter: Age (hr) Value: 14
  misc_feature: MA Experiment 20000709 PARAMETER Experiment Name: At_15mM_NH4NO3_L-to-H_P Parameter: Organism Value: A. thaliana
  misc_feature: MA Experiment 20000709 PARAMETER Experiment Name: At_15mM_NH4NO3_L-to-H_P Parameter: Plant Line Value: WS
  misc_feature: MA Experiment 20000709 PARAMETER Experiment Name: At_15mM_NH4NO3_L-to-H_P Parameter: Timepoint (hr) Value: 4
  misc_feature: MA Experiment 20000709 PARAMETER Experiment Name: At_15mM_NH4NO3_L-to-H_P Parameter: Tissue Value: Aerial
  misc_feature: MA Experiment 20000709 PARAMETER Experiment Name: At_15mM_NH4NO3_L-to-H_P Parameter: Treatment Value: 15mM NH4NO3 vs. 30mM Mannitol
  misc_feature: MA Experiment ID: 20001451 Result: Down-regulated in Transcription
  misc_feature: MA Experiment 20001451 PARAMETER Experiment Name: At_Far-red-induction_P Parameter: Age (day) Value: 7
  misc_feature: MA Experiment 20001451 PARAMETER Experiment Name: At_Far-red-induction_P Parameter: Light Value: Far-red vs. White
  misc_feature: MA Experiment 20001451 PARAMETER Experiment Name: At_Far-red-induction_P Parameter: Organism Value: A. thaliana
  misc_feature: MA Experiment 20001451 PARAMETER Experiment Name: At_Far-red-induction_P Parameter: Plant Line Value: Columbia
  misc_feature: MA Experiment 20001451 PARAMETER Experiment Name: At_Far-red-induction_P Parameter: Timepoint (hr) Value: 24
  misc_feature: MA Experiment 20001451 PARAMETER Experiment Name: At_Far-red-induction_P Parameter: Tissue Value: Whole Plant
  misc_feature: MA Experiment ID: 20001554 Result: Down-regulated in Transcription
  misc_feature: MA Experiment 20001554 PARAMETER Experiment Name: At_Drought_Soil_Dry_P Parameter: Age (day) Value: 21
  misc_feature: MA Experiment 20001554 PARAMETER Experiment Name: At_Drought_Soil_Dry_P Parameter: Organism Value: A. thaliana
  misc_feature: MA Experiment 20001554 PARAMETER Experiment Name: At_Drought_Soil_Dry_P Parameter: Plant Line Value: WS
  misc_feature: MA Experiment 20001554 PARAMETER Experiment Name: At_Drought_Soil_Dry_P Parameter: Post Timepoint (hr) Value: None
  misc_feature: MA Experiment 20001554 PARAMETER Experiment Name: At_Drought_Soil_Dry_P Parameter: Post-Treatment Value: None
  misc_feature: MA Experiment 20001554 PARAMETER Experiment Name: At_Drought_Soil_Dry_P Parameter: Timepoint (day) Value: 7
  misc_feature: MA Experiment 20001554 PARAMETER Experiment Name: At_Drought_Soil_Dry_P Parameter: Treatment Value: Drought vs. No Drought
  misc_feature: MA Experiment ID: 20001556 Result: Down-regulated in Transcription
  misc_feature: MA Experiment 20001556 PARAMETER Experiment Name: At_Drought_Soil_Dry_P Parameter: Age (day) Value: 26
  misc_feature: MA Experiment 20001556 PARAMETER Experiment Name: At_Drought_Soil_Dry_P Parameter: Organism Value: A. thaliana
  misc_feature: MA Experiment 20001556 PARAMETER Experiment Name: At_Drought_Soil_Dry_P Parameter: Plant Line Value: WS
  misc_feature: MA Experiment 20001556 PARAMETER Experiment Name: At_Drought_Soil_Dry_P Parameter: Post Timepoint (hr) Value: None
  misc_feature: MA Experiment 20001556 PARAMETER Experiment Name: At_Drought_Soil_Dry_P Parameter: Post-Treatment Value: None
  misc_feature: MA Experiment 20001556 PARAMETER Experiment Name: At_Drought_Soil_Dry_P Parameter: Timepoint (day) Value: 12
  misc_feature: MA Experiment 20001556 PARAMETER Experiment Name: At_Drought_Soil_Dry_P Parameter: Treatment Value: Drought vs. No Drought
  misc_feature: MA Experiment ID: 20001557 Result: Up-regulated in Transcription
  misc_feature: MA Experiment 20001557 PARAMETER Experiment Name: At_Drought_Soil_Dry_P Parameter: Age (day) Value: 27
  misc_feature: MA Experiment 20001557 PARAMETER Experiment Name: At_Drought_Soil_Dry_P Parameter: Organism Value: A. thaliana
  misc_feature: MA Experiment 20001557 PARAMETER Experiment Name: At_Drought_Soil_Dry_P Parameter: Plant Line Value: WS
  misc_feature: MA Experiment 20001557 PARAMETER Experiment Name: At_Drought_Soil_Dry_P Parameter: Post Timepoint (hr) Value: 3
  misc_feature: MA Experiment 20001557 PARAMETER Experiment Name: At_Drought_Soil_Dry_P Parameter: Post-Treatment Value: Re-Water vs. No Drought
  misc_feature: MA Experiment 20001557 PARAMETER Experiment Name: At_Drought_Soil_Dry_P Parameter: Timepoint (day) Value: 13
  misc_feature: MA Experiment 20001557 PARAMETER Experiment Name: At_Drought_Soil_Dry_P Parameter: Treatment Value: Drought vs. No Drought
  misc_feature: MA Experiment ID: 20001558 Result: Up-regulated in Transcription
  misc_feature: MA Experiment 20001558 PARAMETER Experiment Name: At_Drought_Soil_Dry_P Parameter: Age (day) Value: 27
  misc_feature: MA Experiment 20001558 PARAMETER Experiment Name: At_Drought_Soil_Dry_P Parameter: Organism Value: A. thaliana
  misc_feature: MA Experiment 20001558 PARAMETER Experiment Name: At_Drought_Soil_Dry_P Parameter: Plant Line Value: WS
  misc_feature: MA Experiment 20001558 PARAMETER Experiment Name: At_Drought_Soil_Dry_P Parameter: Post Timepoint (hr) Value: 6
  misc_feature: MA Experiment 20001558 PARAMETER Experiment Name: At_Drought_Soil_Dry_P Parameter: Post-Treatment Value: Re-Water vs. No Drought
  misc_feature: MA Experiment 20001558 PARAMETER Experiment Name: At_Drought_Soil_Dry_P Parameter: Timepoint (day) Value: 13
  misc_feature: MA Experiment 20001558 PARAMETER Experiment Name: At_Drought_Soil_Dry_P Parameter: Treatment Value: Drought vs. No Drought
  misc_feature: MA Experiment ID: 20001560 Result: Up-regulated in Transcription
  misc_feature: MA Experiment 20001560 PARAMETER Experiment Name: At_Drought_Soil_Dry_P Parameter: Age (day) Value: 28
  misc_feature: MA Experiment 20001560 PARAMETER Experiment Name: At_Drought_Soil_Dry_P Parameter: Organism Value: A. thaliana
  misc_feature: MA Experiment 20001560 PARAMETER Experiment Name: At_Drought_Soil_Dry_P Parameter: Plant Line Value: WS
  misc_feature: MA Experiment 20001560 PARAMETER Experiment Name: At_Drought_Soil_Dry_P Parameter: Post Timepoint (hr) Value: None
  misc_feature: MA Experiment 20001560 PARAMETER Experiment Name: At_Drought_Soil_Dry_P Parameter: Post-Treatment Value: None
  misc_feature: MA Experiment 20001560 PARAMETER Experiment Name: At_Drought_Soil_Dry_P Parameter: Timepoint (day) Value: 14
  misc_feature: MA Experiment 20001560 PARAMETER Experiment Name: At_Drought_Soil_Dry_P Parameter: Treatment Value: Drought vs. No Drought
  misc_feature: MA Experiment ID: 20001904 Result: Down-regulated in Transcription
  misc_feature: MA Experiment 20001904 PARAMETER Experiment Name: At_Drought_Reproduction_P Parameter: Age (day) Value: 37
  misc_feature: MA Experiment 20001904 PARAMETER Experiment Name: At_Drought_Reproduction_P Parameter: Organism Value: A. thaliana
  misc_feature: MA Experiment 20001904 PARAMETER Experiment Name: At_Drought_Reproduction_P Parameter: Plant Line Value: WS
  misc_feature: MA Experiment 20001904 PARAMETER Experiment Name: At_Drought_Reproduction_P Parameter: Timepoint (day) Value: 7
  misc_feature: MA Experiment 20001904 PARAMETER Experiment Name: At_Drought_Reproduction_P Parameter: Tissue Value: Rosettes
  misc_feature: MA Experiment 20001904 PARAMETER Experiment Name: At_Drought_Reproduction_P Parameter: Treatment Value: Drought vs. No Drought
  misc_feature: MA Experiment ID: 20001910 Result: Down-regulated in Transcription
  misc_feature: MA Experiment 20001910 PARAMETER Experiment Name: At_Drought_Reproduction_P Parameter: Age (day) Value: 37
  misc_feature: MA Experiment 20001910 PARAMETER Experiment Name: At_Drought_Reproduction_P Parameter: Organism Value: A. thaliana
  misc_feature: MA Experiment 20001910 PARAMETER Experiment Name: At_Drought_Reproduction_P Parameter: Plant Line Value: WS
  misc_feature: MA Experiment 20001910 PARAMETER Experiment Name: At_Drought_Reproduction_P Parameter: Timepoint (day) Value: 7
  misc_feature: MA Experiment 20001910 PARAMETER Experiment Name: At_Drought_Reproduction_P Parameter: Tissue Value: Flowers
  misc_feature: MA Experiment 20001910 PARAMETER Experiment Name: At_Drought_Reproduction_P Parameter: Treatment Value: Drought vs. No Drought
actataacttaaacacacacttcatcttctctaaaaccctaaaatttaaacacaagatgggtttggttagatcattgtgcttattaataaccttccttaattgtctcatcatctcggttcatggccaagccaccgcaaggcctggtcctgtttccggcactaggattgggttttacttaactacgtgtcctagagctgagactattgtccgaaacgccgtgaatgctggtttcagttctgaccccagaatcgcacccggaatactgagaatgcatttccacgactgttttgtccaaggttgtgacggttcgatccttatatccggagctaacaccgagagaaccgccggtccgaacctcaatctccaaggatttgaagtcatagacaacgccaaaacgcagctcgaagccgcgtgtcctggagttgtctcttgtgctgatattttagcattagccgctcgtgacacagtcattctcactcaaggaacaggctggcaagtaccaacgggacgtagagatggtagagtttctttggcttcgaatgctaacaatctccctggtccccgtgactccgttgccgttcaacaacagaaattctccgccttgggactcaatactcgtgatctcgtcgtcctcgtcggaggacacacgatcggaacagcaggatgtggtgtattcaggaacaggctattcaataccaccggacaaaccgcagatccaaccatcgacccaacatttttggcgcagcttcaaacacaatgtccccaaaacggcgacggttcagtgcgcgtggatctcgacaccggaagcggaagcacttgggacacttcttactacaacaacctaagccgtgggcgtggagttctccaatccgatcaagtcctttggaccgatccagccactagacccatagtgcaacaattgatggctcctagaagcaccttcaacgttgagtttgcgaggtcaatggtcagaatgagtaatatcggtgtggttaccggagctaatggggaaatccgtagggtttgctctgcggttaattaattaaccgattagaatctgtcgtgataaactttcatgacgcaaagtacttgtttcgagtgtggttttaatctgaacaataaataaaccaatagaaaacgacatacaaagaaaaaacccaaaagtgggttgatgaaaattgtatctataaggtgttggtattcgatttcttttggttttagttaaaaaaaactgtaatgtcttcacaaaaatattataatgagtttggtcctagtttggattc

SEQ ID NO: 78397 - protein, 346 aa, Arabidopsis thaliana
  peptide (1)..(346): Ceres Seq. ID no. 12641099
  misc_feature (69)..(310): Pfam Name: Peroxidase Pfam Description: Peroxidase
  misc_feature (19)..(346): Homolog of NCBI NO: 15237615 NR Description: peroxidase, putative; protein id: At5g64120.1, by cDNA: 23349., supported by cDNA: gi_16226218 [Arabidopsis >gi|26397643|sp|Q43387|PE71_ARATH Peroxidase 71 precursor
  misc_feature (19)..(346): Homolog of NCBI NO: 21592403 NR Description: peroxidase [Arabidopsis thaliana]
  misc_feature (19)..(346): Homolog of NCBI NO: 15241812 NR Description: peroxidase, putative; protein id: At5g39580.1 thaliana] >gi|26397795|sp|Q9FKA4|PE62_ARATH Peroxidase 62 (Atperox P62) (ATP24a) >gi|9758333|dbj|BAB08889.1| peroxidase
  misc_feature (52)..(346): Homolog of NCBI NO: 18558997 NR Description: bacterial-induced peroxidase [Gossypium hirsutum]
  misc_feature (91)..(346): Homolog of NCBI NO: 1890313 NR Description: peroxidase ATP24a [Arabidopsis thaliana]
  misc_feature (17)..(346): Homolog of NCBI NO: 7433065 NR Description: peroxidase (EC 1.11.1.7) precursor, - tomato >gi|1161566|emb|CAA64413.1| peroxidase [Lycopersicon
  misc_feature (34)..(346): Homolog of NCBI NO: 129808 NR Description: Cationic peroxidase 2 precursor (PNPC2)
  misc_feature (52)..(346): Homolog of NCBI NO: 19698452 NR Description: bacterial-induced gaiacol peroxidase [Gossypium
  misc_feature (52)..(346): Homolog of NCBI NO: 5381255 NR Description: peroxidase [Nicotiana tabacum]
  misc_feature (25)..(346): Homolog of NCBI NO: 1232069 NR Description: cationic peroxidase [Stylosanthes humilis]
YNLNTHFIFSKTLKFKHKMGLVRSLCLLITFLNCLIISVHGQATARPGPVSGTRIGFYLTTCPRAETIVRNAVNAGFSSDPRIAPGILRMHFHDCFVQGCDGSILISGANTERTAGPNLNLQGFEVIDNAKTQLEAACPGVVSCADILALAARDTVILTQGTGWQVPTGRRDGRVSLASNANNLPGPRDSVAVQQQKFSALGLNTRDLVVLVGGHTIGTAGCGVFRNRLFNTTGQTADPTIDPTFLAQLQTQCPQNGDGSVRVDLDTGSGSTWDTSYYNNLSRGRGVLQSDQVLWTDPATRPIVQQLMAPRSTFNVEFARSMVRMSNIGVVTGANGEIRRVCSAVN

SEQ ID NO: 78398 - protein, 328 aa, Arabidopsis thaliana; identical to SEQ ID NO: 35476
  peptide (1)..(328): Ceres Seq. ID no. 12641100
  misc_feature (51)..(292): Pfam Name: Peroxidase Pfam Description: Peroxidase
  misc_feature (1)..(328): Homolog of NCBI NO: 15237615 NR Description: peroxidase, putative; protein id: At5g64120.1, by cDNA: 23349., supported by cDNA: gi_16226218 [Arabidopsis >gi|26397643|sp|Q43387|PE71_ARATH Peroxidase 71 precursor
  misc_feature (1)..(328): Homolog of NCBI NO: 21592403 NR Description: peroxidase [Arabidopsis thaliana]
  misc_feature (1)..(328): Homolog of NCBI NO: 15241812 NR Description: peroxidase, putative; protein id: At5g39580.1 thaliana] >gi|26397795|sp|Q9FKA4|PE62_ARATH Peroxidase 62 (Atperox P62) (ATP24a) >gi|9758333|dbj|BAB08889.1| peroxidase
  misc_feature (34)..(328): Homolog of NCBI NO: 18558997 NR Description: bacterial-induced peroxidase [Gossypium hirsutum]
  misc_feature (73)..(328): Homolog of NCBI NO: 1890313 NR Description: peroxidase ATP24a [Arabidopsis thaliana]
  misc_feature (1)..(328): Homolog of NCBI NO: 7433065 NR Description: peroxidase (EC 1.11.1.7) precursor, - tomato >gi|1161566|emb|CAA64413.1| peroxidase [Lycopersicon
  misc_feature (16)..(328): Homolog of NCBI NO: 129808 NR Description: Cationic peroxidase 2 precursor (PNPC2)
  misc_feature (34)..(328): Homolog of NCBI NO: 19698452 NR Description: bacterial-induced gaiacol peroxidase [Gossypium
  misc_feature (34)..(328): Homolog of NCBI NO: 5381255 NR Description: peroxidase [Nicotiana tabacum]
  misc_feature (7)..(328): Homolog of NCBI NO: 1232069 NR Description: cationic peroxidase [Stylosanthes humilis]

SEQ ID NO: 78399 - protein, 257 aa, Arabidopsis thaliana; identical to SEQ ID NO: 35477
  peptide (1)..(257): Ceres Seq. ID no. 12641101
  misc_feature (1)..(221): Pfam Name: Peroxidase Pfam Description: Peroxidase
  misc_feature (1)..(257): Homolog of NCBI NO: 15237615 NR Description: peroxidase, putative; protein id: At5g64120.1, by cDNA: 23349., supported by cDNA: gi_16226218 [Arabidopsis >gi|26397643|sp|Q43387|PE71_ARATH Peroxidase 71 precursor
  misc_feature (1)..(257): Homolog of NCBI NO: 21592403 NR Description: peroxidase [Arabidopsis thaliana]
  misc_feature (1)..(257): Homolog of NCBI NO: 15241812 NR Description: peroxidase, putative; protein id: At5g39580.1 thaliana] >gi|26397795|sp|Q9FKA4|PE62_ARATH Peroxidase 62 (Atperox P62) (ATP24a) >gi|9758333|dbj|BAB08889.1| peroxidase
  misc_feature (1)..(257): Homolog of NCBI NO: 18558997 NR Description: bacterial-induced peroxidase [Gossypium hirsutum]
  misc_feature (2)..(257): Homolog of NCBI NO: 1890313 NR Description: peroxidase ATP24a [Arabidopsis thaliana]
  misc_feature (1)..(257): Homolog of NCBI NO: 7433065 NR Description: peroxidase (EC 1.11.1.7) precursor, - tomato >gi|1161566|emb|CAA64413.1| peroxidase [Lycopersicon
  misc_feature (1)..(257): Homolog of NCBI NO: 129808 NR Description: Cationic peroxidase 2 precursor (PNPC2)
  misc_feature (1)..(257): Homolog of NCBI NO: 19698452 NR Description: bacterial-induced gaiacol peroxidase [Gossypium
  misc_feature (1)..(257): Homolog of NCBI NO: 5381255 NR Description: peroxidase [Nicotiana tabacum]
  misc_feature (1)..(257): Homolog of NCBI NO: 1232069 NR Description: cationic peroxidase [Stylosanthes humilis]

SEQ ID NO: 78400 - DNA, 1833 bp, Arabidopsis thaliana
  misc_feature (1)..(1833): Ceres Seq. ID no. 12641106
  misc_feature: MA Experiment ID: 20000171 Result: Up-regulated in Transcription
  misc_feature: MA Experiment 20000171 PARAMETER Experiment Name: At_42deg_Heat_P Parameter: Age (day) Value: 14
  misc_feature: MA Experiment 20000171 PARAMETER Experiment Name: At_42deg_Heat_P Parameter: Organism Value: A. thaliana
  misc_feature: MA Experiment 20000171 PARAMETER Experiment Name: At_42deg_Heat_P Parameter: Plant Line Value: WS
  misc_feature: MA Experiment 20000171 PARAMETER Experiment Name: At_42deg_Heat_P Parameter: Temperature (deg C) Value: 42 vs. 22
  misc_feature: MA Experiment 20000171 PARAMETER Experiment Name: At_42deg_Heat_P Parameter: Timepoint (hr) Value: 1
  misc_feature: MA Experiment 20000171 PARAMETER Experiment Name: At_42deg_Heat_P Parameter: Tissue Value: Aerial
  misc_feature: MA Experiment ID: 20000173 Result: Up-regulated in Transcription
  misc_feature: MA Experiment 20000173 PARAMETER Experiment Name: At_42deg_Heat_P Parameter: Age (day) Value: 14
  misc_feature: MA Experiment 20000173 PARAMETER Experiment Name: At_42deg_Heat_P Parameter: Organism Value: A. thaliana
  misc_feature: MA Experiment 20000173 PARAMETER Experiment Name: At_42deg_Heat_P Parameter: Plant Line Value: WS
  misc_feature: MA Experiment 20000173 PARAMETER Experiment Name: At_42deg_Heat_P Parameter: Temperature (deg C) Value: 42 vs. 22
  misc_feature: MA Experiment 20000173 PARAMETER Experiment Name: At_42deg_Heat_P Parameter: Timepoint (hr) Value: 6
  misc_feature: MA Experiment 20000173 PARAMETER Experiment Name: At_42deg_Heat_P Parameter: Tissue Value: Aerial
  misc_feature: MA Experiment ID: 20000180 Result: Up-regulated in Transcription
  misc_feature: MA Experiment 20000180 PARAMETER Experiment Name: At_Germinating_Seeds_P Parameter: Age (hr) Value: 24 vs. 0
  misc_feature: MA Experiment 20000180 PARAMETER Experiment Name: At_Germinating_Seeds_P Parameter: Tissue Value: Germinating Seeds
  misc_feature: MA Experiment ID: 20000184 Result: Up-regulated in Transcription
  misc_feature: MA Experiment 20000184 PARAMETER Experiment Name: At_Shoots__P Parameter: Age (day) Value: 7
  misc_feature: MA Experiment 20000184 PARAMETER Experiment Name: At_Shoots__P Parameter: Tissue Value: Shoots vs. Whole Plant
  misc_feature: MA Experiment ID: 20000185 Result: Up-regulated in Transcription
  misc_feature: MA Experiment 20000185 PARAMETER Experiment Name: At_Roots__P Parameter: Age (day) Value: 7 vs. 21
  misc_feature: MA Experiment 20000185 PARAMETER Experiment Name: At_Roots__P Parameter: Organism Value: A. thaliana
  misc_feature: MA Experiment 20000185 PARAMETER Experiment Name: At_Roots__P Parameter: Tissue Value: Roots vs. Whole Plant
  misc_feature: MA Experiment ID: 20000235 Result: Up-regulated in Transcription
  misc_feature: MA Experiment 20000235 PARAMETER Experiment Name: At_Siliques_P Parameter: Age (day) Value: 21
  misc_feature: MA Experiment 20000235 PARAMETER Experiment Name: At_Siliques_P Parameter: Organism Value: A. thaliana
  misc_feature: MA Experiment 20000235 PARAMETER Experiment Name: At_Siliques_P Parameter: Plant Line Value: WS
  misc_feature: MA Experiment 20000235 PARAMETER Experiment Name: At_Siliques_P Parameter: Tissue Value: 5-10mm Siliques vs. Whole Plant
  misc_feature: MA Experiment ID: 20000264 Result: Up-regulated in Transcription
  misc_feature: MA Experiment 20000264 PARAMETER Experiment Name: At_Open_Flower_P Parameter: Age (day) Value: 21
  misc_feature: MA Experiment 20000264 PARAMETER Experiment Name: At_Open_Flower_P Parameter: Plant Line Value: WS
  misc_feature: MA Experiment 20000264 PARAMETER Experiment Name: At_Open_Flower_P Parameter: Tissue Value: Open Flower vs. Whole Plant
  misc_feature: MA Experiment ID: 20000436 Result: Up-regulated in Transcription
  misc_feature: MA Experiment 20000436 PARAMETER Experiment Name: At_Drought_P Parameter: Age (day) Value: 7
  misc_feature: MA Experiment 20000436 PARAMETER Experiment Name: At_Drought_P Parameter: Organism Value: A. thaliana
  misc_feature: MA Experiment 20000436 PARAMETER Experiment Name: At_Drought_P Parameter: Plant Line Value: WS
  misc_feature: MA Experiment 20000436 PARAMETER Experiment Name: At_Drought_P Parameter: Timepoint (hr) Value: 12
  misc_feature: MA Experiment 20000436 PARAMETER Experiment Name: At_Drought_P Parameter: Tissue Value: Whole Plant
  misc_feature: MA Experiment 20000436 PARAMETER Experiment Name: At_Drought_P Parameter: Treatment Value: Drought vs. No Drought
  misc_feature: MA Experiment ID: 20000438 Result: Up-regulated in Transcription
  misc_feature: MA Experiment 20000438 PARAMETER Experiment Name: At_Shoots__P Parameter: Age (day) Value: 14
  misc_feature: MA Experiment 20000438 PARAMETER Experiment Name: At_Shoots__P Parameter: Tissue Value: Shoots vs. Whole Plant
  misc_feature: MA Experiment ID: 20000439 Result: Up-regulated in Transcription
  misc_feature: MA Experiment 20000439 PARAMETER Experiment Name: At_Roots__P Parameter: Age (day) Value: 14 vs. 21
  misc_feature: MA Experiment 20000439 PARAMETER Experiment Name: At_Roots__P Parameter: Organism Value: A. thaliana
  misc_feature: MA Experiment 20000439 PARAMETER Experiment Name: At_Roots__P Parameter: Tissue Value: Roots vs. Whole Plant
  misc_feature: MA Experiment ID: 20000441 Result: Up-regulated in Transcription
  misc_feature: MA Experiment 20000441 PARAMETER Experiment Name: At_1uM_BR-BRZ__P Parameter: Tissue Value: Shoot Apices
  misc_feature: MA Experiment 20000441 PARAMETER Experiment Name: At_1uM_BR-BRZ__P Parameter: Treatment Value: 1uM BR vs. No Treatment
  misc_feature: MA Experiment ID: 20000443 Result: Up-regulated in Transcription
  misc_feature: MA Experiment 20000443 PARAMETER Experiment Name: At_1uM_BR-BRZ__P Parameter: Tissue Value: Shoot Apices
  misc_feature: MA Experiment 20000443 PARAMETER Experiment Name: At_1uM_BR-BRZ__P Parameter: Treatment Value: 1uM BRZ vs. No Treatment
  misc_feature: MA Experiment ID: 20000495 Result: Down-regulated in Transcription
  misc_feature: MA Experiment 20000495 PARAMETER Experiment Name: At_Guard_Cells_P Parameter: Harvest Date Value: 8/2/2002
  misc_feature: MA Experiment 20000495 PARAMETER Experiment Name: At_Guard_Cells_P Parameter: Organism Value: A. thaliana
  misc_feature: MA Experiment 20000495 PARAMETER Experiment Name: At_Guard_Cells_P Parameter: Tissue Value: Guard Cells vs. Leaves
  misc_feature: MA Experiment ID: 20000573 Result: Down-regulated in Transcription
  misc_feature: MA Experiment 20000573 PARAMETER Experiment Name: At_100uM_ABA_Mutants__P Parameter: Organism Value: A. thaliana
  misc_feature: MA Experiment 20000573 PARAMETER Experiment Name: At_100uM_ABA_Mutants__P Parameter: Plant Line Value: CS22 vs. Ler wt
  misc_feature: MA Experiment 20000573 PARAMETER Experiment Name: At_100uM_ABA_Mutants__P Parameter: Timepoint (hr) Value: N/A
  misc_feature: MA Experiment 20000573 PARAMETER Experiment Name: At_100uM_ABA_Mutants__P Parameter: Tissue Value: Whole Plant
  misc_feature: MA Experiment 20000573 PARAMETER Experiment Name: At_100uM_ABA_Mutants__P Parameter: Treatment Value: None
  misc_feature: MA Experiment ID: 20000574 Result: Down-regulated in Transcription
  misc_feature: MA Experiment 20000574 PARAMETER Experiment Name: At_100uM_ABA_Mutants__P Parameter: Organism Value: A. thaliana
  misc_feature: MA Experiment 20000574 PARAMETER Experiment Name: At_100uM_ABA_Mutants__P Parameter: Plant Line Value: CS23 vs. Ler wt
  misc_feature: MA Experiment 20000574 PARAMETER Experiment Name: At_100uM_ABA_Mutants__P Parameter: Timepoint (hr) Value: N/A
  misc_feature: MA Experiment 20000574 PARAMETER Experiment Name: At_100uM_ABA_Mutants__P Parameter: Tissue Value: Whole Plant
  misc_feature: MA Experiment 20000574 PARAMETER Experiment Name: At_100uM_ABA_Mutants__P Parameter: Treatment Value: None
  misc_feature: MA Experiment ID: 20000578 Result: Down-regulated in Transcription
  misc_feature: MA Experiment 20000578 PARAMETER Experiment Name: At_CS3726__P Parameter: Organism Value: A. thaliana
  misc_feature: MA Experiment 20000578 PARAMETER Experiment Name: At_CS3726__P Parameter: Plant Line Value: CS3726
  misc_feature: MA Experiment 20000578 PARAMETER Experiment Name: At_CS3726__P Parameter: Tissue Value: Whole Plant
  misc_feature: MA Experiment ID: 20001247 Result: Down-regulated in Transcription
  misc_feature: MA Experiment 20001247 PARAMETER Experiment Name: At_Far-red-induction_P Parameter: Age (day) Value: 7
  misc_feature: MA Experiment 20001247 PARAMETER Experiment Name: At_Far-red-induction_P Parameter: Light Value: Far-red vs. White
  misc_feature: MA Experiment 20001247 PARAMETER Experiment Name: At_Far-red-induction_P Parameter: Organism Value: A. thaliana
  misc_feature: MA Experiment 20001247 PARAMETER Experiment Name: At_Far-red-induction_P Parameter: Plant Line Value: Columbia
  misc_feature: MA Experiment 20001247 PARAMETER Experiment Name: At_Far-red-induction_P Parameter: Timepoint (hr) Value: 1
  misc_feature: MA Experiment 20001247 PARAMETER Experiment Name: At_Far-red-induction_P Parameter: Tissue Value: Whole Plant
  misc_feature: MA Experiment ID: 20001248 Result: Down-regulated in Transcription
  misc_feature: MA Experiment 20001248 PARAMETER Experiment Name: At_Far-red-induction_P Parameter: Age (day) Value: 7
  misc_feature: MA Experiment 20001248 PARAMETER Experiment Name: At_Far-red-induction_P Parameter: Light Value: Far-red vs. White
  misc_feature: MA Experiment 20001248 PARAMETER Experiment Name: At_Far-red-induction_P Parameter: Organism Value: A. thaliana
  misc_feature: MA Experiment 20001248 PARAMETER Experiment Name: At_Far-red-induction_P Parameter: Plant Line Value: Columbia
  misc_feature: MA Experiment 20001248 PARAMETER Experiment Name: At_Far-red-induction_P Parameter: Timepoint (hr) Value: 4
  misc_feature: MA Experiment 20001248 PARAMETER Experiment Name: At_Far-red-induction_P Parameter: Tissue Value: Whole Plant
  misc_feature: MA Experiment ID: 20001557 Result: Down-regulated in Transcription
  misc_feature: MA Experiment 20001557 PARAMETER Experiment Name: At_Drought_Soil_Dry_P Parameter: Age (day) Value: 27
  misc_feature: MA Experiment 20001557 PARAMETER Experiment Name: At_Drought_Soil_Dry_P Parameter: Organism Value: A. thaliana
  misc_feature: MA Experiment 20001557 PARAMETER Experiment Name: At_Drought_Soil_Dry_P Parameter: Plant Line Value: WS
  misc_feature: MA Experiment 20001557 PARAMETER Experiment Name: At_Drought_Soil_Dry_P Parameter: Post Timepoint (hr) Value: 3
  misc_feature: MA Experiment 20001557 PARAMETER Experiment Name: At_Drought_Soil_Dry_P Parameter: Post-Treatment Value: Re-Water vs. No Drought
  misc_feature: MA Experiment 20001557 PARAMETER Experiment Name: At_Drought_Soil_Dry_P Parameter: Timepoint (day) Value: 13
  misc_feature: MA Experiment 20001557 PARAMETER Experiment Name: At_Drought_Soil_Dry_P Parameter: Treatment Value: Drought vs. No Drought
  misc_feature: MA Experiment ID: 20001560 Result: Down-regulated in Transcription
  misc_feature: MA Experiment 20001560 PARAMETER Experiment Name: At_Drought_Soil_Dry_P Parameter: Age (day) Value: 28
  misc_feature: MA Experiment 20001560 PARAMETER Experiment Name: At_Drought_Soil_Dry_P Parameter: Organism Value: A. thaliana
  misc_feature: MA Experiment 20001560 PARAMETER Experiment Name: At_Drought_Soil_Dry_P Parameter: Plant Line Value: WS
  misc_feature: MA Experiment 20001560 PARAMETER Experiment Name: At_Drought_Soil_Dry_P Parameter: Post Timepoint (hr) Value: None
  misc_feature: MA Experiment 20001560 PARAMETER Experiment Name: At_Drought_Soil_Dry_P Parameter: Post-Treatment Value: None
  misc_feature: MA Experiment 20001560 PARAMETER Experiment Name: At_Drought_Soil_Dry_P Parameter: Timepoint (day) Value: 14
  misc_feature: MA Experiment 20001560 PARAMETER Experiment Name: At_Drought_Soil_Dry_P Parameter: Treatment Value: Drought vs. No Drought
  misc_feature: MA Experiment ID: 20001771 Result: Up-regulated in Transcription
  misc_feature: MA Experiment 20001771 PARAMETER Experiment Name: At_Far-red-enriched-adult_P Parameter: Age (day) Value: 28
  misc_feature: MA Experiment 20001771 PARAMETER Experiment Name: At_Far-red-enriched-adult_P Parameter: Light Value: Far-red enriched vs. White
  misc_feature: MA Experiment 20001771 PARAMETER Experiment Name: At_Far-red-enriched-adult_P Parameter: Organism Value: A. thaliana
  misc_feature: MA Experiment 20001771 PARAMETER Experiment Name: At_Far-red-enriched-adult_P Parameter: Plant Line Value: Columbia
  misc_feature: MA Experiment 20001771 PARAMETER Experiment Name: At_Far-red-enriched-adult_P Parameter: Timepoint (hr) Value: 16
  misc_feature: MA Experiment 20001771 PARAMETER Experiment Name: At_Far-red-enriched-adult_P Parameter: Tissue Value: Aerial
atgggtagtggaacaaaccatctaaagagtaatacttttatcaagagagaggcaaacatgttaggaaaaaatccatggcctgagaaagatagtggtggctcttcggtttctcgtgatacgggaacaggaaaagatgttcaggatatgacattggaggatacaaatacttcagatcatggtttcaatggtggccacgtagatgtggttgaaaatttctccactggggatcccatgttgtgtgacacttccgctgcaacgaatgatggcgtatataattattccctcaacagcattccggatgctgaaaatgatcttagctttttcgacaatggagataaagaaaaaaatgatctcttctatggctggggtgacataggaaattttgaggatgtggacaacatgcttaggagttgtgattcaacattcggcttggatagtcttaataatgaaggtgacttagggtggttctcttctgcccagccaaatgaggagacagcaggcgcgatgacagatgatctcaaaccagacaaaatgttggaaaatcaaagaaccgctatgttgcaggttgaagactttttgaacaacagtgagcccaaccatgctgttgaagatgagtatggatatactattgaggacgattcagctcaaggaaaatcatcacaaaatgtattcgatacaagtttgcaaaagaaggatatattgatgctggatgtagagaattgtttgcgccttccaaggcacatgcaaccattaactacatgggatgttaccttctatgatgacttatttagttgcacgttttcctcagttaaatcctctaactatgatatgacgctttttacaatggtggcaaatcttgagaagaagcagactgatcatcttcatcatctggatgggaaaagtgatgggttctcggagaacagttttactttacagcacagtggtatttcaagggaaataatggataccaaccagtattaccctccctccgcattccaacagcgagatgtgccatactcgcatttcaattgtgagcagccttccgttcaagtatcagcatgtgaaagtaaatctggtattaaatctgagaacaaacccagtccttcctctgcttcaaatgagtcatacacatcaaatcatgcacaatcaatcgagagcttacaaggtccaactgttgatgatcggtttaggaaggtctttgaaacgagagccaacttgctgcctgggcaagatatgcctccttcttttgctgcaaataccaagaagagtagtaagacagactccatggtgtttcctgatgctgctcctatccagaagattgggcttgagaatgaccacagaaaagctgcaactgaattggaaacatcaaatatgcagggaagttcttgtgttagctctgttgtggatgacatttcactggaagcaacaagttttcgccagcttcaacaagttatagaacagttggatgttaggacaaagctttgcataagagacagcttataccgattagcaaaaagtgcggaacagagacatcatggtggaaacagaccggagaaaggcgcaggctcgcatctcgtgactggtgaagcagacaagtatgctggattcatggatatcgaaactgatacaaacccgatagatcgatcgatagctcatttgctgtttcacaggccctcagactcatctctttcatccgataacaatgttctgtcttataaatctcatccaatgattcctcagcccaatagtagtccgagcctgaggatagagaaacaagaggaaactacagaacttagacccgaagcagaagttgtaacaagtgacaacaattaa

SEQ ID NO: 78401 - protein, 610 aa, Arabidopsis thaliana
  peptide (1)..(610): Ceres Seq. ID no. 12641107
  misc_feature (225)..(610): Homolog of NCBI NO: 15237638 NR Description: putative protein; protein id: At5g64170.1,
  misc_feature (1)..(295): Homolog of NCBI NO: 15237638 NR Description: putative protein; protein id: At5g64170.1,
  misc_feature (314)..(560): Homolog of NCBI NO: 15232525 NR Description: putative protein; protein id: At3g54500.1
MGSGTNHLKSNTFIKREANMLGKNPWPEKDSGGSSVSRDTGTGKDVQDMTLEDTNTSDHGFNGGHVDVVENFSTGDPMLCDTSAATNDGVYNYSLNSIPDAENDLSFFDNGDKEKNDLFYGWGDIGNFEDVDNMLRSCDSTFGLDSLNNEGDLGWFSSAQPNEETAGAMTDDLKPDKMLENQRTAMLQVEDFLNNSEPNHAVEDEYGYTIEDDSAQGKSSQNVFDTSLQKKDILMLDVENCLRLPRHMQPLTTWDVTFYDDLFSCTFSSVKSSNYDMTLFTMVANLEKKQTDHLHHLDGKSDGFSENSFTLQHSGISREIMDTNQYYPPSAFQQRDVPYSHFNCEQPSVQVSACESKSGIKSENKPSPSSASNESYTSNHAQSIESLQGPTVDDRFRKVFETRANLLPGQDMPPSFAANTKKSSKTDSMVFPDAAPIQKIGLENDHRKAATELETSNMQGSSCVSSVVDDISLEATSFRQLQQVIEQLDVRTKLCIRDSLYRLAKSAEQRHHGGNRPEKGAGSHLVTGEADKYAGFMDIETDTNPIDRSIAHLLFHRPSDSSLSSDNNVLSYKSHPMIPQPNSSPSLRIEKQEETTELRPEAEVVTSDNN

SEQ ID NO: 78402 - protein, 591 aa, Arabidopsis thaliana
  peptide (1)..(591): Ceres Seq. ID no. 12641108
  misc_feature (206)..(591): Homolog of NCBI NO: 15237638 NR Description: putative protein; protein id: At5g64170.1,
  misc_feature (1)..(276): Homolog of NCBI NO: 15237638 NR Description: putative protein; protein id: At5g64170.1,
  misc_feature (295)..(541): Homolog of NCBI NO: 15232525 NR Description: putative protein; protein id: At3g54500.1
MLGKNPWPEKDSGGSSVSRDTGTGKDVQDMTLEDTNTSDHGFNGGHVDVVENFSTGDPMLCDTSAATNDGVYNYSLNSIPDAENDLSFFDNGDKEKNDLFYGWGDIGNFEDVDNMLRSCDSTFGLDSLNNEGDLGWFSSAQPNEETAGAMTDDLKPDKMLENQRTAMLQVEDFLNNSEPNHAVEDEYGYTIEDDSAQGKSSQNVFDTSLQKKDILMLDVENCLRLPRHMQPLTTWDVTFYDDLFSCTFSSVKSSNYDMTLFTMVANLEKKQTDHLHHLDGKSDGFSENSFTLQHSGISREIMDTNQYYPPSAFQQRDVPYSHFNCEQPSVQVSACESKSGIKSENKPSPSSASNESYTSNHAQSIESLQGPTVDDRFRKVFETRANLLPGQDMPPSFAANTKKSSKTDSMVFPDAAPIQKIGLENDHRKAATELETSNMQGSSCVSSVVDDISLEATSFRQLQQVIEQLDVRTKLCIRDSLYRLAKSAEQRHHGGNRPEKGAGSHLVTGEADKYAGFMDIETDTNPIDRSIAHLLFHRPSDSSLSSDNNVLSYKSHPMIPQPNSSPSLRIEKQEETTELRPEAEVVTSDNN

SEQ ID NO: 78403 - protein, 562 aa, Arabidopsis thaliana
  peptide (1)..(562): Ceres Seq. ID no. 12641109
  misc_feature (177)..(562): Homolog of NCBI NO: 15237638 NR Description: putative protein; protein id: At5g64170.1,
  misc_feature (1)..(247): Homolog of NCBI NO: 15237638 NR Description: putative protein; protein id: At5g64170.1,
  misc_feature (266)..(512): Homolog of NCBI NO: 15232525 NR Description: putative protein; protein id: At3g54500.1
MTLEDTNTSDHGFNGGHVDVVENFSTGDPMLCDTSAATNDGVYNYSLNSIPDAENDLSFFDNGDKEKNDLFYGWGDIGNFEDVDNMLRSCDSTFGLDSLNNEGDLGWFSSAQPNEETAGAMTDDLKPDKMLENQRTAMLQVEDFLNNSEPNHAVEDEYGYTIEDDSAQGKSSQNVFDTSLQKKDILMLDVENCLRLPRHMQPLTTWDVTFYDDLFSCTFSSVKSSNYDMTLFTMVANLEKKQTDHLHHLDGKSDGFSENSFTLQHSGISREIMDTNQYYPPSAFQQRDVPYSHFNCEQPSVQVSACESKSGIKSENKPSPSSASNESYTSNHAQSIESLQGPTVDDRFRKVFETRANLLPGQDMPPSFAANTKKSSKTDSMVFPDAAPIQKIGLENDHRKAATELETSNMQGSSCVSSVVDDISLEATSFRQLQQVIEQLDVRTKLCIRDSLYRLAKSAEQRHHGGNRPEKGAGSHLVTGEADKYAGFMDIETDTNPIDRSIAHLLFHRPSDSSLSSDNNVLSYKSHPMIPQPNSSPSLRIEKQEETTELRPEAEVVTSDNN

SEQ ID NO: 78404 - DNA, 2343 bp, Arabidopsis thaliana
  misc_feature (1)..(2343): Ceres Seq. ID no. 12641118
  misc_feature: MA Experiment ID: 20001451 Result: Down-regulated in Transcription
  misc_feature: MA Experiment 20001451 PARAMETER Experiment Name: At_Far-red-induction_P Parameter: Age (day) Value: 7
  misc_feature: MA Experiment 20001451 PARAMETER Experiment Name: At_Far-red-induction_P Parameter: Light Value: Far-red vs. White
  misc_feature: MA Experiment 20001451 PARAMETER Experiment Name: At_Far-red-induction_P Parameter: Organism Value: A. thaliana
  misc_feature: MA Experiment 20001451 PARAMETER Experiment Name: At_Far-red-induction_P Parameter: Plant Line Value: Columbia
  misc_feature: MA Experiment 20001451 PARAMETER Experiment Name: At_Far-red-induction_P Parameter: Timepoint (hr) Value: 24
  misc_feature: MA Experiment 20001451 PARAMETER Experiment Name: At_Far-red-induction_P Parameter: Tissue Value: Whole Plant
atggagatcgagatagaagaagtggtccataagaatgtcagctatacaggatatactcatccgacggctgaaggaaaacgttataataaatctaacggccaggatcaactcaaggaaccagagagattctgtctgattaatgtggggtttatggttatgctagcgagatcaaagctagctctagatgtgagcagaagatcacagtctttgcaaagaatctgctactacgcaagtctctcctctagattttccggcggcggcggagatgatggcggcggcagctcaccggaaatcggtggtaccgattcagcaaacgaatgggagaagctccttaaaccattcgatctggattctctaaggaattcatttcacaagataactccctttcagctctataagctacttgagttacctctcaatgtatccacttcaatggagttgttctcatggaccggttctcaaaacggttatcgtcactccttcgatgtgtatcaagttcttataggtaagcttggtgcgaatggtgagtttaaaaccattgatagattgttaattcagatgaaagatgaaggaatcgtttttaaagaatctcttttcatttcgattatgagagattacgacaaagctggttttcctggacagacaacgagattgatgttggagatgaggaatgtctattcctgtgaacccacttttaaatcttacaatgttgtcttggagattttggtttctggtaattgtcataaagttgcagctaatgtgttctacgatatgcttagccgaaagattcctccaacgcttttcacatttggtgttgtgatgaaagctttttgtgctgttaatgagatagattcggctctgtctctgcttagggacatgacgaaacatggatgtgtcccaaactctgttatttaccagactcttatacattcgttatcgaagtgtaatagagtgaacgaagcgcttcagcttttagaggagatgtttctgatgggatgtgttcctgatgctgagactttcaacgatgttatccttggtctctgtaagtttgatcggattaacgaagctgctaaaatggtgaaccggatgctgattagagggtttgctcctgatgatataacttatggttatttgatgaatggtctatgtaagataggccgggttgatgctgcaaaagatcttttttacagaattccgaagccggaaattgtgatcttcaatactcttattcacgggtttgtgactcacggaagacttgatgatgctaaagctgttttatcagatatggtcacgtcttatggcattgttcctgatgtctgcacatataactcactgatctatggatattggaaggagggtcttgtaggtttagctctggaagttcttcatgacatgaggaataagggatgtaagcctaacgtctactcttatactattttagttgatggtttctgtaaattaggaaagatagatgaagcctacaatgttcttaatgaaatgtctgccgatggactgaaacccaacactgttggttttaactgtttgatatcggctttctgcaaggaacacagaatccccgaggccgtagagattttcagagagatgccgagaaaaggctgtaaacccgatgtgtatacatttaattcgctgatatctggactatgtgaggtcgacgaaataaagcatgccttgtggttacttagagatatgatatcagaaggtgttgttgctaatactgttacttacaacacgctgatcaacgcgtttcttagaagaggtgaaatcaaagaagctcgtaaactagtaaacgagatggttttccagggatccccgcttgatgagataacctacaacagtctgataaaagggctgtgcagggccggggaggtagataaggcgagaagcttgtttgaaaagatgttaagagacgggcatgcaccaagcaacatctcctgcaacatacttataaacgggctctgcagaagcgggatggtggaagaagcggttgagtttcagaaagagatggttctgagaggatcgacaccggacattgtgacatttaacagtctgataaacggtctgtgtagggccggtaggatcgaagatggtttgacgatgtttaggaagcttcaggctgaaggaataccgcctgatacggtgacgtttaacactttgatgagttggttgtgcaaaggaggttttgtttatgatgcttgcttacttctggatgaaggtattgaagatggttttgttccaaatcatagaacttggtcaattttgttacagagtattattccccaagaaacacttgatagacgaaggttttataatgcagctttttga

SEQ ID NO: 78405 - protein, 780 aa, Arabidopsis thaliana
  peptide (1)..(780): Ceres Seq. ID no. 12641119
  misc_feature (440)..(474): Pfam Name: PPR repeat Pfam Description: PPR repeat
  misc_feature (96)..(746): Homolog of NCBI NO: 37533554 NR Description: putative PPR-repeat protein [Oryza sativa
  misc_feature (144)..(761): Homolog of NCBI NO: 15221300 NR Description: hypothetical protein; protein id: At1g74580.1
  misc_feature (162)..(765): Homolog of NCBI NO: 34896698 NR Description: putative pentatricopeptide repeat protein [Oryza
  misc_feature (230)..(772): Homolog of NCBI NO: 15221549 NR Description: PPR-repeat protein; protein id: At1g62670.1
  misc_feature (230)..(751): Homolog of NCBI NO: 32527604 NR Description: pentatricopeptide repeat-containing protein
  misc_feature (108)..(727): Homolog of NCBI NO: 15229026 NR Description: putative protein; protein id: At3g48810.1
  misc_feature (230)..(772): Homolog of NCBI NO: 6630464 NR Description: F23N19.4 [Arabidopsis thaliana]
  misc_feature (256)..(761): Homolog of NCBI NO: 30840327 NR Description: fertility restorer homologue [Raphanus sativus]
  misc_feature (230)..(773): Homolog of NCBI NO: 15221635 NR Description: unknown protein; protein id: At1g62930.1
  misc_feature (256)..(761): Homolog of NCBI NO: 30840221 NR Description: fertility restorer [Raphanus sativus]
MEIEIEEVVHKNVSYTGYTHPTAEGKRYNKSNGQDQLKEPERFCLINVGFMVMLARSKLALDVSRRSQSLQRICYYASLSSRFSGGGGDDGGGSSPEIGGTDSANEWEKLLKPFDLDSLRNSFHKITPFQLYKLLELPLNVSTSMELFSWTGSQNGYRHSFDVYQVLIGKLGANGEFKTIDRLLIQMKDEGIVFKESLFISIMRDYDKAGFPGQTTRLMLEMRNVYSCEPTFKSYNVVLEILVSGNCHKVAANVFYDMLSRKIPPTLFTFGVVMKAFCAVNEIDSALSLLRDMTKHGCVPNSVIYQTLIHSLSKCNRVNEALQLLEEMFLMGCVPDAETFNDVILGLCKFDRINEAAKMVNRMLIRGFAPDDITYGYLMNGLCKIGRVDAAKDLFYRIPKPEIVIFNTLIHGFVTHGRLDDAKAVLSDMVTSYGIVPDVCTYNSLIYGYWKEGLVGLALEVLHDMRNKGCKPNVYSYTILVDGFCKLGKIDEAYNVLNEMSADGLKPNTVGFNCLISAFCKEHRIPEAVEIFREMPRKGCKPDVYTFNSLISGLCEVDEIKHALWLLRDMISEGVVANTVTYNTLINAFLRRGEIKEARKLVNEMVFQGSPLDEITYNSLIKGLCRAGEVDKARSLFEKMLRDGHAPSNISCNILINGLCRSGMVEEAVEFQKEMVLRGSTPDIVTFNSLINGLCRAGRIEDGLTMFRKLQAEGIPPDTVTFNTLMSWLCKGGFVYDACLLLDEGIEDGFVPNHRTWSILLQSIIPQETLDRRRFYNAAF

SEQ ID NO: 78406 - protein, 730 aa, Arabidopsis thaliana; identical to SEQ ID NO: 74282
  peptide (1)..(730): Ceres Seq. ID no. 12641120
  misc_feature (390)..(424): Pfam Name: PPR repeat Pfam Description: PPR repeat
  misc_feature (46)..(696): Homolog of NCBI NO: 37533554 NR Description: putative PPR-repeat protein [Oryza sativa
  misc_feature (94)..(711): Homolog of NCBI NO: 15221300 NR Description: hypothetical protein; protein id: At1g74580.1
  misc_feature (112)..(715): Homolog of NCBI NO: 34896698 NR Description: putative pentatricopeptide repeat protein [Oryza
  misc_feature (180)..(722): Homolog of NCBI NO: 15221549 NR Description: PPR-repeat protein; protein id: At1g62670.1
  misc_feature (180)..(701): Homolog of NCBI NO: 32527604 NR Description: pentatricopeptide repeat-containing protein
  misc_feature (58)..(677): Homolog of NCBI NO: 15229026 NR Description: putative protein; protein id: At3g48810.1
  misc_feature (180)..(722): Homolog of NCBI NO: 6630464 NR Description: F23N19.4 [Arabidopsis thaliana]
  misc_feature (206)..(711): Homolog of NCBI NO: 30840327 NR Description: fertility restorer homologue [Raphanus sativus]
  misc_feature (180)..(723): Homolog of NCBI NO: 15221635 NR Description: unknown protein; protein id: At1g62930.1
  misc_feature (206)..(711): Homolog of NCBI NO: 30840221 NR Description: fertility restorer [Raphanus sativus]

SEQ ID NO: 78407 - protein, 728 aa, Arabidopsis thaliana; identical to SEQ ID NO: 74283
  peptide (1)..(728): Ceres Seq. ID no. 12641121
  misc_feature (388)..(422): Pfam Name: PPR repeat Pfam Description: PPR repeat
  misc_feature (44)..(694): Homolog of NCBI NO: 37533554 NR Description: putative PPR-repeat protein [Oryza sativa
  misc_feature (92)..(709): Homolog of NCBI NO: 15221300 NR Description: hypothetical protein; protein id: At1g74580.1
  misc_feature (110)..(713): Homolog of NCBI NO: 34896698 NR Description: putative pentatricopeptide repeat protein [Oryza
  misc_feature (178)..(720): Homolog of NCBI NO: 15221549 NR Description: PPR-repeat protein; protein id: At1g62670.1
  misc_feature (178)..(699): Homolog of NCBI NO: 32527604 NR Description: pentatricopeptide repeat-containing protein
  misc_feature (56)..(675): Homolog of NCBI NO: 15229026 NR Description: putative protein; protein id: At3g48810.1
  misc_feature (178)..(720): Homolog of NCBI NO: 6630464 NR Description: F23N19.4 [Arabidopsis thaliana]
  misc_feature (204)..(709): Homolog of NCBI NO: 30840327 NR Description: fertility restorer homologue [Raphanus sativus]
  misc_feature (178)..(721): Homolog of NCBI NO: 15221635 NR Description: unknown protein; protein id: At1g62930.1
  misc_feature (204)..(709): Homolog of NCBI NO: 30840221 NR Description: fertility restorer [Raphanus sativus]

SEQ ID NO: 78408 - DNA, 1448 bp, Arabidopsis thaliana
  misc_feature (1)..(1448): Ceres Seq. ID no. 12641128
  misc_feature: MA Experiment ID: 108561 Result: Down-regulated in Transcription
  misc_feature: MA Experiment 108561 PARAMETER Experiment Name: At_100uM_ABA_cDNA_P Parameter: Timepoint (hr) Value: 6
  misc_feature: MA Experiment 108561 PARAMETER Experiment Name: At_100uM_ABA_cDNA_P Parameter: Tissue Value: Aerial
  misc_feature: MA Experiment 108561 PARAMETER Experiment Name: At_100uM_ABA_cDNA_P Parameter: Treatment Value: 100uM ABA vs. No Treatment
  misc_feature: MA Experiment ID: 108585 Result: Down-regulated in Transcription
  misc_feature: MA Experiment 108585 PARAMETER Experiment Name: At_5mM_NaNP_cDNA_P Parameter: Timepoint (hr) Value: 6
  misc_feature: MA Experiment 108585 PARAMETER Experiment Name: At_5mM_NaNP_cDNA_P Parameter: Tissue Value: Aerial
  misc_feature: MA Experiment 108585 PARAMETER Experiment Name: At_5mM_NaNP_cDNA_P Parameter: Treatment Value: null
  misc_feature: MA Experiment ID: 108595 Result: Down-regulated in Transcription
  misc_feature: MA Experiment 108595 PARAMETER Experiment Name: At_Ler-pi_Ovule_cDNA_P Parameter: Plant Line Value: null
  misc_feature: MA Experiment ID: 108668 Result: Down-regulated in Transcription
  misc_feature: MA Experiment 108668 PARAMETER Experiment Name: At_2mM_SA_cDNA_P Parameter: Plant Line Value: WS
  misc_feature: MA Experiment 108668 PARAMETER Experiment Name: At_2mM_SA_cDNA_P Parameter: Timepoint (hr) Value: 6
  misc_feature: MA Experiment 108668 PARAMETER Experiment Name: At_2mM_SA_cDNA_P Parameter: Treatment Value: 2mM SA vs. No Treatment
  misc_feature: MA Experiment ID: 20000087 Result: Down-regulated in Transcription
  misc_feature: MA Experiment 20000087 PARAMETER Experiment Name: At_100uM_ABA_Mutants_cDNA_P Parameter: Plant Line Value: WS
  misc_feature: MA Experiment 20000087 PARAMETER Experiment Name: At_100uM_ABA_Mutants_cDNA_P Parameter: Timepoint (hr) Value: 6
  misc_feature: MA Experiment 20000087 PARAMETER Experiment Name: At_100uM_ABA_Mutants_cDNA_P Parameter: Tissue Value: Aerial
  misc_feature: MA Experiment 20000087 PARAMETER Experiment Name: At_100uM_ABA_Mutants_cDNA_P Parameter: Treatment Value: 100uM ABA vs. No Treatment
  misc_feature: MA Experiment ID: 20000182 Result: Down-regulated in Transcription
  misc_feature: MA Experiment 20000182 PARAMETER Experiment Name: At_2mM_SA_P Parameter: Age (day) Value: 14
  misc_feature: MA Experiment 20000182 PARAMETER Experiment Name: At_2mM_SA_P Parameter: Organism Value: A. thaliana
  misc_feature: MA Experiment 20000182 PARAMETER Experiment Name: At_2mM_SA_P Parameter: Plant Line Value: WS
  misc_feature: MA Experiment 20000182 PARAMETER Experiment Name: At_2mM_SA_P Parameter: Timepoint (hr) Value: 6
  misc_feature: MA Experiment 20000182 PARAMETER Experiment Name: At_2mM_SA_P Parameter: Tissue Value: Aerial
  misc_feature: MA Experiment 20000182 PARAMETER Experiment Name: At_2mM_SA_P Parameter: Treatment Value: 2mM SA vs. No Treatment
  misc_feature: MA Experiment ID: 20000185 Result: Down-regulated in Transcription
  misc_feature: MA Experiment 20000185 PARAMETER Experiment Name: At_Roots__P Parameter: Age (day) Value: 7 vs. 21
  misc_feature: MA Experiment 20000185 PARAMETER Experiment Name: At_Roots__P Parameter: Organism Value: A. thaliana
  misc_feature: MA Experiment 20000185 PARAMETER Experiment Name: At_Roots__P Parameter: Tissue Value: Roots vs. Whole Plant
  misc_feature: MA Experiment ID: 20000437 Result: Down-regulated in Transcription
  misc_feature: MA Experiment 20000437 PARAMETER Experiment Name: At_Drought_P Parameter: Age (day) Value: 8
  misc_feature: MA Experiment 20000437 PARAMETER Experiment Name: At_Drought_P Parameter: Organism Value: A. thaliana
  misc_feature: MA Experiment 20000437 PARAMETER Experiment Name: At_Drought_P Parameter: Plant Line Value: WS
  misc_feature: MA Experiment 20000437 PARAMETER Experiment Name: At_Drought_P Parameter: Timepoint (hr) Value: 24
  misc_feature: MA Experiment 20000437 PARAMETER Experiment Name: At_Drought_P Parameter: Tissue Value: Whole Plant
  misc_feature: MA Experiment 20000437 PARAMETER Experiment Name: At_Drought_P Parameter: Treatment Value: Drought vs. No Drought
  misc_feature: MA Experiment ID: 20000439 Result: Down-regulated in Transcription
  misc_feature: MA Experiment 20000439 PARAMETER Experiment Name: At_Roots__P Parameter: Age (day) Value: 14 vs. 21
  misc_feature: MA Experiment 20000439 PARAMETER Experiment Name: At_Roots__P Parameter: Organism Value: A. thaliana
  misc_feature: MA Experiment 20000439 PARAMETER Experiment Name: At_Roots__P Parameter: Tissue Value: Roots vs. Whole Plant
  misc_feature: MA Experiment ID: 20001557 Result: Down-regulated in Transcription
  misc_feature: MA Experiment 20001557 PARAMETER Experiment Name: At_Drought_Soil_Dry_P Parameter: Age (day) Value: 27
  misc_feature: MA Experiment 20001557 PARAMETER Experiment Name: At_Drought_Soil_Dry_P Parameter: Organism Value: A. thaliana
  misc_feature: MA Experiment 20001557 PARAMETER Experiment Name: At_Drought_Soil_Dry_P Parameter: Plant Line Value: WS
  misc_feature: MA Experiment 20001557 PARAMETER Experiment Name: At_Drought_Soil_Dry_P Parameter: Post Timepoint (hr) Value: 3
  misc_feature: MA Experiment 20001557 PARAMETER Experiment Name: At_Drought_Soil_Dry_P Parameter: Post-Treatment Value: Re-Water vs. No Drought
  misc_feature: MA Experiment 20001557 PARAMETER Experiment Name: At_Drought_Soil_Dry_P Parameter: Timepoint (day) Value: 13
  misc_feature: MA Experiment 20001557 PARAMETER Experiment Name: At_Drought_Soil_Dry_P Parameter: Treatment Value: Drought vs. No Drought
  misc_feature: MA Experiment ID: 20001905 Result: Down-regulated in Transcription
  misc_feature: MA Experiment 20001905 PARAMETER Experiment Name: At_Drought_Reproduction_P Parameter: Age (day) Value: 40
  misc_feature: MA Experiment 20001905 PARAMETER Experiment Name: At_Drought_Reproduction_P Parameter: Organism Value: A. thaliana
  misc_feature: MA Experiment 20001905 PARAMETER Experiment Name: At_Drought_Reproduction_P Parameter: Plant Line Value: WS
  misc_feature: MA Experiment 20001905 PARAMETER Experiment Name: At_Drought_Reproduction_P Parameter: Timepoint (day) Value: 10
  misc_feature: MA Experiment 20001905 PARAMETER Experiment Name: At_Drought_Reproduction_P Parameter: Tissue Value: Rosettes
  misc_feature: MA Experiment 20001905 PARAMETER Experiment Name: At_Drought_Reproduction_P Parameter: Treatment Value: Drought vs. No Drought
ttttctactcctcgtcatcttctattcgttatccgttttgaagcgtactcggatgggattgagtttcgcagatgctttaaattctagaaaataatgcaatctcttaccttaactcggtacccaactccaatttccccgccaagactcaatctttacccgctaagacaaatcgcagcttctgttctctctgctccgaccgccggtattaaccgtcgcgatatggcgtctcgccatcagtcaacttcctttaagccccttgccgttggtcggaatttgaccggagatgatgatgatggttactgtactcttatagactttgcaggtagtggaggaggagaagggaaaaatgtaggagaggatcttgtggtgttgctttaccacttacaacatgcttgcaaaagaatcgcttctcttgtcgcctctcctttcaattcttcactcggaaagctctctgttaactcctctagtgggtcagaccgagatgcgcctaagccgctcgatattgtctcgaacgatatcgtcttgtcctctcttagaaactcagggaaagtagcagtaatggcttctgaagaaaacgatagtccaacttggatcaaagatgatggtccttacgttgtggttgtagatcctctagatggatcacggaacatcgatgcttcgattcccacgggaactatatttggaatttacaatcgtctcgttgagcttgatcatttacctgttgaagagaaagctgagctcaattctttgcagagaggcagcaggcttgtagcttccggttatgtgctatactcttcagccactatcttctgtgttacacttggatcgggaacacacgccttcacgctagaccattccacaggagaatttgttcttacccatcaaaacatcaagatcccaactcggggacaaatctactcagtgaacgatgcgaggtactttgattggccagaaggtttaaggaagtacattgacacagtgagacaaggcaaaggtcaaaacccgaaaaaatactctgcgcgttatatttgttctctagtagctgatcttcacaggactctcttatacggtggagtggctatgaatccaagagaccatcttcgtttagtctatgaaggtaaccctttggcttttctcgtggagcaagctggtggcaaatcctctgatggaaaaagagggatactttcgatacaacccgtgaagcttcaccaaagattgcctctgtttcttgggagcttagaggatgttgctgagctagagagctatggagatgtgcagcagactgtgaaccctggctatgaagtttaaacaactcctctgtttcatattatctgtaaaaacaataaatgaatcgatgttagatttggttgcttgtaacattatgtattaggaaagttagatccgtgtatatatctgtttatcaagattcaagatcgactggtataatc

SEQ ID NO: 78409 - protein, 404 aa, Arabidopsis thaliana; identical to SEQ ID NO: 26122
  peptide (1)..(404): Ceres Seq. ID no. 12641129
  misc_feature (70)..(395): Pfam Name: Fructose-1-6-bisphosphatase Pfam Description: Fructose-1-6-bisphosphatase
  misc_feature (1)..(404): Homolog of NCBI NO: 15237685 NR Description: fructose-bisphosphatase-like protein; protein id:
  misc_feature (86)..(391): Homolog of NCBI NO: 67243 NR Description: fructose-bisphosphatase (EC 3.1.3.11),
  misc_feature (34)..(391): Homolog of NCBI NO: 585118 NR Description: FRUCTOSE-1,6-BISPHOSPHATASE, CHLOROPLAST
  misc_feature (86)..(391): Homolog of NCBI NO: 3915687 NR Description: Fructose-1,6-bisphosphatase, chloroplast
  misc_feature (86)..(391): Homolog of NCBI NO: 4585576 NR Description: fructose-1,6-bisphosphatase precursor [Solanum
  misc_feature (82)..(392): Homolog of NCBI NO: 16519317 NR Description: fructose 1,6-bisphosphatase [Galdieria
  misc_feature (4)..(391): Homolog of NCBI NO: 15232408 NR Description: fructose-bisphosphatase precursor; protein id: supported by cDNA: gi_14532619, supported by cDNA: gi_16226764
  misc_feature (86)..(391): Homolog of NCBI NO: 4218951 NR Description: fructose-1,6-bisphosphatase precursor [Brassica
  misc_feature (4)..(391): Homolog of NCBI NO: 99693 NR Description: fructose-bisphosphatase (EC 3.1.3.11) precursor,
  misc_feature (9)..(391): Homolog of NCBI NO: 14318171 NR Description: fructose-1,6-bisphosphatase [Pisum sativum]

SEQ ID NO: 78410 - protein, 362 aa, Arabidopsis thaliana; identical to SEQ ID NO: 26123
  peptide (1)..(362): Ceres Seq. ID no. 12641130
  misc_feature (28)..(353): Pfam Name: Fructose-1-6-bisphosphatase Pfam Description: Fructose-1-6-bisphosphatase
  misc_feature (1)..(362): Homolog of NCBI NO: 15237685 NR Description: fructose-bisphosphatase-like protein; protein id:
  misc_feature (44)..(349): Homolog of NCBI NO: 67243 NR Description: fructose-bisphosphatase (EC 3.1.3.11),
  misc_feature (1)..(349): Homolog of NCBI NO: 585118 NR Description: FRUCTOSE-1,6-BISPHOSPHATASE, CHLOROPLAST
  misc_feature (44)..(349): Homolog of NCBI NO: 3915687 NR Description: Fructose-1,6-bisphosphatase, chloroplast
  misc_feature (44)..(349): Homolog of NCBI NO: 4585576 NR Description: fructose-1,6-bisphosphatase precursor [Solanum
  misc_feature (40)..(350): Homolog of NCBI NO: 16519317 NR Description: fructose 1,6-bisphosphatase [Galdieria
  misc_feature (1)..(349): Homolog of NCBI NO: 15232408 NR Description: fructose-bisphosphatase precursor; protein id: supported by cDNA: gi_14532619, supported by cDNA: gi_16226764
  misc_feature (44)..(349): Homolog of NCBI NO: 4218951 NR Description: fructose-1,6-bisphosphatase precursor [Brassica
  misc_feature (1)..(349): Homolog of NCBI NO: 99693 NR Description: fructose-bisphosphatase (EC 3.1.3.11) precursor,
  misc_feature (1)..(349): Homolog of NCBI NO: 14318171 NR Description: fructose-1,6-bisphosphatase [Pisum sativum]

SEQ ID NO: 78411 - protein, 249 aa, Arabidopsis thaliana; identical to SEQ ID NO: 26124
  peptide (1)..(249): Ceres Seq. ID no. 12641131
  misc_feature (1)..(240): Pfam Name: Fructose-1-6-bisphosphatase Pfam Description: Fructose-1-6-bisphosphatase
  misc_feature (1)..(249): Homolog of NCBI NO: 15237685 NR Description: fructose-bisphosphatase-like protein; protein id:
  misc_feature (1)..(236): Homolog of NCBI NO: 67243 NR Description: fructose-bisphosphatase (EC 3.1.3.11),
  misc_feature (1)..(236): Homolog of NCBI NO: 585118 NR Description: FRUCTOSE-1,6-BISPHOSPHATASE, CHLOROPLAST
  misc_feature (1)..(236): Homolog of NCBI NO: 3915687 NR Description: Fructose-1,6-bisphosphatase, chloroplast
  misc_feature (1)..(236): Homolog of NCBI NO: 4585576 NR Description: fructose-1,6-bisphosphatase precursor [Solanum
  misc_feature (1)..(237): Homolog of NCBI NO: 16519317 NR Description: fructose 1,6-bisphosphatase [Galdieria
  misc_feature (1)..(236): Homolog of NCBI NO: 15232408 NR Description: fructose-bisphosphatase precursor; protein id: supported by cDNA: gi_14532619, supported by cDNA: gi_16226764
  misc_feature (1)..(236): Homolog of NCBI NO: 4218951 NR Description: fructose-1,6-bisphosphatase precursor [Brassica
  misc_feature (1)..(236): Homolog of NCBI NO: 99693 NR Description: fructose-bisphosphatase (EC 3.1.3.11) precursor,
  misc_feature (1)..(236): Homolog of NCBI NO: 14318171 NR Description: fructose-1,6-bisphosphatase [Pisum sativum]

SEQ ID NO: 78412 - DNA, 2541 bp, Arabidopsis thaliana
  misc_feature (1)..(2541): Ceres Seq. ID no. 12641142
  misc_feature: MA Experiment ID: 20000227 Result: Up-regulated in Transcription
  misc_feature: MA Experiment 20000227 PARAMETER Experiment Name: At_Root-Tips-vs-Tops_P Parameter: Tissue Value: Root Tips vs. Root Tops
  misc_feature: MA Experiment ID: 20000234 Result: Up-regulated in Transcription
  misc_feature: MA Experiment 20000234 PARAMETER Experiment Name: At_Siliques_P Parameter: Age (day) Value: 21
  misc_feature: MA Experiment 20000234 PARAMETER Experiment Name: At_Siliques_P Parameter: Organism Value: A. thaliana
  misc_feature: MA Experiment 20000234 PARAMETER Experiment Name: At_Siliques_P Parameter: Plant Line Value: WS
  misc_feature: MA Experiment 20000234 PARAMETER Experiment Name: At_Siliques_P Parameter: Tissue Value: Less Than 5mm Siliques vs. Whole Plant
  misc_feature: MA Experiment ID: 20000235 Result: Up-regulated in Transcription
  misc_feature: MA Experiment 20000235 PARAMETER Experiment Name: At_Siliques_P Parameter: Age (day) Value: 21
  misc_feature: MA Experiment 20000235 PARAMETER Experiment Name: At_Siliques_P Parameter: Organism Value: A. thaliana
  misc_feature: MA Experiment 20000235 PARAMETER Experiment Name: At_Siliques_P Parameter: Plant Line Value: WS
  misc_feature: MA Experiment 20000235 PARAMETER Experiment Name: At_Siliques_P Parameter: Tissue Value: 5-10mm Siliques vs. Whole Plant
  misc_feature: MA Experiment ID: 20000495 Result: Up-regulated in Transcription
  misc_feature: MA Experiment 20000495 PARAMETER Experiment Name: At_Guard_Cells_P Parameter: Harvest Date Value: 8/2/2002
  misc_feature: MA Experiment 20000495 PARAMETER Experiment Name: At_Guard_Cells_P Parameter: Organism Value: A. thaliana
  misc_feature: MA Experiment 20000495 PARAMETER Experiment Name: At_Guard_Cells_P Parameter: Tissue Value: Guard Cells vs. Leaves
atgaagctcccttgcacgattcgatcaataacaagctctcattttcgcaatagctttagaaatgtgagctctgtgatcgattctgcacaagaagaatgtagaatcgctgaagataagcaattcgtcgatgctgtcaaaagaatcgtgcgagggaaacggagctgggagatcgcattgagcagtgagctagtctcgagaagattgaagactgttcatgttgaagagattctgattggaaccattgatgatcccaaattgggtttgaggtttttcaatttcctcggtttgcatcgaggattcgaccattccacggcgtcgttttgtattttgatccatgctctggtcaaagctaatctcttctggcctgcttcatcactgttgcagacgcttctgcttcgtgcgctgaagccaagtgacgtttttaatgtgctttttagttgttatgaaaaatgtaagcttagttcaagctcgagttttgatttgttgattcagcattatgtacgaagtaggagagttctagatggagttttggtgtttaagatgatgataacgaaagttagtttactgcctgaagtgagaactttgagtgctcttttacatgggttggttaagtttaggcattttgatgggctttgtaagaagcagaaggtttgggaggctgttgggataaagaaggatttagctggaaaagatctgaaaccagatgttgtgacatattgtacattagtctacgggttatgtaaagtgcaagaatttgagatcggattggagatgatggatgagatgttatgtttgaggttcagtcctagtgaagctgcggtttcaagtttggtagaggggttaaggaagaggggaaagattgaagaggcgcttaacttggttaaaagagtagtagattttggtgtctcacctaatttatttgtgtataacgcattgattgactcattgtgcaaaggtagaaagttccacgaagctgagttgctttttgataggatggggaaaattgggttgcgtcctaatgatgtgacctattcaattttgattgatatgttttgcagaagagggaaactggatacggcacttagtttcctgggggaaatggttgatacgggtttgaaactaagtgtgtatccatacaattctttgattaacgggcactgcaagttcggtgacattagtgcagcagagggtttcatggcagagatgattaataaaaagttggagccaacagtggtaacatacacatcattaatgggtggatattgcagcaaagggaaaataaacaaggcccttaggctctatcatgagatgacagggaagggtattgcgccgagtatctatacattcaccacgcttttatcgggtctattccgtgctgggttgattcgtgatgcagtaaagctgtttaacgagatggcagaatggaatgttaagccaaacagagtgacttataatgtcatgattgaaggttattgcgaggaaggagacatgtctaaagcctttgagttcctgaaagaaatgaccgagaaaggtattgtgcctgatacatacagttatagaccgttgatacacgggctatgtctcacaggtcaagcttcggaagccaaagtgttcgtggatggccttcacaagggaaattgtgagctgaatgagatatgttataccggactcttacacggattttgcagagaaggaaaattagaagaggcgttaagcgtttgtcaggagatggtacaaagaggggtggatttggaccttgtgtgctatggtgttcttatagatggaagtttaaagcacaaagatcgaaagttgttttttggacttttaaaggagatgcatgatagaggactaaagcctgatgatgtgatttatacaagtatgattgatgcaaagagcaaaaccggagatttcaaggaagcatttggaatatgggatttgatgataaacgaagggtgtgtacctaatgaagtcacgtacactgctgttatcaacggattatgcaaagccgggtttgttaatgaagccgaggttctttgttcaaaaatgcagcctgtcagttcggttcctaaccaagtaacgtatggttgttttctcgacattctcaccaaaggagaagtagacatgcagaaagctgtggagctccataatgcaatcttgaaagggcttttagcaaacaccgctacatataatatgttgatccgcggtttttgtagacaagggagaatagaagaagcttctgagctcatcacaaggatgataggcgatggagtttcccctgattgtataacctacacaacaatgatcaatgagctttgtaggagaaacgatgtgaagaaagcgattgagttatggaactcgatgacggaaaagggtataaggccagatagagtagcgtataacaccctaatacacggttgttgtgtggcgggagaaatggggaaggcgaccgagttgaggaatgagatgttgagacaaggcttgatacctaacaacaaaaccagtagaacaactacttcgaatgacactagttctaaatcctaa

SEQ ID NO: 78413 - protein, 846 aa, Arabidopsis thaliana
  peptide (1)..(846): Ceres Seq. ID no. 12641143
  misc_feature (517)..(551): Pfam Name: PPR repeat Pfam Description: PPR repeat
  misc_feature (1)..(841): Homolog of NCBI NO: 15238562 NR Description: putative protein; protein id: At5g59900.1 thaliana] >gi|9757911|dbj|BAB08358.1|
  misc_feature (163)..(839): Homolog of NCBI NO: 34895906 NR Description: P0030H07.18 [Oryza sativa (japonica
  misc_feature (55)..(833): Homolog of NCBI NO: 34394343 NR Description: putative fertility restorer homologue [Oryza
  misc_feature (210)..(790): Homolog of NCBI NO: 34394343 NR Description: putative fertility restorer homologue [Oryza
  misc_feature (732)..(840): Homolog of NCBI NO: 34394343 NR Description: putative fertility restorer homologue [Oryza
  misc_feature (162)..(830): Homolog of NCBI NO: 15221621 NR Description: unknown protein; protein id: At1g62910.1
  misc_feature (76)..(763): Homolog of NCBI NO: 15242446 NR Description: putative protein; protein id: At5g39710.1
  misc_feature (79)..(832): Homolog of NCBI NO: 15241049 NR Description: putative protein; protein id: At5g55840.1
  misc_feature (126)..(839): Homolog of NCBI NO: 9502388 NR Description: T12C24.15 [Arabidopsis thaliana]
  misc_feature (210)..(833): Homolog of NCBI NO: 15241491 NR Description: putative protein; protein id: At5g14770.1
MKLPCTIRSITSSHFRNSFRNVSSVIDSAQEECRIAEDKQFVDAVKRIVRGKRSWEIALSSELVSRRLKTVHVEEILIGTIDDPKLGLRFFNFLGLHRGFDHSTASFCILIHALVKANLFWPASSLLQTLLLRALKPSDVFNVLFSCYEKCKLSSSSSFDLLIQHYVRSRRVLDGVLVFKMMITKVSLLPEVRTLSALLHGLVKFRHFDGLCKKQKVWEAVGIKKDLAGKDLKPDVVTYCTLVYGLCKVQEFEIGLEMMDEMLCLRFSPSEAAVSSLVEGLRKRGKIEEALNLVKRVVDFGVSPNLFVYNALIDSLCKGRKFHEAELLFDRMGKIGLRPNDVTYSILIDMFCRRGKLDTALSFLGEMVDTGLKLSVYPYNSLINGHCKFGDISAAEGFMAEMINKKLEPTVVTYTSLMGGYCSKGKINKALRLYHEMTGKGIAPSIYTFTTLLSGLFRAGLIRDAVKLFNEMAEWNVKPNRVTYNVMIEGYCEEGDMSKAFEFLKEMTEKGIVPDTYSYRPLIHGLCLTGQASEAKVFVDGLHKGNCELNEICYTGLLHGFCREGKLEEALSVCQEMVQRGVDLDLVCYGVLIDGSLKHKDRKLFFGLLKEMHDRGLKPDDVIYTSMIDAKSKTGDFKEAFGIWDLMINEGCVPNEVTYTAVINGLCKAGFVNEAEVLCSKMQPVSSVPNQVTYGCFLDILTKGEVDMQKAVELHNAILKGLLANTATYNMLIRGFCRQGRIEEASELITRMIGDGVSPDCITYTTMINELCRRNDVKKAIELWNSMTEKGIRPDRVAYNTLIHGCCVAGEMGKATELRNEMLRQGLIPNNKTSRTTTSNDTSSKS

SEQ ID NO: 78414 - protein, 666 aa, Arabidopsis thaliana
  peptide (1)..(666): Ceres Seq. ID no. 12641144
  misc_feature (337)..(371): Pfam Name: PPR repeat Pfam Description: PPR repeat
  misc_feature (1)..(661): Homolog of NCBI NO: 15238562 NR Description: putative protein; protein id: At5g59900.1 thaliana] >gi|9757911|dbj|BAB08358.1|
  misc_feature (1)..(659): Homolog of NCBI NO: 34895906 NR Description: P0030H07.18 [Oryza sativa (japonica
  misc_feature (1)..(653): Homolog of NCBI NO: 34394343 NR Description: putative fertility restorer homologue [Oryza
  misc_feature (30)..(610): Homolog of NCBI NO: 34394343 NR Description: putative fertility restorer homologue [Oryza
  misc_feature (552)..(660): Homolog of NCBI NO: 34394343 NR Description: putative fertility restorer homologue [Oryza
  misc_feature (1)..(650): Homolog of NCBI NO: 15221621 NR Description: unknown protein; protein id: At1g62910.1
  misc_feature (1)..(583): Homolog of NCBI NO: 15242446 NR Description: putative protein; protein id: At5g39710.1
  misc_feature (1)..(652): Homolog of NCBI NO: 15241049 NR Description: putative protein; protein id: At5g55840.1
  misc_feature (1)..(659): Homolog of NCBI NO: 9502388 NR Description: T12C24.15 [Arabidopsis thaliana]
  misc_feature (30)..(653): Homolog of NCBI NO: 15241491 NR Description: putative protein; protein id: At5g14770.1
MMITKVSLLPEVRTLSALLHGLVKFRHFDGLCKKQKVWEAVGIKKDLAGKDLKPDVVTYCTLVYGLCKVQEFEIGLEMMDEMLCLRFSPSEAAVSSLVEGLRKRGKIEEALNLVKRVVDFGVSPNLFVYNALIDSLCKGRKFHEAELLFDRMGKIGLRPNDVTYSILIDMFCRRGKLDTALSFLGEMVDTGLKLSVYPYNSLINGHCKFGDISAAEGFMAEMINKKLEPTVVTYTSLMGGYCSKGKINKALRLYHEMTGKGIAPSIYTFTTLLSGLFRAGLIRDAVKLFNEMAEWNVKPNRVTYNVMIEGYCEEGDMSKAFEFLKEMTEKGIVPDTYSYRPLIHGLCLTGQASEAKVFVDGLHKGNCELNEICYTGLLHGFCREGKLEEALSVCQEMVQRGVDLDLVCYGVLIDGSLKHKDRKLFFGLLKEMHDRGLKPDDVIYTSMIDAKSKTGDFKEAFGIWDLMINEGCVPNEVTYTAVINGLCKAGFVNEAEVLCSKMQPVSSVPNQVTYGCFLDILTKGEVDMQKAVELHNAILKGLLANTATYNMLIRGFCRQGRIEEASELITRMIGDGVSPDCITYTTMINELCRRNDVKKAIELWNSMTEKGIRPDRVAYNTLIHGCCVAGEMGKATELRNEMLRQGLIPNNKTSRTTTSNDTSSKS

SEQ ID NO: 78415 - protein, 665 aa, Arabidopsis thaliana
  peptide (1)..(665): Ceres Seq. ID no. 12641145
  misc_feature (336)..(370): Pfam Name: PPR repeat Pfam Description: PPR repeat
  misc_feature (1)..(660): Homolog of NCBI NO: 15238562 NR Description: putative protein; protein id: At5g59900.1 thaliana] >gi|9757911|dbj|BAB08358.1|
  misc_feature (1)..(658): Homolog of NCBI NO: 34895906 NR Description: P0030H07.18 [Oryza sativa (japonica
  misc_feature (1)..(652): Homolog of NCBI NO: 34394343 NR Description: putative fertility restorer homologue [Oryza
  misc_feature (29)..(609): Homolog of NCBI NO: 34394343 NR Description: putative fertility restorer homologue [Oryza
  misc_feature (551)..(659): Homolog of NCBI NO: 34394343 NR Description: putative fertility restorer homologue [Oryza
  misc_feature (1)..(649): Homolog of NCBI NO: 15221621 NR Description: unknown protein; protein id: At1g62910.1
  misc_feature (1)..(582): Homolog of NCBI NO: 15242446 NR Description: putative protein; protein id: At5g39710.1
  misc_feature (1)..(651): Homolog of NCBI NO: 15241049 NR Description: putative protein; protein id: At5g55840.1
  misc_feature (1)..(658): Homolog of NCBI NO: 9502388 NR Description: T12C24.15 [Arabidopsis thaliana]
  misc_feature (29)..(652): Homolog of NCBI NO: 15241491 NR Description: putative protein; protein id: At5g14770.1
MITKVSLLPEVRTLSALLHGLVKFRHFDGLCKKQKVWEAVGIKKDLAGKDLKPDVVTYCTLVYGLCKVQEFEIGLEMMDEMLCLRFSPSEAAVSSLVEGLRKRGKIEEALNLVKRVVDFGVSPNLFVYNALIDSLCKGRKFHEAELLFDRMGKIGLRPNDVTYSILIDMFCRRGKLDTALSFLGEMVDTGLKLSVYPYNSLINGHCKFGDISAAEGFMAEMINKKLEPTVVTYTSLMGGYCSKGKINKALRLYHEMTGKGIAPSIYTFTTLLSGLFRAGLIRDAVKLFNEMAEWNVKPNRVTYNVMIEGYCEEGDMSKAFEFLKEMTEKGIVPDTYSYRPLIHGLCLTGQASEAKVFVDGLHKGNCELNEICYTGLLHGFCREGKLEEALSVCQEMVQRGVDLDLVCYGVLIDGSLKHKDRKLFFGLLKEMHDRGLKPDDVIYTSMIDAKSKTGDFKEAFGIWDLMINEGCVPNEVTYTAVINGLCKAGFVNEAEVLCSKMQPVSSVPNQVTYGCFLDILTKGEVDMQKAVELHNAILKGLLANTATYNMLIRGFCRQGRIEEASELITRMIGDGVSPDCITYTTMINELCRRNDVKKAIELWNSMTEKGIRPDRVAYNTLIHGCCVAGEMGKATELRNEMLRQGLIPNNKTSRTTTSNDTSSKS

SEQ ID NO: 78416 - DNA, 1614 bp, Arabidopsis thaliana
  misc_feature (1)..(1614): Ceres Seq. ID no. 12641168
  misc_feature: MA Experiment ID: 20000265 Result: Up-regulated in Transcription
  misc_feature: MA Experiment 20000265 PARAMETER Experiment Name: At_Open_Flower_P Parameter: Age (day) Value: 21
  misc_feature: MA Experiment 20000265 PARAMETER Experiment Name: At_Open_Flower_P Parameter: Plant Line Value: WS
  misc_feature: MA Experiment 20000265 PARAMETER Experiment Name: At_Open_Flower_P Parameter: Tissue Value: Closed Flower vs. Whole Plant
  misc_feature: MA Experiment ID: 20001910 Result: Up-regulated in Transcription
  misc_feature: MA Experiment 20001910 PARAMETER Experiment Name: At_Drought_Reproduction_P Parameter: Age (day) Value: 37
  misc_feature: MA Experiment 20001910 PARAMETER Experiment Name: At_Drought_Reproduction_P Parameter: Organism Value: A. thaliana
  misc_feature: MA Experiment 20001910 PARAMETER Experiment Name: At_Drought_Reproduction_P Parameter: Plant Line Value: WS
  misc_feature: MA Experiment 20001910 PARAMETER Experiment Name: At_Drought_Reproduction_P Parameter: Timepoint (day) Value: 7
  misc_feature: MA Experiment 20001910 PARAMETER Experiment Name: At_Drought_Reproduction_P Parameter: Tissue Value: Flowers
  misc_feature: MA Experiment 20001910 PARAMETER Experiment Name: At_Drought_Reproduction_P Parameter: Treatment Value: Drought vs. No Drought
atggctgcaaaaccaaccgttgttaaaaagacaatggcgaagcaattcaccgggaaacgcgaagattcgcagctcctttcggctgtgagacgcggagatttctctgcggtgaaagagattttgagtaatcatatggaatcagaagatgaactaagagatttgttgcggaaacagaaccaatgcggtgagaccgctctttatgtggcggcagaatatggtgatgcggacgtggttgcagagctcatcaagtactatgatcttgaagacgctgagaccaaagctagaaatgggttcgatcctttccacattgctgctaaacaaggcgaattagatgttttgagagtactaatggaagaacatccggagctatcaatgacggtggacttatcaaacacgacggctctacacacggcggcagctcagggacacgtagaggtcgtagagtatctactagaagcagcagggagtagcctagccgcgatcgcaaaaagcaacgggaaaacagcattgcactcggcggctaggaatggtcacgcggaagtggtaaaagcgattgtggcggtggaaccggacacggcaacgaggactgataaaaagggtcagacgccacttcacatggcggtgaaaggacaaagcattgatgtggtggttgagttaatgaagggacatcggtcttcgttgaatatggctgattctaaagggaacactgcgttacatgttgctactaggaaaggtcgcattaagatagtggaattacttctagataacaacgagacaagcccaagcacaaaagcgataaacagagcaggagaaacgccgcttgacacggctgagaaaaccggccatcctcagatcgccgcggttctcaaaacccgcggcgttccctcggctaaagctatcaacaacactactaggccaaacgcggcgcgtgagctcaaacaaacggtgagcgacatcaaacatgaagttcatcaccagctagaacacgctcgagagacaagaaaacgcgttcaaggaatcgccaaacgcattaacaaaatgcacgtagaaggtcttgacaatgcgattaactcaaccacagtcgtggcggttctaattgcaaccgtcgctttcgccgccattttcactgtcccggggcaatatgcagacgaattgagttcgctcttaccgggacaatctctcggagaagcgaacatcgcggatagacccgcgtttgcgatcttcttcatattcgattcaatcgctctttttatatctttagcggttgtggtggttcagacttcagtggttgcgattgaacacaaggcaaagaagaatatgatggctgtgataaacaagttgatgtggttagcttgcgttttgatatctgtggcatttttggcgttagcgtttgtggtggttggtgaagaagagcggtggctagcggttggcgtgacggtgtttggtgcaacgataatgctcacgacgcttgggaccatgtgttattgggtcattatgcatcgaatcgaggcttcgaatgttagaaagtcgagaaaagagtcgatggcaagatcgagacaatcaggtttattggaattttctgggattttaactaagagaatgtatgctatttag

SEQ ID NO: 78417 - protein, 537 aa, Arabidopsis thaliana
  peptide (1)..(537): Ceres Seq. ID no. 12641169
  misc_feature (96)..(128): Pfam Name: Ankyrin repeat Pfam Description: Ankyrin repeat
  misc_feature (1)..(537): Homolog of NCBI NO: 15238604 NR Description: ankyrin-like protein; protein id: At5g60070.1
  misc_feature (3)..(537): Homolog of NCBI NO: 15222993 NR Description: hypothetical protein; protein id: At1g07710.1
  misc_feature (2)..(537): Homolog of NCBI NO: 24796797 NR Description: putative ankyrin repeat containing protein [Oryza
  misc_feature (18)..(537): Homolog of NCBI NO: 15225141 NR Description: ankyrin-like protein; protein id: At2g31820.1
  misc_feature (8)..(515): Homolog of NCBI NO: 30679697 NR Description: ankyrin repeat protein family [Arabidopsis
  misc_feature (12)..(515): Homolog of NCBI NO: 11357168 NR Description: ankyrin-like protein - Arabidopsis thaliana
  misc_feature (18)..(537): Homolog of NCBI NO: 15220595 NR Description: unknown protein; protein id: At1g05640.1
  misc_feature (9)..(522): Homolog of NCBI NO: 15230470 NR Description: ankyrin-like protein; protein id: At3g12360.1
  misc_feature (9)..(522): Homolog of NCBI NO: 21553618 NR Description: ankyrin-like protein [Arabidopsis thaliana]
  misc_feature (27)..(511): Homolog of NCBI NO: 18379277 NR Description: expressed protein; protein id: At2g01680.1, by cDNA: 121540. [Arabidopsis thaliana] >gi|25410921|pir||G84427
MAAKPTVVKKTMAKQFTGKREDSQLLSAVRRGDFSAVKEILSNHMESEDELRDLLRKQNQCGETALYVAAEYGDADVVAELIKYYDLEDAETKARNGFDPFHIAAKQGELDVLRVLMEEHPELSMTVDLSNTTALHTAAAQGHVEVVEYLLEAAGSSLAAIAKSNGKTALHSAARNGHAEVVKAIVAVEPDTATRTDKKGQTPLHMAVKGQSIDVVVELMKGHRSSLNMADSKGNTALHVATRKGRIKIVELLLDNNETSPSTKAINRAGETPLDTAEKTGHPQIAAVLKTRGVPSAKAINNTTRPNAARELKQTVSDIKHEVHHQLEHARETRKRVQGIAKRINKMHVEGLDNAINSTTVVAVLIATVAFAAIFTVPGQYADELSSLLPGQSLGEANIADRPAFAIFFIFDSIALFISLAVVVVQTSVVAIEHKAKKNMMAVINKLMWLACVLISVAFLALAFVVVGEEERWLAVGVTVFGATIMLTTLGTMCYWVIMHRIEASNVRKSRKESMARSRQSGLLEFSGILTKRMYAI

SEQ ID NO: 78418 - protein, 526 aa, Arabidopsis thaliana
  peptide (1)..(526): Ceres Seq. ID no. 12641170
  misc_feature (85)..(117): Pfam Name: Ankyrin repeat Pfam Description: Ankyrin repeat
  misc_feature (1)..(526): Homolog of NCBI NO: 15238604 NR Description: ankyrin-like protein; protein id: At5g60070.1
  misc_feature (1)..(526): Homolog of NCBI NO: 15222993 NR Description: hypothetical protein; protein id: At1g07710.1
  misc_feature (1)..(526): Homolog of NCBI NO: 24796797 NR Description: putative ankyrin repeat containing protein [Oryza
  misc_feature (7)..(526): Homolog of NCBI NO: 15225141 NR Description: ankyrin-like protein; protein id: At2g31820.1
  misc_feature (1)..(504): Homolog of NCBI NO: 30679697 NR Description: ankyrin repeat protein family [Arabidopsis
  misc_feature (1)..(504): Homolog of NCBI NO: 11357168 NR Description: ankyrin-like protein - Arabidopsis thaliana
  misc_feature (7)..(526): Homolog of NCBI NO: 15220595 NR Description: unknown protein; protein id: At1g05640.1
  misc_feature (1)..(511): Homolog of NCBI NO: 15230470 NR Description: ankyrin-like protein; protein id: At3g12360.1
  misc_feature (1)..(511): Homolog of NCBI NO: 21553618 NR Description: ankyrin-like protein [Arabidopsis thaliana]
  misc_feature (16)..(500): Homolog of NCBI NO: 18379277 NR Description: expressed protein; protein id: At2g01680.1, by cDNA: 121540. [Arabidopsis thaliana] >gi|25410921|pir||G84427
MAKQFTGKREDSQLLSAVRRGDFSAVKEILSNHMESEDELRDLLRKQNQCGETALYVAAEYGDADVVAELIKYYDLEDAETKARNGFDPFHIAAKQGELDVLRVLMEEHPELSMTVDLSNTTALHTAAAQGHVEVVEYLLEAAGSSLAAIAKSNGKTALHSAARNGHAEVVKAIVAVEPDTATRTDKKGQTPLHMAVKGQSIDVVVELMKGHRSSLNMADSKGNTALHVATRKGRIKIVELLLDNNETSPSTKAINRAGETPLDTAEKTGHPQIAAVLKTRGVPSAKAINNTTRPNAARELKQTVSDIKHEVHHQLEHARETRKRVQGIAKRINKMHVEGLDNAINSTTVVAVLIATVAFAAIFTVPGQYADELSSLLPGQSLGEANIADRPAFAIFFIFDSIALFISLAVVVVQTSVVAIEHKAKKNMMAVINKLMWLACVLISVAFLALAFVVVGEEERWLAVGVTVFGATIMLTTLGTMCYWVIMHRIEASNVRKSRKESMARSRQSGLLEFSGILTKRMYAI

SEQ ID NO: 78419 - protein, 493 aa, Arabidopsis thaliana
  peptide (1)..(493): Ceres Seq. ID no. 12641171
  misc_feature (52)..(84): Pfam Name: Ankyrin repeat Pfam Description: Ankyrin repeat
  misc_feature (1)..(493): Homolog of NCBI NO: 15238604 NR Description: ankyrin-like protein; protein id: At5g60070.1
  misc_feature (1)..(493): Homolog of NCBI NO: 15222993 NR Description: hypothetical protein; protein id: At1g07710.1
  misc_feature (1)..(493): Homolog of NCBI NO: 24796797 NR Description: putative ankyrin repeat containing protein [Oryza
  misc_feature (1)..(493): Homolog of NCBI NO: 15225141 NR Description: ankyrin-like protein; protein id: At2g31820.1
  misc_feature (1)..(471): Homolog of NCBI NO: 30679697 NR Description: ankyrin repeat protein family [Arabidopsis
  misc_feature (1)..(471): Homolog of NCBI NO: 11357168 NR Description: ankyrin-like protein - Arabidopsis thaliana
  misc_feature (1)..(493): Homolog of NCBI NO: 15220595 NR Description: unknown protein; protein id: At1g05640.1
  misc_feature (1)..(478): Homolog of NCBI NO: 15230470 NR Description: ankyrin-like protein; protein id: At3g12360.1
  misc_feature (1)..(478): Homolog of NCBI NO: 21553618 NR Description: ankyrin-like protein [Arabidopsis thaliana]
  misc_feature (1)..(467): Homolog of NCBI NO: 18379277 NR Description: expressed protein; protein id: At2g01680.1, by cDNA: 121540. [Arabidopsis thaliana] >gi|25410921|pir||G84427
MESEDELRDLLRKQNQCGETALYVAAEYGDADVVAELIKYYDLEDAETKARNGFDPFHIAAKQGELDVLRVLMEEHPELSMTVDLSNTTALHTAAAQGHVEVVEYLLEAAGSSLAAIAKSNGKTALHSAARNGHAEVVKAIVAVEPDTATRTDKKGQTPLHMAVKGQSIDVVVELMKGHRSSLNMADSKGNTALHVATRKGRIKIVELLLDNNETSPSTKAINRAGETPLDTAEKTGHPQIAAVLKTRGVPSAKAINNTTRPNAARELKQTVSDIKHEVHHQLEHARETRKRVQGIAKRINKMHVEGLDNAINSTTVVAVLIATVAFAAIFTVPGQYADELSSLLPGQSLGEANIADRPAFAIFFIFDSIALFISLAVVVVQTSVVAIEHKAKKNMMAVINKLMWLACVLISVAFLALAFVVVGEEERWLAVGVTVFGATIMLTTLGTMCYWVIMHRIEASNVRKSRKESMARSRQSGLLEFSGILTKRMYAI

SEQ ID NO: 78420 - DNA, 849 bp, Arabidopsis thaliana
  misc_feature (1)..(849): Ceres Seq. ID no. 12641172
  misc_feature: MA Experiment ID: 20000171 Result: Up-regulated in Transcription
  misc_feature: MA Experiment 20000171 PARAMETER Experiment Name: At_42deg_Heat_P Parameter: Age (day) Value: 14
  misc_feature: MA Experiment 20000171 PARAMETER Experiment Name: At_42deg_Heat_P Parameter: Organism Value: A. thaliana
  misc_feature: MA Experiment 20000171 PARAMETER Experiment Name: At_42deg_Heat_P Parameter: Plant Line Value: WS
  misc_feature: MA Experiment 20000171 PARAMETER Experiment Name: At_42deg_Heat_P Parameter: Temperature (deg C) Value: 42 vs. 22
  misc_feature: MA Experiment 20000171 PARAMETER Experiment Name: At_42deg_Heat_P Parameter: Timepoint (hr) Value: 1
  misc_feature: MA Experiment 20000171 PARAMETER Experiment Name: At_42deg_Heat_P Parameter: Tissue Value: Aerial
  misc_feature: MA Experiment ID: 20000173 Result: Up-regulated in Transcription
  misc_feature: MA Experiment 20000173 PARAMETER Experiment Name: At_42deg_Heat_P Parameter: Age (day) Value: 14
  misc_feature: MA Experiment 20000173 PARAMETER Experiment Name: At_42deg_Heat_P Parameter: Organism Value: A. thaliana
  misc_feature: MA Experiment 20000173 PARAMETER Experiment Name: At_42deg_Heat_P Parameter: Plant Line Value: WS
  misc_feature: MA Experiment 20000173 PARAMETER Experiment Name: At_42deg_Heat_P Parameter: Temperature (deg C) Value: 42 vs. 22
  misc_feature: MA Experiment 20000173 PARAMETER Experiment Name: At_42deg_Heat_P Parameter: Timepoint (hr) Value: 6
  misc_feature: MA Experiment 20000173 PARAMETER Experiment Name: At_42deg_Heat_P Parameter: Tissue Value: Aerial
  misc_feature: MA Experiment ID: 20000180 Result: Up-regulated in Transcription
  misc_feature: MA Experiment 20000180 PARAMETER Experiment Name: At_Germinating_Seeds_P Parameter: Age (hr) Value: 24 vs. 0
  misc_feature: MA Experiment 20000180 PARAMETER Experiment Name: At_Germinating_Seeds_P Parameter: Tissue Value: Germinating Seeds
  misc_feature: MA Experiment ID: 20000184 Result: Up-regulated in Transcription
  misc_feature: MA Experiment 20000184 PARAMETER Experiment Name: At_Shoots__P Parameter: Age (day) Value: 7
  misc_feature: MA Experiment 20000184 PARAMETER Experiment Name: At_Shoots__P Parameter: Tissue Value: Shoots vs. Whole Plant
  misc_feature: MA Experiment ID: 20000185 Result: Up-regulated in Transcription
  misc_feature: MA Experiment 20000185 PARAMETER Experiment Name: At_Roots__P Parameter: Age (day) Value: 7 vs. 21
  misc_feature: MA Experiment 20000185 PARAMETER Experiment Name: At_Roots__P Parameter: Organism Value: A. thaliana
  misc_feature: MA Experiment 20000185 PARAMETER Experiment Name: At_Roots__P Parameter: Tissue Value: Roots vs. Whole Plant
  misc_feature: MA Experiment ID: 20000439 Result: Up-regulated in Transcription
  misc_feature: MA Experiment 20000439 PARAMETER Experiment Name: At_Roots__P Parameter: Age (day) Value: 14 vs. 21
  misc_feature: MA Experiment 20000439 PARAMETER Experiment Name: At_Roots__P Parameter: Organism Value: A. thaliana
  misc_feature: MA Experiment 20000439 PARAMETER Experiment Name: At_Roots__P Parameter: Tissue Value: Roots vs. Whole Plant
  misc_feature: MA Experiment ID: 20001451 Result: Down-regulated in Transcription
  misc_feature: MA Experiment 20001451 PARAMETER Experiment Name: At_Far-red-induction_P Parameter: Age (day) Value: 7
  misc_feature: MA Experiment 20001451 PARAMETER Experiment Name: At_Far-red-induction_P Parameter: Light Value: Far-red vs. White
  misc_feature: MA Experiment 20001451 PARAMETER Experiment Name: At_Far-red-induction_P Parameter: Organism Value: A. thaliana
  misc_feature: MA Experiment 20001451 PARAMETER Experiment Name: At_Far-red-induction_P Parameter: Plant Line Value: Columbia
  misc_feature: MA Experiment 20001451 PARAMETER Experiment Name: At_Far-red-induction_P Parameter: Timepoint (hr) Value: 24
  misc_feature: MA Experiment 20001451 PARAMETER Experiment Name: At_Far-red-induction_P Parameter: Tissue Value: Whole Plant
atggatgaatcggtgacgtcgaactcttctgttgttaatgctgaagcttctagctgtatagatggtgaagatgagttgtgctctacacgaacggtcaagtttcaatttgagatactgaaaggaggaggagaagaagaagaagaagatgatgatgaaagaagtgctgtgatgatgactaaggagttttttcctgttgctaaaggcatgaactttatggattcgagcgctcaaagttcaaggagcaccgttgatatttccttccagagggggaaacaaggtggagactttataggtagcgggagcggtggtggcgatgcttcacgggtgatgcagccaccatcacagccggtgaagaaaagcaggagaggtcctaggtctaagagttctcagtatagaggcgtcactttctatcggaggacaggcagatgggaatcgcatatctgggattgcggtaaacaagtttatttagggcgtatgatcgagctgctgtcaaattccggggtctggaagctgacatcaatttcgttattggcgattatgaagaggatctcaagcagatggcgaatctttccaaagaggaagttgtgcaagtacttcggcgacagagctctggtttctcaaggaataattctagatatcaaggagttgctttgcaaaagattggcgggtggggagctcaaatggagcagcttcatggaaacatattcttatggaattaggggttgtgacaaggcagccgtacaatggaagggaagggaagctgcttccttaattgagcctcatgcatcccgaatgattcccgagctaatgttaagctcgacctcaacttgggaatctctctttcactag

SEQ ID NO: 78421 - protein, 282 aa, Arabidopsis thaliana
  peptide (1)..(282): Ceres Seq. ID no. 12641173
  misc_feature (1)..(268): Homolog of NCBI NO: 30697332 NR Description: AP2 domain transcription factor, putative
  misc_feature (1)..(157): Homolog of NCBI NO: 18401775 NR Description: AP2 domain protein RAP2.7; protein id: supported by cDNA: gi_13272406, supported by cDNA: gi_15292762, by cDNA: gi_20259678 [Arabidopsis thaliana]
  misc_feature (21)..(157): Homolog of NCBI NO: 2281639 NR Description: AP2 domain containing protein RAP2.7 [Arabidopsis
  misc_feature (4)..(157): Homolog of NCBI NO: 13173164 NR Description: APETAL2-like protein [Pisum sativum]
  misc_feature (45)..(157): Homolog of NCBI NO: 15234566 NR Description: apetala2 protein; protein id: At4g36920.1 thaliana] >gi|1351945|sp|P47927|AP2_ARATH Floral homeotic protein
  misc_feature (10)..(157): Homolog of NCBI NO: 28894443 NR Description: LIPLESS1 [Antirrhinum majus]
  misc_feature (4)..(157): Homolog of NCBI NO: 21717332 NR Description: transcription factor AHAP2 [Malus x domestica]
  misc_feature (34)..(157): Homolog of NCBI NO: 34900512 NR Description: putative indeterminate spikelet 1 [Oryza sativa
  misc_feature (4)..(157): Homolog of NCBI NO: 5081555 NR Description: PHAP2A protein [Petunia x hybrida]
  misc_feature (93)..(157): Homolog of NCBI NO: 28894445 NR Description: LIPLESS2 [Antirrhinum majus]
MDESVTSNSSVVNAEASSCIDGEDELCSTRTVKFQFEILKGGGEEEEEDDDERSAVMMTKEFFPVAKGMNFMDSSAQSSRSTVDISFQRGKQGGDFIGSGSGGGDASRVMQPPSQPVKKSRRGPRSKSSQYRGVTFYRRTGRWESHIWDCGKQVYLGRMIELLSNSGVWKLTSISLLAIMKRISSRWRIFPKRKLCKYFGDRALVSQGIILDIKELLCKRLAGGELKWSSFMETYSYGIRGCDKAAVQWKGREAASLIEPHASRMIPELMLSSTSTWESLFH

SEQ ID NO: 78422 - protein, 226 aa, Arabidopsis thaliana
  peptide (1)..(226): Ceres Seq. ID no. 12641174
  misc_feature (1)..(212): Homolog of NCBI NO: 30697332 NR Description: AP2 domain transcription factor, putative
  misc_feature (1)..(101): Homolog of NCBI NO: 18401775 NR Description: AP2 domain protein RAP2.7; protein id: supported by cDNA: gi_13272406, supported by cDNA: gi_15292762, by cDNA: gi_20259678 [Arabidopsis thaliana]
  misc_feature (1)..(101): Homolog of NCBI NO: 2281639 NR Description: AP2 domain containing protein RAP2.7 [Arabidopsis
  misc_feature (1)..(101): Homolog of NCBI NO: 13173164 NR Description: APETAL2-like protein [Pisum sativum]
  misc_feature (1)..(101): Homolog of NCBI NO: 15234566 NR Description: apetala2 protein; protein id: At4g36920.1 thaliana] >gi|1351945|sp|P47927|AP2_ARATH Floral homeotic protein
  misc_feature (1)..(101): Homolog of NCBI NO: 28894443 NR Description: LIPLESS1 [Antirrhinum majus]
  misc_feature (1)..(101): Homolog of NCBI NO: 21717332 NR Description: transcription factor AHAP2 [Malus x domestica]
  misc_feature (1)..(101): Homolog of NCBI NO: 34900512 NR Description: putative indeterminate spikelet 1 [Oryza sativa
  misc_feature (1)..(101): Homolog of NCBI NO: 5081555 NR Description: PHAP2A protein [Petunia x hybrida]
  misc_feature (37)..(101): Homolog of NCBI NO: 28894445 NR Description: LIPLESS2 [Antirrhinum majus]
MMTKEFFPVAKGMNFMDSSAQSSRSTVDISFQRGKQGGDFIGSGSGGGDASRVMQPPSQPVKKSRRGPRSKSSQYRGVTFYRRTGRWESHIWDCGKQVYLGRMIELLSNSGVWKLTSISLLAIMKRISSRWRIFPKRKLCKYFGDRALVSQGIILDIKELLCKRLAGGELKWSSFMETYSYGIRGCDKAAVQWKGREAASLIEPHASRMIPELMLSSTSTWESLFH

SEQ ID NO: 78423 - protein, 225 aa, Arabidopsis thaliana
  peptide (1)..(225): Ceres Seq. ID no. 12641175
  misc_feature (1)..(211): Homolog of NCBI NO: 30697332 NR Description: AP2 domain transcription factor, putative
  misc_feature (1)..(100): Homolog of NCBI NO: 18401775 NR Description: AP2 domain protein RAP2.7; protein id: supported by cDNA: gi_13272406, supported by cDNA: gi_15292762, by cDNA: gi_20259678 [Arabidopsis thaliana]
  misc_feature (1)..(100): Homolog of NCBI NO: 2281639 NR Description: AP2 domain containing protein RAP2.7 [Arabidopsis
  misc_feature (1)..(100): Homolog of NCBI NO: 13173164 NR Description: APETAL2-like protein [Pisum sativum]
  misc_feature (1)..(100): Homolog of NCBI NO: 15234566 NR Description: apetala2 protein; protein id: At4g36920.1 thaliana] >gi|1351945|sp|P47927|AP2_ARATH Floral homeotic protein
  misc_feature (1)..(100): Homolog of NCBI NO: 28894443 NR Description: LIPLESS1 [Antirrhinum majus]
  misc_feature (1)..(100): Homolog of NCBI NO: 21717332 NR Description: transcription factor AHAP2 [Malus x domestica]
  misc_feature (1)..(100): Homolog of NCBI NO: 34900512 NR Description: putative indeterminate spikelet 1 [Oryza sativa
  misc_feature (1)..(100): Homolog of NCBI NO: 5081555 NR Description: PHAP2A protein [Petunia x hybrida]
  misc_feature (36)..(100): Homolog of NCBI NO: 28894445 NR Description: LIPLESS2 [Antirrhinum majus]
MTKEFFPVAKGMNFMDSSAQSSRSTVDISFQRGKQGGDFIGSGSGGGDASRVMQPPSQPVKKSRRGPRSKSSQYRGVTFYRRTGRWESHIWDCGKQVYLGRMIELLSNSGVWKLTSISLLAIMKRISSRWRIFPKRKLCKYFGDRALVSQGIILDIKELLCKRLAGGELKWSSFMETYSYGIRGCDKAAVQWKGREAASLIEPHASRMIPELMLSSTSTWESLFH

SEQ ID NO: 78424 - DNA, 1080 bp, Arabidopsis thaliana
  misc_feature (1)..(1080): Ceres Seq. ID no. 12641191
  misc_feature: MA Experiment ID: 20000355 Result: Up-regulated in Transcription
  misc_feature: MA Experiment 20000355 PARAMETER Experiment Name: At_Siliques_Sub_P Parameter: Age (day) Value: 21
  misc_feature: MA Experiment 20000355 PARAMETER Experiment Name: At_Siliques_Sub_P Parameter: Organism Value: A. thaliana
  misc_feature: MA Experiment 20000355 PARAMETER Experiment Name: At_Siliques_Sub_P Parameter: Plant Line Value: WS
  misc_feature: MA Experiment 20000355 PARAMETER Experiment Name: At_Siliques_Sub_P Parameter: Tissue Value: Less Than 5mm Siliques vs. Whole Plant
atgtcattcacctttatcaccgctattttcatcaagaacaaaacaaacagaatcacacaagaaacagagcaacaacacatattcaacaaaaacaaaatcgccatgagatcgagaagtaaccttataggtctcataaacttcttcactttcctcctgtcgattcctatcctcggcggtggaatatggcttagcagccgagctaactcaaccgattgcctcagattcctccagtggccactcattatcatcggaatatcaatcatggtcatatctttagccggaatcgccggagcttgttaccaaaacaagttcctcatgtggctttaccttttcaccatgttctttgtaatcgctgctcttataggattcacaatcttcgcttacgtagttactgataaaggctcaggccggtttgtgatgaaccgtcggtatcttgattattatctcaatgattattccggttggttaaaggaccgtgtcacagataatggatattggagagatatcggatcgtgtgttagagattctggagtttgtaagaagattggaagagatttaaatggtgttccagaaactgctcatatgttttacttcagaaatctttctcctgttgagtccggatgttgcaagccgccaacagattgtggctatacgtacgtgaacgagacagtgtggattccgggaggagaaatggtgggaccgaacccggactgtatgttgtggaacaatgaccagagactactctgttaccaatgcagctcttgtaaagccggtgttcttggtagcttgaaaaagagttggagaaaagtctcggtgatcaacatcgtggttgtgatcatacttgttatcttctatgtcatcgcgtgtgcggcttaccagaatgttaagaggatgtataatgacgaaccggtcggtgaggctaggatgaccaatctcatcctagtcattttcaaatttaaggagattttgtttttcttcggaattgtgtttttattactctttaatggtttaatggtctgttgttgtaatgataaatttgcttttagtgttttcttctttggatatgttacatatgcatga

SEQ ID NO: 78425 - protein, 359 aa, Arabidopsis thaliana
  peptide (1)..(359): Ceres Seq. ID no. 12641192
  misc_feature (37)..(281): Pfam Name: Tetraspanin family Pfam Description: Tetraspanin family
  misc_feature (35)..(359): Homolog of NCBI NO: 15238641 NR Description: senescence-associated protein - like; protein id:
  misc_feature (35)..(310): Homolog of NCBI NO: 15231187 NR Description: putative protein; protein id: At3g45600.1, by cDNA: 11427., supported by cDNA: gi_14423445 [Arabidopsis
  misc_feature (36)..(294): Homolog of NCBI NO: 3551954 NR Description: senescence-associated protein 5 [Hemerocallis
  misc_feature (36)..(297): Homolog of NCBI NO: 20197174 NR Description: hypothetical protein [Arabidopsis thaliana]
  misc_feature (33)..(297): Homolog of NCBI NO: 29367553 NR Description: senescence-associated protein-like protein [Oryza
  misc_feature (35)..(296): Homolog of NCBI NO: 21537169 NR Description: senescence-associated protein-like protein
  misc_feature (35)..(296): Homolog of NCBI NO: 15234743 NR Description: senescence-associated protein homolog; protein
  misc_feature (39)..(297): Homolog of NCBI NO: 15234374 NR Description: senescence-associated protein -like; protein id: supported by cDNA: 39831., supported by cDNA: gi_17065395, by cDNA: gi_20148628 [Arabidopsis thaliana]
  misc_feature (35)..(296): Homolog of NCBI NO: 15224802 NR Description: putative senescence-associated protein 5; protein
  misc_feature (39)..(296): Homolog of NCBI NO: 15237490 NR Description: senescence-associated protein 5-like protein; id: At5g46700.1, supported by cDNA: gi_17979385 [Arabidopsis
MSFTFITAIFIKNKTNRITQETEQQHIFNKNKIAMRSRSNLIGLINFFTFLLSIPILGGGIWLSSRANSTDCLRFLQWPLIIIGISIMVISLAGIAGACYQNKFLMWLYLFTMFFVIAALIGFTIFAYVVTDKGSGRFVMNRRYLDYYLNDYSGWLKDRVTDNGYWRDIGSCVRDSGVCKKIGRDLNGVPETAHMFYFRNLSPVESGCCKPPTDCGYTYVNETVWIPGGEMVGPNPDCMLWNNDQRLLCYQCSSCKAGVLGSLKKSWRKVSVINIVVVIILVIFYVIACAAYQNVKRMYNDEPVGEARMTNLILVIFKFKEILFFFGIVFLLLFNGLMVCCCNDKFAFSVFFFGYVTYA

SEQ ID NO: 78426 - protein, 325 aa, Arabidopsis thaliana
  peptide (1)..(325): Ceres Seq. ID no. 12641193
  misc_feature (3)..(247): Pfam Name: Tetraspanin family Pfam Description: Tetraspanin family
  misc_feature (1)..(325): Homolog of NCBI NO: 15238641 NR Description: senescence-associated protein - like; protein id:
  misc_feature (1)..(276): Homolog of NCBI NO: 15231187 NR Description: putative protein; protein id: At3g45600.1, by cDNA: 11427., supported by cDNA: gi_14423445 [Arabidopsis
  misc_feature (2)..(260): Homolog of NCBI NO: 3551954 NR Description: senescence-associated protein 5 [Hemerocallis
  misc_feature (2)..(263): Homolog of NCBI NO: 20197174 NR Description: hypothetical protein [Arabidopsis thaliana]
  misc_feature (1)..(263): Homolog of NCBI NO: 29367553 NR Description: senescence-associated protein-like protein [Oryza
  misc_feature (1)..(262): Homolog of NCBI NO: 21537169 NR Description: senescence-associated protein-like protein
  misc_feature (1)..(262): Homolog of NCBI NO: 15234743 NR Description: senescence-associated protein homolog; protein
  misc_feature (5)..(263): Homolog of NCBI NO: 15234374 NR Description: senescence-associated protein -like; protein id: supported by cDNA: 39831., supported by cDNA: gi_17065395, by cDNA: gi_20148628 [Arabidopsis thaliana]
  misc_feature (1)..(262): Homolog of NCBI NO: 15224802 NR Description: putative senescence-associated protein 5; protein
  misc_feature (5)..(262): Homolog of NCBI NO: 15237490 NR Description: senescence-associated protein 5-like protein; id: At5g46700.1, supported by cDNA: gi_17979385 [Arabidopsis
MRSRSNLIGLINFFTFLLSIPILGGGIWLSSRANSTDCLRFLQWPLIIIGISIMVISLAGIAGACYQNKFLMWLYLFTMFFVIAALIGFTIFAYVVTDKGSGRFVMNRRYLDYYLNDYSGWLKDRVTDNGYWRDIGSCVRDSGVCKKIGRDLNGVPETAHMFYFRNLSPVESGCCKPPTDCGYTYVNETVWIPGGEMVGPNPDCMLWNNDQRLLCYQCSSCKAGVLGSLKKSWRKVSVINIVVVIILVIFYVIACAAYQNVKRMYNDEPVGEARMTNLILVIFKFKEILFFFGIVFLLLFNGLMVCCCNDKFAFSVFFFGYVTYA

SEQ ID NO: 78427 - protein, 272 aa, Arabidopsis thaliana
  peptide (1)..(272): Ceres Seq. ID no. 12641194
  misc_feature (1)..(194): Pfam Name: Tetraspanin family Pfam Description: Tetraspanin family
  misc_feature (1)..(272): Homolog of NCBI NO: 15238641 NR Description: senescence-associated protein - like; protein id:
  misc_feature (1)..(223): Homolog of NCBI NO: 15231187 NR Description: putative protein; protein id: At3g45600.1, by cDNA: 11427., supported by cDNA: gi_14423445 [Arabidopsis
  misc_feature (1)..(207): Homolog of NCBI NO: 3551954 NR Description: senescence-associated protein 5 [Hemerocallis
  misc_feature (1)..(210): Homolog of NCBI NO: 20197174 NR Description: hypothetical protein [Arabidopsis thaliana]
  misc_feature (1)..(210): Homolog of NCBI NO: 29367553 NR Description: senescence-associated protein-like protein [Oryza
  misc_feature (1)..(209): Homolog of NCBI NO: 21537169 NR Description: senescence-associated protein-like protein
  misc_feature (1)..(209): Homolog of NCBI NO: 15234743 NR Description: senescence-associated protein homolog; protein
  misc_feature (1)..(210): Homolog of NCBI NO: 15234374 NR Description: senescence-associated protein -like; protein id: supported by cDNA: 39831., supported by cDNA: gi_17065395, by cDNA: gi_20148628 [Arabidopsis thaliana]
  misc_feature (1)..(209): Homolog of NCBI NO: 15224802 NR Description: putative senescence-associated protein 5; protein
  misc_feature (1)..(209): Homolog of NCBI NO: 15237490 NR Description: senescence-associated protein 5-like protein; id: At5g46700.1, supported by cDNA: gi_17979385 [Arabidopsis
MVISLAGIAGACYQNKFLMWLYLFTMFFVIAALIGFTIFAYVVTDKGSGRFVMNRRYLDYYLNDYSGWLKDRVTDNGYWRDIGSCVRDSGVCKKIGRDLNGVPETAHMFYFRNLSPVESGCCKPPTDCGYTYVNETVWIPGGEMVGPNPDCMLWNNDQRLLCYQCSSCKAGVLGSLKKSWRKVSVINIVVVIILVIFYVIACAAYQNVKRMYNDEPVGEARMTNLILVIFKFKEILFFFGIVFLLLFNGLMVCCCNDKFAFSVFFFGYVTYA

SEQ ID NO: 78428 - DNA, 1053 bp, Arabidopsis thaliana
  misc_feature (1)..(1053): Ceres Seq. ID no. 12641301
  misc_feature: MA Experiment ID: 20000173 Result: Down-regulated in Transcription
  misc_feature: MA Experiment 20000173 PARAMETER Experiment Name: At_42deg_Heat_P Parameter: Age (day) Value: 14
  misc_feature: MA Experiment 20000173 PARAMETER Experiment Name: At_42deg_Heat_P Parameter: Organism Value: A. thaliana
  misc_feature: MA Experiment 20000173 PARAMETER Experiment Name: At_42deg_Heat_P Parameter: Plant Line Value: WS
  misc_feature: MA Experiment 20000173 PARAMETER Experiment Name: At_42deg_Heat_P Parameter: Temperature (deg C) Value: 42 vs. 22
  misc_feature: MA Experiment 20000173 PARAMETER Experiment Name: At_42deg_Heat_P Parameter: Timepoint (hr) Value: 6
  misc_feature: MA Experiment 20000173 PARAMETER Experiment Name: At_42deg_Heat_P Parameter: Tissue Value: Aerial
  misc_feature: MA Experiment ID: 20000184 Result: Down-regulated in Transcription
  misc_feature: MA Experiment 20000184 PARAMETER Experiment Name: At_Shoots__P Parameter: Age (day) Value: 7
  misc_feature: MA Experiment 20000184 PARAMETER Experiment Name: At_Shoots__P Parameter: Tissue Value: Shoots vs. Whole Plant
  misc_feature: MA Experiment ID: 20000794 Result: Down-regulated in Transcription
  misc_feature: MA Experiment 20000794 PARAMETER Experiment Name: At_Petals_P Parameter: Age (day) Value: 23-25 days
  misc_feature: MA Experiment 20000794 PARAMETER Experiment Name: At_Petals_P Parameter: Plant Line Value: WS
  misc_feature: MA Experiment 20000794 PARAMETER Experiment Name: At_Petals_P Parameter: Tissue Value: Petals vs. Whole plant
  misc_feature: MA Experiment ID: 20001248 Result: Up-regulated in Transcription
  misc_feature: MA Experiment 20001248 PARAMETER Experiment Name: At_Far-red-induction_P Parameter: Age (day) Value: 7
  misc_feature: MA Experiment 20001248 PARAMETER Experiment Name: At_Far-red-induction_P Parameter: Light Value: Far-red vs. White
  misc_feature: MA Experiment 20001248 PARAMETER Experiment Name: At_Far-red-induction_P Parameter: Organism Value: A. thaliana
  misc_feature: MA Experiment 20001248 PARAMETER Experiment Name: At_Far-red-induction_P Parameter: Plant Line Value: Columbia
  misc_feature: MA Experiment 20001248 PARAMETER Experiment Name: At_Far-red-induction_P Parameter: Timepoint (hr) Value: 4
  misc_feature: MA Experiment 20001248 PARAMETER Experiment Name: At_Far-red-induction_P Parameter: Tissue Value: Whole Plant
atggcggcggagaatgagagaaaatctccttcagcagtctccgatatgggagcttgggcaatgaatgtgataagctccgttggaatcatcatggcgaataaacaacttatgtcctcttctggattcgcatttagtttcgctacaactctcaccggtttccacttcgctttaaccgcattggtcggtatggtatcaaacgctaccggattctctgcttcgaagcatgtacctatgtgggagcttatttggttctccattgtcgctaatgtctctattgctgctatgaacttcagtctcatgctcaattccgttggcttctaccaaatctcgaagctgagcatgattcctgtggtatgtgtaatggaatggattctacatagcaagagatactcaagagaagtgaaaatatctgttgtggttgttgttgttggtgttggtatttgtactgtgactgatgttaaagttaatgccaaaggttttatctgtgcttgtgttgcgattttctcgtcatccttgcagcaaattttaataggttctctacagaagaaatattcaattgggtcctttgagttgttgagtaaaacagcgccgattcaagctttttcgcttcttgttgtcggtcctttagttgattatcttcttagtgggaagttcattatgaagtataatatgtcttccggttgctttctattcattcttctctcatgtggtctagctgtgttctgcaacataagccagtacctttgcatcgggcggttttcagcagtatcgttccaagttattggtcacatgaaaaccgtctgtatcctcacgcttggatggctcctatttgattctgcaatgactttcaaaaacgtagcggggatgattgttgcgattgttgggatggtaatctatagttgggcaatggaattggagaaacagtcgattattgcagcaaaggctttaaacagtgtgaaacatagcttaacagaggaagagtttgaacttttgaaggaaggtgtagaaactacacaatcaaaagatgttgaacttggccgcacaaaagattag

SEQ ID NO: 78429 - protein, 350 aa, Arabidopsis thaliana; identical to SEQ ID NO: 22526
  peptide (1)..(350): Ceres Seq. ID no. 12641302
  misc_feature (1)..(350): Homolog of NCBI NO: 15238957 NR Description: putative protein; protein id: At5g42420.1 thaliana] >gi|9759478|dbj|BAB10483.1|
  misc_feature (3)..(349): Homolog of NCBI NO: 18394949 NR Description: expressed protein; protein id: At1g21070.1, by cDNA: 108746. [Arabidopsis thaliana] >gi|25354485|pir||G86343
  misc_feature (3)..(349): Homolog of NCBI NO: 21536703 NR Description: unknown [Arabidopsis thaliana]
  misc_feature (4)..(349): Homolog of NCBI NO: 18411172 NR Description: expressed protein; protein id: At1g76670.1, by cDNA: gi_14532697, supported by cDNA: gi_16604379, supported cDNA: gi_18491194 [Arabidopsis thaliana] >gi|25354481|pir||A96795
  misc_feature (37)..(349): Homolog of NCBI NO: 26450366 NR Description: unknown protein [Arabidopsis thaliana]
  misc_feature (42)..(349): Homolog of NCBI NO: 33146838 NR Description: transporter-related-like [Oryza sativa (japonica
  misc_feature (4)..(48): Homolog of NCBI NO: 33146838 NR Description: transporter-related-like [Oryza sativa (japonica
  misc_feature (2)..(299): Homolog of NCBI NO: 30313364 NR Description: putative transmembrane protein [Oryza sativa]
  misc_feature (6)..(299): Homolog of NCBI NO: 15234794 NR Description: hypothetical protein; protein id: At4g09810.1
  misc_feature (1)..(299): Homolog of NCBI NO: 18399097 NR Description: expressed protein; protein id: At1g34020.1, by cDNA: 7642. [Arabidopsis thaliana] >gi|25354483|pir||A86464

SEQ ID NO: 78430 - protein, 335 aa, Arabidopsis thaliana; identical to SEQ ID NO: 22527
  peptide (1)..(335): Ceres Seq. ID no. 12641303
  misc_feature (1)..(335): Homolog of NCBI NO: 15238957 NR Description: putative protein; protein id: At5g42420.1 thaliana] >gi|9759478|dbj|BAB10483.1|
  misc_feature (1)..(334): Homolog of NCBI NO: 18394949 NR Description: expressed protein; protein id: At1g21070.1, by cDNA: 108746. [Arabidopsis thaliana] >gi|25354485|pir||G86343
  misc_feature (1)..(334): Homolog of NCBI NO: 21536703 NR Description: unknown [Arabidopsis thaliana]
  misc_feature (1)..(334): Homolog of NCBI NO: 18411172 NR Description: expressed protein; protein id: At1g76670.1, by cDNA: gi_14532697, supported by cDNA: gi_16604379, supported cDNA: gi_18491194 [Arabidopsis thaliana] >gi|25354481|pir||A96795
  misc_feature (22)..(334): Homolog of NCBI NO: 26450366 NR Description: unknown protein [Arabidopsis thaliana]
  misc_feature (27)..(334): Homolog of NCBI NO: 33146838 NR Description: transporter-related-like [Oryza sativa (japonica
  misc_feature (1)..(33): Homolog of NCBI NO: 33146838 NR Description: transporter-related-like [Oryza sativa (japonica
  misc_feature (1)..(284): Homolog of NCBI NO: 30313364 NR Description: putative transmembrane protein [Oryza sativa]
  misc_feature (1)..(284): Homolog of NCBI NO: 15234794 NR Description: hypothetical protein; protein id: At4g09810.1
  misc_feature (1)..(284): Homolog of NCBI NO: 18399097 NR Description: expressed protein; protein id: At1g34020.1, by cDNA: 7642. [Arabidopsis thaliana] >gi|25354483|pir||A86464

SEQ ID NO: 78431 - protein, 330 aa, Arabidopsis thaliana; identical to SEQ ID NO: 22528
  peptide (1)..(330): Ceres Seq. ID no. 12641304
  misc_feature (1)..(330): Homolog of NCBI NO: 15238957 NR Description: putative protein; protein id: At5g42420.1 thaliana] >gi|9759478|dbj|BAB10483.1|
  misc_feature (1)..(329): Homolog of NCBI NO: 18394949 NR Description: expressed protein; protein id: At1g21070.1, by cDNA: 108746. [Arabidopsis thaliana] >gi|25354485|pir||G86343
  misc_feature (1)..(329): Homolog of NCBI NO: 21536703 NR Description: unknown [Arabidopsis thaliana]
  misc_feature (1)..(329): Homolog of NCBI NO: 18411172 NR Description: expressed protein; protein id: At1g76670.1, by cDNA: gi_14532697, supported by cDNA: gi_16604379, supported cDNA: gi_18491194 [Arabidopsis thaliana] >gi|25354481|pir||A96795
  misc_feature (17)..(329): Homolog of NCBI NO: 26450366 NR Description: unknown protein [Arabidopsis thaliana]
  misc_feature (22)..(329): Homolog of NCBI NO: 33146838 NR Description: transporter-related-like [Oryza sativa (japonica
  misc_feature (1)..(28): Homolog of NCBI NO: 33146838 NR Description: transporter-related-like [Oryza sativa (japonica
  misc_feature (1)..(279): Homolog of NCBI NO: 30313364 NR Description: putative transmembrane protein [Oryza sativa]
  misc_feature (1)..(279): Homolog of NCBI NO: 15234794 NR Description: hypothetical protein; protein id: At4g09810.1
  misc_feature (1)..(279): Homolog of NCBI NO: 18399097 NR Description: expressed protein; protein id: At1g34020.1, by cDNA: 7642. [Arabidopsis thaliana] >gi|25354483|pir||A86464

SEQ ID NO: 78432 - DNA, 549 bp, Arabidopsis thaliana
  misc_feature (1)..(549): Ceres Seq. ID no. 12641305
  misc_feature: MA Experiment ID: 108434 Result: Down-regulated in Transcription
  misc_feature: MA Experiment 108434 PARAMETER Experiment Name: At_Root_Tips_cDNA_P Parameter: Tissue Value: Root Tips
  misc_feature: MA Experiment ID: 108461 Result: Up-regulated in Transcription
  misc_feature: MA Experiment 108461 PARAMETER Experiment Name: At_Germinating_Seeds_cDNA_P Parameter: Age (day) Value: 1 vs. 0
  misc_feature: MA Experiment 108461 PARAMETER Experiment Name: At_Germinating_Seeds_cDNA_P Parameter: Tissue Value: Germinating Seeds
  misc_feature: MA Experiment ID: 108462 Result: Up-regulated in Transcription
  misc_feature: MA Experiment 108462 PARAMETER Experiment Name: At_Germinating_Seeds_cDNA_P Parameter: Age (day) Value: 2 vs. 0
  misc_feature: MA Experiment 108462 PARAMETER Experiment Name: At_Germinating_Seeds_cDNA_P Parameter: Tissue Value: Germinating Seeds
  misc_feature: MA Experiment ID: 108463 Result: Up-regulated in Transcription
  misc_feature: MA Experiment 108463 PARAMETER Experiment Name: At_Germinating_Seeds_cDNA_P Parameter: Age (day) Value: 3 vs. 0
  misc_feature: MA Experiment 108463 PARAMETER Experiment Name: At_Germinating_Seeds_cDNA_P Parameter: Tissue Value: Germinating Seeds
  misc_feature: MA Experiment ID: 108464 Result: Up-regulated in Transcription
  misc_feature: MA Experiment 108464 PARAMETER Experiment Name: At_Germinating_Seeds_cDNA_P Parameter: Age (day) Value: 4 vs. 0
  misc_feature: MA Experiment 108464 PARAMETER Experiment Name: At_Germinating_Seeds_cDNA_P Parameter: Tissue Value: Germinating Seeds
  misc_feature: MA Experiment ID: 108489 Result: Up-regulated in Transcription
  misc_feature: MA Experiment ID: 108573 Result: Up-regulated in Transcription
  misc_feature: MA Experiment 108573 PARAMETER Experiment Name: At_Drought_cDNA_P Parameter: Timepoint (hr) Value: 6
  misc_feature: MA Experiment 108573 PARAMETER Experiment Name: At_Drought_cDNA_P Parameter: Tissue Value: Aerial
  misc_feature: MA Experiment 108573 PARAMETER Experiment Name: At_Drought_cDNA_P Parameter: Treatment Value: Drought vs. No Drought
  misc_feature: MA Experiment ID: 108605 Result: Up-regulated in Transcription
  misc_feature: MA Experiment 108605 PARAMETER Experiment Name: At_100uM_ABA_cDNA_P Parameter: Timepoint (hr) Value: 6
  misc_feature: MA Experiment 108605 PARAMETER Experiment Name: At_100uM_ABA_cDNA_P Parameter: Tissue Value: Aerial
  misc_feature: MA Experiment 108605 PARAMETER Experiment Name: At_100uM_ABA_cDNA_P Parameter: Treatment Value: 100uM ABA vs. No Treatment
  misc_feature: MA Experiment ID: 108607 Result: Up-regulated in Transcription
  misc_feature: MA Experiment 108607 PARAMETER Experiment Name: At_100uM_ABA_cDNA_P Parameter: Timepoint (hr) Value: 4
  misc_feature: MA Experiment 108607 PARAMETER Experiment Name: At_100uM_ABA_cDNA_P Parameter: Tissue Value: Aerial
  misc_feature: MA Experiment 108607 PARAMETER Experiment Name: At_100uM_ABA_cDNA_P Parameter: Treatment Value: 100uM ABA vs. No Treatment
  misc_feature: MA Experiment ID: 108668 Result: Up-regulated in Transcription
  misc_feature: MA Experiment 108668 PARAMETER Experiment Name: At_2mM_SA_cDNA_P Parameter: Plant Line Value: WS
  misc_feature: MA Experiment 108668 PARAMETER Experiment Name: At_2mM_SA_cDNA_P Parameter: Timepoint (hr) Value: 6
  misc_feature: MA Experiment 108668 PARAMETER Experiment Name: At_2mM_SA_cDNA_P Parameter: Treatment Value: 2mM SA vs. No Treatment
  misc_feature: MA Experiment ID: 20000069 Result: Up-regulated in Transcription
  misc_feature: MA Experiment 20000069 PARAMETER Experiment Name: At_100uM_ABA_Mutants_cDNA_P Parameter: Plant Line Value: CS23
  misc_feature: MA Experiment 20000069 PARAMETER Experiment Name: At_100uM_ABA_Mutants_cDNA_P Parameter: Timepoint (hr) Value: 6
  misc_feature: MA Experiment 20000069 PARAMETER Experiment Name: At_100uM_ABA_Mutants_cDNA_P Parameter: Tissue Value: Aerial
  misc_feature: MA Experiment 20000069 PARAMETER Experiment Name: At_100uM_ABA_Mutants_cDNA_P Parameter: Treatment Value: 100uM ABA vs. No Treatment
  misc_feature: MA Experiment ID: 20000070 Result: Up-regulated in Transcription
  misc_feature: MA Experiment 20000070 PARAMETER Experiment Name: At_100uM_ABA_Mutants_cDNA_P Parameter: Plant Line Value: CS24
  misc_feature: MA Experiment 20000070 PARAMETER Experiment Name: At_100uM_ABA_Mutants_cDNA_P Parameter: Timepoint (hr) Value: 6
  misc_feature: MA Experiment 20000070 PARAMETER Experiment Name: At_100uM_ABA_Mutants_cDNA_P Parameter: Tissue Value: Aerial
  misc_feature: MA Experiment 20000070 PARAMETER Experiment Name: At_100uM_ABA_Mutants_cDNA_P Parameter: Treatment Value: 100uM ABA vs. No Treatment
  misc_feature: MA Experiment ID: 20000072 Result: Up-regulated in Transcription
  misc_feature: MA Experiment 20000072 PARAMETER Experiment Name: At_100uM_ABA_Mutants_cDNA_P Parameter: Plant Line Value: CS8105
  misc_feature: MA Experiment 20000072 PARAMETER Experiment Name: At_100uM_ABA_Mutants_cDNA_P Parameter: Timepoint (hr) Value: 6
  misc_feature: MA Experiment 20000072 PARAMETER Experiment Name: At_100uM_ABA_Mutants_cDNA_P Parameter: Tissue Value: Aerial
  misc_feature: MA Experiment 20000072 PARAMETER Experiment Name: At_100uM_ABA_Mutants_cDNA_P Parameter: Treatment Value: 100uM ABA vs. No Treatment
  misc_feature: MA Experiment ID: 20000086 Result: Up-regulated in Transcription
  misc_feature: MA Experiment 20000086 PARAMETER Experiment Name: At_100uM_ABA_Mutants_cDNA_P Parameter: Plant Line Value: CS22
  misc_feature: MA Experiment 20000086 PARAMETER Experiment Name: At_100uM_ABA_Mutants_cDNA_P Parameter: Timepoint (hr) Value: 6
  misc_feature: MA Experiment 20000086 PARAMETER Experiment Name: At_100uM_ABA_Mutants_cDNA_P Parameter: Tissue Value: Aerial
  misc_feature: MA Experiment 20000086 PARAMETER Experiment Name: At_100uM_ABA_Mutants_cDNA_P Parameter: Treatment Value: 100uM ABA vs. No Treatment
  misc_feature: MA Experiment ID: 20000087 Result: Up-regulated in Transcription
  misc_feature: MA Experiment 20000087 PARAMETER Experiment Name: At_100uM_ABA_Mutants_cDNA_P Parameter: Plant Line Value: WS
  misc_feature: MA Experiment 20000087 PARAMETER Experiment Name: At_100uM_ABA_Mutants_cDNA_P Parameter: Timepoint (hr) Value: 6
  misc_feature: MA Experiment 20000087 PARAMETER Experiment Name: At_100uM_ABA_Mutants_cDNA_P Parameter: Tissue Value: Aerial
  misc_feature: MA Experiment 20000087 PARAMETER Experiment Name: At_100uM_ABA_Mutants_cDNA_P Parameter: Treatment Value: 100uM ABA vs. No Treatment
  misc_feature: MA Experiment ID: 20000088 Result: Up-regulated in Transcription
  misc_feature: MA Experiment 20000088 PARAMETER Experiment Name: At_100uM_ABA_Mutants_cDNA_P Parameter: Plant Line Value: Landsberg
  misc_feature: MA Experiment 20000088 PARAMETER Experiment Name: At_100uM_ABA_Mutants_cDNA_P Parameter: Timepoint (hr) Value: 6
  misc_feature: MA Experiment 20000088 PARAMETER Experiment Name: At_100uM_ABA_Mutants_cDNA_P Parameter: Tissue Value: Aerial
  misc_feature: MA Experiment 20000088 PARAMETER Experiment Name: At_100uM_ABA_Mutants_cDNA_P Parameter: Treatment Value: 100uM ABA vs. No Treatment
  misc_feature: MA Experiment ID: 20000117 Result: Up-regulated in Transcription
  misc_feature: MA Experiment 20000117 PARAMETER Experiment Name: At_100uM_ABA_Mutants_cDNA_P Parameter: Plant Line Value: Columbia
  misc_feature: MA Experiment 20000117 PARAMETER Experiment Name: At_100uM_ABA_Mutants_cDNA_P Parameter: Timepoint (hr) Value: 6
  misc_feature: MA Experiment 20000117 PARAMETER Experiment Name: At_100uM_ABA_Mutants_cDNA_P Parameter: Tissue Value: Aerial
  misc_feature: MA Experiment 20000117 PARAMETER Experiment Name: At_100uM_ABA_Mutants_cDNA_P Parameter: Treatment Value: 100uM ABA vs. No Treatment
  misc_feature: MA Experiment ID: 20000169 Result: Up-regulated in Transcription
  misc_feature: MA Experiment 20000169 PARAMETER Experiment Name: At_100uM_ABA_P Parameter: Age (day) Value: 14
  misc_feature: MA Experiment 20000169 PARAMETER Experiment Name: At_100uM_ABA_P Parameter: Organism Value: A. thaliana
  misc_feature: MA Experiment 20000169 PARAMETER Experiment Name: At_100uM_ABA_P Parameter: Plant Line Value: WS
  misc_feature: MA Experiment 20000169 PARAMETER Experiment Name: At_100uM_ABA_P Parameter: Timepoint (hr) Value: 6
  misc_feature: MA Experiment 20000169 PARAMETER Experiment Name: At_100uM_ABA_P Parameter: Tissue Value: Aerial
  misc_feature: MA Experiment 20000169 PARAMETER Experiment Name: At_100uM_ABA_P Parameter: Treatment Value: 100uM ABA vs. No Treatment
  misc_feature: MA Experiment ID: 20000180 Result: Up-regulated in Transcription
  misc_feature: MA Experiment 20000180 PARAMETER Experiment Name: At_Germinating_Seeds_P Parameter: Age (hr) Value: 24 vs. 0
  misc_feature: MA Experiment 20000180 PARAMETER Experiment Name: At_Germinating_Seeds_P Parameter: Tissue Value: Germinating Seeds
  misc_feature: MA Experiment ID: 20000184 Result: Up-regulated in Transcription
  misc_feature: MA Experiment 20000184 PARAMETER Experiment Name: At_Shoots__P Parameter: Age (day) Value: 7
  misc_feature: MA Experiment 20000184 PARAMETER Experiment Name: At_Shoots__P Parameter: Tissue Value: Shoots vs. Whole Plant
  misc_feature: MA Experiment ID: 20000185 Result: Up-regulated in Transcription
  misc_feature: MA Experiment 20000185 PARAMETER Experiment Name: At_Roots__P Parameter: Age (day) Value: 7 vs. 21
  misc_feature: MA Experiment 20000185 PARAMETER Experiment Name: At_Roots__P Parameter: Organism Value: A. thaliana
  misc_feature: MA Experiment 20000185 PARAMETER Experiment Name: At_Roots__P Parameter: Tissue Value: Roots vs. Whole Plant
  misc_feature: MA Experiment ID: 20000227 Result: Up-regulated in Transcription
  misc_feature: MA Experiment 20000227 PARAMETER Experiment Name: At_Root-Tips-vs-Tops_P Parameter: Tissue Value: Root Tips vs. Root Tops
  misc_feature: MA Experiment ID: 20000269 Result: Up-regulated in Transcription
  misc_feature: MA Experiment 20000269 PARAMETER Experiment Name: At_1mM_KNO3_L-vs-H_Roots_P Parameter: Age (day) Value: 7,10,12
  misc_feature: MA Experiment 20000269 PARAMETER Experiment Name: At_1mM_KNO3_L-vs-H_Roots_P Parameter: Organism Value: A. thaliana
  misc_feature: MA Experiment 20000269 PARAMETER Experiment Name: At_1mM_KNO3_L-vs-H_Roots_P Parameter: Plant Line Value: WS
  misc_feature: MA Experiment 20000269 PARAMETER Experiment Name: At_1mM_KNO3_L-vs-H_Roots_P Parameter: Timepoint (day) Value: 7,10,12
  misc_feature: MA Experiment 20000269 PARAMETER Experiment Name: At_1mM_KNO3_L-vs-H_Roots_P Parameter: Tissue Value: Roots
  misc_feature: MA Experiment 20000269 PARAMETER Experiment Name: At_1mM_KNO3_L-vs-H_Roots_P Parameter: Treatment Value: 1mM KNO3 vs. 50mM KNO3
  misc_feature: MA Experiment ID: 20000436 Result: Up-regulated in Transcription
  misc_feature: MA Experiment 20000436 PARAMETER Experiment Name: At_Drought_P Parameter: Age (day) Value: 7
  misc_feature: MA Experiment 20000436 PARAMETER Experiment Name: At_Drought_P Parameter: Organism Value: A. thaliana
  misc_feature: MA Experiment 20000436 PARAMETER Experiment Name: At_Drought_P Parameter: Plant Line Value: WS
  misc_feature: MA Experiment 20000436 PARAMETER Experiment Name: At_Drought_P Parameter: Timepoint (hr) Value: 12
  misc_feature: MA Experiment 20000436 PARAMETER Experiment Name: At_Drought_P Parameter: Tissue Value: Whole Plant
  misc_feature: MA Experiment 20000436 PARAMETER Experiment Name: At_Drought_P Parameter: Treatment Value: Drought vs. No Drought
  misc_feature: MA Experiment ID: 20001457 Result: Down-regulated in Transcription
  misc_feature: MA Experiment 20001457 PARAMETER Experiment Name: At_50mM_NH4NO3_L-to-H_P Parameter: Age (day) Value: Undefined
  misc_feature: MA Experiment 20001457 PARAMETER Experiment Name: At_50mM_NH4NO3_L-to-H_P Parameter: Organism Value: Undefined
  misc_feature: MA Experiment 20001457 PARAMETER Experiment Name: At_50mM_NH4NO3_L-to-H_P Parameter: Plant Line Value: Undefined
  misc_feature: MA Experiment 20001457 PARAMETER Experiment Name: At_50mM_NH4NO3_L-to-H_P Parameter: Timepoint (hr) Value: 0.5
  misc_feature: MA Experiment 20001457 PARAMETER Experiment Name: At_50mM_NH4NO3_L-to-H_P Parameter: Tissue Value: Siliques
  misc_feature: MA Experiment 20001457 PARAMETER Experiment Name: At_50mM_NH4NO3_L-to-H_P Parameter: Treatment Value: 50mM NH4NO3 vs. 100mM Manitol
  misc_feature: MA Experiment ID: 20001556 Result: Up-regulated in Transcription
  misc_feature: MA Experiment 20001556 PARAMETER Experiment Name: At_Drought_Soil_Dry_P Parameter: Age (day) Value: 26
  misc_feature: MA Experiment 20001556 PARAMETER Experiment Name: At_Drought_Soil_Dry_P Parameter: Organism Value: A. thaliana
  misc_feature: MA Experiment 20001556 PARAMETER Experiment Name: At_Drought_Soil_Dry_P Parameter: Plant Line Value: WS
  misc_feature: MA Experiment 20001556 PARAMETER Experiment Name: At_Drought_Soil_Dry_P Parameter: Post Timepoint (hr) Value: None
  misc_feature: MA Experiment 20001556 PARAMETER Experiment Name: At_Drought_Soil_Dry_P Parameter: Post-Treatment Value: None
  misc_feature: MA Experiment 20001556 PARAMETER Experiment Name: At_Drought_Soil_Dry_P Parameter: Timepoint (day) Value: 12
  misc_feature: MA Experiment 20001556 PARAMETER Experiment Name: At_Drought_Soil_Dry_P Parameter: Treatment Value: Drought vs. No Drought
  misc_feature: MA Experiment ID: 20001904 Result: Up-regulated in Transcription
  misc_feature: MA Experiment 20001904 PARAMETER Experiment Name: At_Drought_Reproduction_P Parameter: Age (day) Value: 37
  misc_feature: MA Experiment 20001904 PARAMETER Experiment Name: At_Drought_Reproduction_P Parameter: Organism Value: A. thaliana
  misc_feature: MA Experiment 20001904 PARAMETER Experiment Name: At_Drought_Reproduction_P Parameter: Plant Line Value: WS
  misc_feature: MA Experiment 20001904 PARAMETER Experiment Name: At_Drought_Reproduction_P Parameter: Timepoint (day) Value: 7
  misc_feature: MA Experiment 20001904 PARAMETER Experiment Name: At_Drought_Reproduction_P Parameter: Tissue Value: Rosettes
  misc_feature: MA Experiment 20001904 PARAMETER Experiment Name: At_Drought_Reproduction_P Parameter: Treatment Value: Drought vs. No Drought
atggctaaacgttttctgcttcttcttcctcttttgtcatctattcttcttcttgccgtgtccgtcacagcttactccacaacaacgccgtatcaaggctacaagccggagaaattcacccacctccacttctacttccatgacgtcatctccggtgacaaacctaccgccgtcaaagttgccgaagcccgcccaacaaccaccctcaacgtcaagtttggcgtgattatgatcgctgatgatccgttgaccgaaggaccagacccgagctcaaaggaagtgggaagagctcaggggatgtacgcatcaacagccatgaaggacatagtcttcacaatggtctttaactatgttttcacggcaggagagtttaatggaagcaccatcgcggtgtatggacggaatgatatattttcgaaggtgagagagttgccgattattggaggaactggtgctttcaggtttgctagaggctatgcactgcccaagacttataagattgttggtctagatgccgtggtcgagtataatgtcttcatttggcattaa

SEQ ID NO: 78433 - protein, 182 aa, Arabidopsis thaliana; identical to SEQ ID NO: 72834
  peptide (1)..(182): Ceres Seq. ID no. 12641306
  misc_feature (15)..(182): Pfam Name: Dirigent-like protein Pfam Description: Dirigent-like protein
  misc_feature (1)..(182): Homolog of NCBI NO: 15238982 NR Description: disease resistance response protein-related; id: At5g42510.1 [Arabidopsis thaliana] contains similarity to disease resistance response
  misc_feature (1)..(182): Homolog of NCBI NO: 15238980 NR Description: disease resistance response protein-related; id: At5g42500.1, supported by cDNA: gi_20260391 [Arabidopsis
  misc_feature (1)..(182): Homolog of NCBI NO: 15219966 NR Description: disease resistance response protein-related; id: At1g22900.1 [Arabidopsis thaliana] >gi|25347090|pir||A86363
  misc_feature (1)..(182): Homolog of NCBI NO: 15218836 NR Description: disease resistance response protein-related/
  misc_feature (11)..(182): Homolog of NCBI NO: 15217886 NR Description: disease resistance response protein-related/
  misc_feature (7)..(182): Homolog of NCBI NO: 30681257 NR Description: disease resistance response protein-related/
  misc_feature (7)..(177): Homolog of NCBI NO: 25412014 NR Description: probable disease resistance response protein - Arabidopsis thaliana >gi|4803933|gb|AAD29806.1| putative
  misc_feature (75)..(182): Homolog of NCBI NO: 26450265 NR Description: unknown protein [Arabidopsis thaliana]
  misc_feature (75)..(182): Homolog of NCBI NO: 15230941 NR Description: disease resistance response protein-related; id: At3g58090.1 [Arabidopsis thaliana] >gi|11357961|pir||T46031
  misc_feature (1)..(182): Homolog of NCBI NO: 15231302 NR Description: disease resistance response protein-related/

SEQ ID NO: 78434 - protein, 106 aa, Arabidopsis thaliana; identical to SEQ ID NO: 72835
  peptide (1)..(106): Ceres Seq. ID no. 12641307
  misc_feature (1)..(106): Pfam Name: Dirigent-like protein Pfam Description: Dirigent-like protein
  misc_feature (1)..(106): Homolog of NCBI NO: 15238982 NR Description: disease resistance response protein-related; id: At5g42510.1 [Arabidopsis thaliana] contains similarity to disease resistance response
  misc_feature (1)..(106): Homolog of NCBI NO: 15238980 NR Description: disease resistance response protein-related; id: At5g42500.1, supported by cDNA: gi_20260391 [Arabidopsis
  misc_feature (1)..(106): Homolog of NCBI NO: 15219966 NR Description: disease resistance response protein-related; id: At1g22900.1 [Arabidopsis thaliana] >gi|25347090|pir||A86363
  misc_feature (1)..(106): Homolog of NCBI NO: 15218836 NR Description: disease resistance response protein-related/
  misc_feature (1)..(106): Homolog of NCBI NO: 15217886 NR Description: disease resistance response protein-related/
  misc_feature (1)..(106): Homolog of NCBI NO: 30681257 NR Description: disease resistance response protein-related/
  misc_feature (1)..(101): Homolog of NCBI NO: 25412014 NR Description: probable disease resistance response protein - Arabidopsis thaliana >gi|4803933|gb|AAD29806.1| putative
  misc_feature (1)..(106): Homolog of NCBI NO: 26450265 NR Description: unknown protein [Arabidopsis thaliana]
  misc_feature (1)..(106): Homolog of NCBI NO: 15230941 NR Description: disease resistance response protein-related; id: At3g58090.1 [Arabidopsis thaliana] >gi|11357961|pir||T46031
  misc_feature (1)..(106): Homolog of NCBI NO: 15231302 NR Description: disease resistance response protein-related/

SEQ ID NO: 78435 - DNA, 1620 bp, Arabidopsis thaliana
  misc_feature (1)..(1620): Ceres Seq. ID no. 12641354
  misc_feature: MA Experiment ID: 20000185 Result: Up-regulated in Transcription
  misc_feature: MA Experiment 20000185 PARAMETER Experiment Name: At_Roots__P Parameter: Age (day) Value: 7 vs. 21
  misc_feature: MA Experiment 20000185 PARAMETER Experiment Name: At_Roots__P Parameter: Organism Value: A. thaliana
  misc_feature: MA Experiment 20000185 PARAMETER Experiment Name: At_Roots__P Parameter: Tissue Value: Roots vs. Whole Plant
  misc_feature: MA Experiment ID: 20000439 Result: Up-regulated in Transcription
  misc_feature: MA Experiment 20000439 PARAMETER Experiment Name: At_Roots__P Parameter: Age (day) Value: 14 vs. 21
  misc_feature: MA Experiment 20000439 PARAMETER Experiment Name: At_Roots__P Parameter: Organism Value: A. thaliana
  misc_feature: MA Experiment 20000439 PARAMETER Experiment Name: At_Roots__P Parameter: Tissue Value: Roots vs. Whole Plant
atgatgatgagtagcagcagtagcagtagtaatggtagtagtagttatacaagatgcgttaaaactccatcatctacaaatactaacattgggaagaaactgaaaggttgtgaaaatggtgttgtaaatcgaaaggcgttaaatcgagagaagataattactctgcaagaagatgttgaaaagttgagaaagaagctgagacttgaagaaaacattcaccgagcaatggaaagagcatttagtaggcctcttggagcacttccccgtcttcctccgtttctacctccatcggttttggagttacttgcggaagtggctgttttggaagaggaattggttcggttagaagaacatattgtgcattgtagacaagaattgtatcaagaagcagtttttacatcttcatcgatagagaatttaaaatgctctcctgcatttcctaagcattggcagaccaaatccaagtcagcttccactagtgctagagaatcagaatcacctctttcacgggcaccttgttctgtttcagtgtgtaggaagggtaaagaaaacaagttgagtgctacttctatcaaaacaccgatgaagaaaacgactattgctcatacacaactgaataagagtttagaagctcaaaaactaaaggatagtcatagatgtcgcaaaacaaatgcagagcggagctctcatggtggcggtgatgaaccaaataaaatttccgaggatttggttaaatgtctgtctaacattttcatgagaatgagctcaataaagagatccatggttacaaaatctcaagaaaacgataaagatacggcattcagggatccttatggaatttgctctagttttagaagaagggatattggtcgatataagaatttcagtgatgttgaagaagcctcacttaaccaaaacagaacgtcaagttcctctttgtttctcatccgccaactgaaacgattgcttggaagactttctttagtcaacatgcagaaacttaatcaacaagagaagttagctttctggataaacatttataacagctgcatgatgaatggtttccttgaacatggaataccggagagccctgatatggtgacattaatgcaaaaggcgactataaatgtaggaggccactttctcaatgcaatcacgatcgaacacttcatcctccgcttaccgcatcactcaaaatatatttctccaaagggttcaaagaaaaatgaaatggcagtgagaagtaaatttggattggaattgtcagagccacttgtaacatttgctctctcatgtggtagctggtcctcacccgcggtacgggtgtacactgcgagtaaagtagaggaggagttggaggtggcgaaaagagagtacctagaagcatcggtggggatatcggtggtgaaaatagggataccaaagctgatggattggtatagtcatgactttgcaaaggacattgaatcattgcttgattggattttccttcagttgcctactgagttgggtaaagatgctctcaactgtgttgaacaagggatgtctcagtccccttcttctactcttgtccatattatcccttatgacttcacttttagatatcttttttccatctga

SEQ ID NO: 78436 - protein, 539 aa, Arabidopsis thaliana
  peptide (1)..(539): Ceres Seq. ID no. 12641355
  misc_feature (320)..(460): Pfam Name: Protein of unknown function, DUF547 Pfam Description: Protein of unknown function, DUF547
  misc_feature (31)..(539): Homolog of NCBI NO: 15239037 NR Description: putative protein; protein id: At5g42690.1 thaliana] >gi|10177272|dbj|BAB10625.1|
  misc_feature (152)..(536): Homolog of NCBI NO: 25407787 NR Description: hypothetical protein AT4g37080 [imported] - thaliana >gi|4006868|emb|CAB16786.1| putative protein thaliana] >gi|7270657|emb|CAB80374.1| putative protein
  misc_feature (152)..(536): Homolog of NCBI NO: 30690854 NR Description: expressed protein [Arabidopsis thaliana] AT4g37080/C7A10_280 [Arabidopsis thaliana]
  misc_feature (255)..(539): Homolog of NCBI NO: 30697420 NR Description: expressed protein [Arabidopsis thaliana]
  misc_feature (5)..(271): Homolog of NCBI NO: 30697420 NR Description: expressed protein [Arabidopsis thaliana]
  misc_feature (255)..(539): Homolog of NCBI NO: 15983811 NR Description: AT5g60720/mup24_130 [Arabidopsis thaliana]
  misc_feature (39)..(271): Homolog of NCBI NO: 15983811 NR Description: AT5g60720/mup24_130 [Arabidopsis thaliana]
  misc_feature (276)..(539): Homolog of NCBI NO: 15225527 NR Description: hypothetical protein; protein id: At2g39690.1
  misc_feature (4)..(538): Homolog of NCBI NO: 30695170 NR Description: expressed protein [Arabidopsis thaliana]
  misc_feature (181)..(539): Homolog of NCBI NO: 9294368 NR Description: gb|AAB97123.1~gene_id:T16H11.2~similar to unknown
MMMSSSSSSSNGSSSYTRCVKTPSSTNTNIGKKLKGCENGVVNRKALNREKIITLQEDVEKLRKKLRLEENIHRAMERAFSRPLGALPRLPPFLPPSVLELLAEVAVLEEELVRLEEHIVHCRQELYQEAVFTSSSIENLKCSPAFPKHWQTKSKSASTSARESESPLSRAPCSVSVCRKGKENKLSATSIKTPMKKTTIAHTQLNKSLEAQKLKDSHRCRKTNAERSSHGGGDEPNKISEDLVKCLSNIFMRMSSIKRSMVTKSQENDKDTAFRDPYGICSSFRRRDIGRYKNFSDVEEASLNQNRTSSSSLFLIRQLKRLLGRLSLVNMQKLNQQEKLAFWINIYNSCMMNGFLEHGIPESPDMVTLMQKATINVGGHFLNAITIEHFILRLPHHSKYISPKGSKKNEMAVRSKFGLELSEPLVTFALSCGSWSSPAVRVYTASKVEEELEVAKREYLEASVGISVVKIGIPKLMDWYSHDFAKDIESLLDWIFLQLPTELGKDALNCVEQGMSQSPSSTLVHIIPYDFTFRYLFSI

SEQ ID NO: 78437 - protein, 538 aa, Arabidopsis thaliana
  peptide (1)..(538): Ceres Seq. ID no. 12641356
  misc_feature (319)..(459): Pfam Name: Protein of unknown function, DUF547 Pfam Description: Protein of unknown function, DUF547
  misc_feature (30)..(538): Homolog of NCBI NO: 15239037 NR Description: putative protein; protein id: At5g42690.1 thaliana] >gi|10177272|dbj|BAB10625.1|
  misc_feature (151)..(535): Homolog of NCBI NO: 25407787 NR Description: hypothetical protein AT4g37080 [imported] - thaliana >gi|4006868|emb|CAB16786.1| putative protein thaliana] >gi|7270657|emb|CAB80374.1| putative protein
  misc_feature (151)..(535): Homolog of NCBI NO: 30690854 NR Description: expressed protein [Arabidopsis thaliana] AT4g37080/C7A10_280 [Arabidopsis thaliana]
  misc_feature (254)..(538): Homolog of NCBI NO: 30697420 NR Description: expressed protein [Arabidopsis thaliana]
  misc_feature (4)..(270): Homolog of NCBI NO: 30697420 NR Description: expressed protein [Arabidopsis thaliana]
  misc_feature (254)..(538): Homolog of NCBI NO: 15983811 NR Description: AT5g60720/mup24_130 [Arabidopsis thaliana]
  misc_feature (38)..(270): Homolog of NCBI NO: 15983811 NR Description: AT5g60720/mup24_130 [Arabidopsis thaliana]
  misc_feature (275)..(538): Homolog of NCBI NO: 15225527 NR Description: hypothetical protein; protein id: At2g39690.1
  misc_feature (3)..(537): Homolog of NCBI NO: 30695170 NR Description: expressed protein [Arabidopsis thaliana]
  misc_feature (180)..(538): Homolog of NCBI NO: 9294368 NR Description: gb|AAB97123.1~gene_id:T16H11.2~similar to unknown
MMSSSSSSSNGSSSYTRCVKTPSSTNTNIGKKLKGCENGVVNRKALNREKIITLQEDVEKLRKKLRLEENIHRAMERAFSRPLGALPRLPPFLPPSVLELLAEVAVLEEELVRLEEHIVHCRQELYQEAVFTSSSIENLKCSPAFPKHWQTKSKSASTSARESESPLSRAPCSVSVCRKGKENKLSATSIKTPMKKTTIAHTQLNKSLEAQKLKDSHRCRKTNAERSSHGGGDEPNKISEDLVKCLSNIFMRMSSIKRSMVTKSQENDKDTAFRDPYGICSSFRRRDIGRYKNFSDVEEASLNQNRTSSSSLFLIRQLKRLLGRLSLVNMQKLNQQEKLAFWINIYNSCMMNGFLEHGIPESPDMVTLMQKATINVGGHFLNAITIEHFILRLPHHSKYISPKGSKKNEMAVRSKFGLELSEPLVTFALSCGSWSSPAVRVYTASKVEEELEVAKREYLEASVGISVVKIGIPKLMDWYSHDFAKDIESLLDWIFLQLPTELGKDALNCVEQGMSQSPSSTLVHIIPYDFTFRYLFSI

SEQ ID NO: 78438 - protein, 537 aa, Arabidopsis thaliana
  peptide (1)..(537): Ceres Seq. ID no. 12641357
  misc_feature (318)..(458): Pfam Name: Protein of unknown function, DUF547 Pfam Description: Protein of unknown function, DUF547
  misc_feature (29)..(537): Homolog of NCBI NO: 15239037 NR Description: putative protein; protein id: At5g42690.1 thaliana] >gi|10177272|dbj|BAB10625.1|
  misc_feature (150)..(534): Homolog of NCBI NO: 25407787 NR Description: hypothetical protein AT4g37080 [imported] - thaliana >gi|4006868|emb|CAB16786.1| putative protein thaliana] >gi|7270657|emb|CAB80374.1| putative protein
  misc_feature (150)..(534): Homolog of NCBI NO: 30690854 NR Description: expressed protein [Arabidopsis thaliana] AT4g37080/C7A10_280 [Arabidopsis thaliana]
  misc_feature (253)..(537): Homolog of NCBI NO: 30697420 NR Description: expressed protein [Arabidopsis thaliana]
  misc_feature (3)..(269): Homolog of NCBI NO: 30697420 NR Description: expressed protein [Arabidopsis thaliana]
  misc_feature (253)..(537): Homolog of NCBI NO: 15983811 NR Description: AT5g60720/mup24_130 [Arabidopsis thaliana]
  misc_feature (37)..(269): Homolog of NCBI NO: 15983811 NR Description: AT5g60720/mup24_130 [Arabidopsis thaliana]
  misc_feature (274)..(537): Homolog of NCBI NO: 15225527 NR Description: hypothetical protein; protein id: At2g39690.1
  misc_feature (2)..(536): Homolog of NCBI NO: 30695170 NR Description: expressed protein [Arabidopsis thaliana]
  misc_feature (179)..(537): Homolog of NCBI NO: 9294368 NR Description: gb|AAB97123.1~gene_id:T16H11.2~similar to unknown
MSSSSSSSNGSSSYTRCVKTPSSTNTNIGKKLKGCENGVVNRKALNREKIITLQEDVEKLRKKLRLEENIHRAMERAFSRPLGALPRLPPFLPPSVLELLAEVAVLEEELVRLEEHIVHCRQELYQEAVFTSSSIENLKCSPAFPKHWQTKSKSASTSARESESPLSRAPCSVSVCRKGKENKLSATSIKTPMKKTTIAHTQLNKSLEAQKLKDSHRCRKTNAERSSHGGGDEPNKISEDLVKCLSNIFMRMSSIKRSMVTKSQENDKDTAFRDPYGICSSFRRRDIGRYKNFSDVEEASLNQNRTSSSSLFLIRQLKRLLGRLSLVNMQKLNQQEKLAFWINIYNSCMMNGFLEHGIPESPDMVTLMQKATINVGGHFLNAITIEHFILRLPHHSKYISPKGSKKNEMAVRSKFGLELSEPLVTFALSCGSWSSPAVRVYTASKVEEELEVAKREYLEASVGISVVKIGIPKLMDWYSHDFAKDIESLLDWIFLQLPTELGKDALNCVEQGMSQSPSSTLVHIIPYDFTFRYLFSI

SEQ ID NO: 78439 - DNA, 684 bp, Arabidopsis thaliana
  misc_feature (1)..(684): Ceres Seq. ID no. 12641358
  misc_feature: MA Experiment ID: 20000179 Result: Up-regulated in Transcription
  misc_feature: MA Experiment 20000179 PARAMETER Experiment Name: At_Germinating_Seeds_P Parameter: Age (hr) Value: 6 vs. 0
  misc_feature: MA Experiment 20000179 PARAMETER Experiment Name: At_Germinating_Seeds_P Parameter: Tissue Value: Germinating Seeds
  misc_feature: MA Experiment ID: 20000185 Result: Up-regulated in Transcription
  misc_feature: MA Experiment 20000185 PARAMETER Experiment Name: At_Roots__P Parameter: Age (day) Value: 7 vs. 21
  misc_feature: MA Experiment 20000185 PARAMETER Experiment Name: At_Roots__P Parameter: Organism Value: A. thaliana
  misc_feature: MA Experiment 20000185 PARAMETER Experiment Name: At_Roots__P Parameter: Tissue Value: Roots vs. Whole Plant
  misc_feature: MA Experiment ID: 20000436 Result: Down-regulated in Transcription
  misc_feature: MA Experiment 20000436 PARAMETER Experiment Name: At_Drought_P Parameter: Age (day) Value: 7
  misc_feature: MA Experiment 20000436 PARAMETER Experiment Name: At_Drought_P Parameter: Organism Value: A. thaliana
  misc_feature: MA Experiment 20000436 PARAMETER Experiment Name: At_Drought_P Parameter: Plant Line Value: WS
  misc_feature: MA Experiment 20000436 PARAMETER Experiment Name: At_Drought_P Parameter: Timepoint (hr) Value: 12
  misc_feature: MA Experiment 20000436 PARAMETER Experiment Name: At_Drought_P Parameter: Tissue Value: Whole Plant
  misc_feature: MA Experiment 20000436 PARAMETER Experiment Name: At_Drought_P Parameter: Treatment Value: Drought vs. No Drought
  misc_feature: MA Experiment ID: 20000437 Result: Down-regulated in Transcription
  misc_feature: MA Experiment 20000437 PARAMETER Experiment Name: At_Drought_P Parameter: Age (day) Value: 8
  misc_feature: MA Experiment 20000437 PARAMETER Experiment Name: At_Drought_P Parameter: Organism Value: A. thaliana
  misc_feature: MA Experiment 20000437 PARAMETER Experiment Name: At_Drought_P Parameter: Plant Line Value: WS
  misc_feature: MA Experiment 20000437 PARAMETER Experiment Name: At_Drought_P Parameter: Timepoint (hr) Value: 24
  misc_feature: MA Experiment 20000437 PARAMETER Experiment Name: At_Drought_P Parameter: Tissue Value: Whole Plant
  misc_feature: MA Experiment 20000437 PARAMETER Experiment Name: At_Drought_P Parameter: Treatment Value: Drought vs. No Drought
  misc_feature: MA Experiment ID: 20000573 Result: Up-regulated in Transcription
  misc_feature: MA Experiment 20000573 PARAMETER Experiment Name: At_100uM_ABA_Mutants__P Parameter: Organism Value: A. thaliana
  misc_feature: MA Experiment 20000573 PARAMETER Experiment Name: At_100uM_ABA_Mutants__P Parameter: Plant Line Value: CS22 vs. Ler wt
  misc_feature: MA Experiment 20000573 PARAMETER Experiment Name: At_100uM_ABA_Mutants__P Parameter: Timepoint (hr) Value: N/A
  misc_feature: MA Experiment 20000573 PARAMETER Experiment Name: At_100uM_ABA_Mutants__P Parameter: Tissue Value: Whole Plant
  misc_feature: MA Experiment 20000573 PARAMETER Experiment Name: At_100uM_ABA_Mutants__P Parameter: Treatment Value: None
  misc_feature: MA Experiment ID: 20000574 Result: Up-regulated in Transcription
  misc_feature: MA Experiment 20000574 PARAMETER Experiment Name: At_100uM_ABA_Mutants__P Parameter: Organism Value: A. thaliana
  misc_feature: MA Experiment 20000574 PARAMETER Experiment Name: At_100uM_ABA_Mutants__P Parameter: Plant Line Value: CS23 vs. Ler wt
  misc_feature: MA Experiment 20000574 PARAMETER Experiment Name: At_100uM_ABA_Mutants__P Parameter: Timepoint (hr) Value: N/A
  misc_feature: MA Experiment 20000574 PARAMETER Experiment Name: At_100uM_ABA_Mutants__P Parameter: Tissue Value: Whole Plant
  misc_feature: MA Experiment 20000574 PARAMETER Experiment Name: At_100uM_ABA_Mutants__P Parameter: Treatment Value: None
  misc_feature: MA Experiment ID: 20001450 Result: Down-regulated in Transcription
  misc_feature: MA Experiment 20001450 PARAMETER Experiment Name: At_Far-red-induction_P Parameter: Age (day) Value: 7
  misc_feature: MA Experiment 20001450 PARAMETER Experiment Name: At_Far-red-induction_P Parameter: Light Value: Far-red vs. White
  misc_feature: MA Experiment 20001450 PARAMETER Experiment Name: At_Far-red-induction_P Parameter: Organism Value: A. thaliana
  misc_feature: MA Experiment 20001450 PARAMETER Experiment Name: At_Far-red-induction_P Parameter: Plant Line Value: Columbia
  misc_feature: MA Experiment 20001450 PARAMETER Experiment Name: At_Far-red-induction_P Parameter: Timepoint (hr) Value: 8
  misc_feature: MA Experiment 20001450 PARAMETER Experiment Name: At_Far-red-induction_P Parameter: Tissue Value: Whole Plant
atggtggtcgaaaaacaaacaaagtacgaagaatttcgtttgaaaagagtggaagagaacaagaaacgaatggaagctctgaatcttccaaaactctctcaaattctcaattccacttccgtcaagatttctccgatgaagaagagatctattcctcgaacaccagagaagaagatggtgattgttcgtagatctagccgtatctctaattcttcttctgttccggttgatgttaaacgagtgcacatacagagaaggggagtgggcaagaagagagatttattgaatcgagtttatgtttctgaagaaatcagagatgaggccatttcaagagctaacaaatttcaggatgaattggggagtggttatccaagttttgtgaaatctatgcttcaatcacatgtttctggtggcttctggctgggtcttccagtgcaattttgcaaatctcacctcgggttacatgatggtgtcataactttgatagatgaagaaggcgaggagtatgagactatctacttagcgagaaagaatggacttagtggtggatggatgggatttgcggttgctcacaatctagcatatggggatactcttgttttcgagttagttcgtcgtaccgctttcaaggtttacattacaagagttggaagttgtggagaaagctccaaagatatgagctga

SEQ ID NO: 78440 - protein, 227 aa, Arabidopsis thaliana
  peptide (1)..(227): Ceres Seq. ID no. 12641359
  misc_feature (125)..(216): Pfam Name: B3 DNA binding domain Pfam Description: B3 DNA binding domain
  misc_feature (1)..(227): Homolog of NCBI NO: 30694114 NR Description: expressed protein [Arabidopsis thaliana]
  misc_feature (1)..(141): Homolog of NCBI NO: 10177273 NR Description: gene_id:MJB21.7~unknown protein [Arabidopsis
  misc_feature (2)..(225): Homolog of NCBI NO: 9294620 NR Description: gene_id:MVI11.9~unknown protein [Arabidopsis
  misc_feature (1)..(215): Homolog of NCBI NO: 15217278 NR Description: Unknown protein [Oryza sativa]
  misc_feature (9)..(213): Homolog of NCBI NO: 15237157 NR Description: unknown protein; protein id: At5g58280.1 thaliana] >gi|10176791|dbj|BAA96919.2| gene_id:MCK7.15~unknown
  misc_feature (108)..(204): Homolog of NCBI NO: 34904376 NR Description: unnamed protein product [Oryza sativa (japonica group)] >gi|8467994|dbj|BAA96595.1| unnamed protein product
MVVEKQTKYEEFRLKRVEENKKRMEALNLPKLSQILNSTSVKISPMKKRSIPRTPEKKMVIVRRSSRISNSSSVPVDVKRVHIQRRGVGKKRDLLNRVYVSEEIRDEAISRANKFQDELGSGYPSFVKSMLQSHVSGGFWLGLPVQFCKSHLGLHDGVITLIDEEGEEYETIYLARKNGLSGGWMGFAVAHNLAYGDTLVFELVRRTAFKVYITRVGSCGESSKDMS

SEQ ID NO: 78441 - protein, 204 aa, Arabidopsis thaliana
  peptide (1)..(204): Ceres Seq. ID no. 12641360
  misc_feature (102)..(193): Pfam Name: B3 DNA binding domain Pfam Description: B3 DNA binding domain
  misc_feature (1)..(204): Homolog of NCBI NO: 30694114 NR Description: expressed protein [Arabidopsis thaliana]
  misc_feature (1)..(118): Homolog of NCBI NO: 10177273 NR Description: gene_id:MJB21.7~unknown protein [Arabidopsis
  misc_feature (1)..(202): Homolog of NCBI NO: 9294620 NR Description: gene_id:MVI11.9~unknown protein [Arabidopsis
  misc_feature (1)..(192): Homolog of NCBI NO: 15217278 NR Description: Unknown protein [Oryza sativa]
  misc_feature (1)..(190): Homolog of NCBI NO: 15237157 NR Description: unknown protein; protein id: At5g58280.1 thaliana] >gi|10176791|dbj|BAA96919.2| gene_id:MCK7.15~unknown
  misc_feature (85)..(181): Homolog of NCBI NO: 34904376 NR Description: unnamed protein product [Oryza sativa (japonica group)] >gi|8467994|dbj|BAA96595.1| unnamed protein product
MEALNLPKLSQILNSTSVKISPMKKRSIPRTPEKKMVIVRRSSRISNSSSVPVDVKRVHIQRRGVGKKRDLLNRVYVSEEIRDEAISRANKFQDELGSGYPSFVKSMLQSHVSGGFWLGLPVQFCKSHLGLHDGVITLIDEEGEEYETIYLARKNGLSGGWMGFAVAHNLAYGDTLVFELVRRTAFKVYITRVGSCGESSKDMS

SEQ ID NO: 78442 - protein, 182 aa, Arabidopsis thaliana
  peptide (1)..(182): Ceres Seq. ID no. 12641361
  misc_feature (80)..(171): Pfam Name: B3 DNA binding domain Pfam Description: B3 DNA binding domain
  misc_feature (1)..(182): Homolog of NCBI NO: 30694114 NR Description: expressed protein [Arabidopsis thaliana]
  misc_feature (1)..(96): Homolog of NCBI NO: 10177273 NR Description: gene_id:MJB21.7~unknown protein [Arabidopsis
  misc_feature (1)..(180): Homolog of NCBI NO: 9294620 NR Description: gene_id:MVI11.9~unknown protein [Arabidopsis
  misc_feature (1)..(170): Homolog of NCBI NO: 15217278 NR Description: Unknown protein [Oryza sativa]
  misc_feature (1)..(168): Homolog of NCBI NO: 15237157 NR Description: unknown protein; protein id: At5g58280.1 thaliana] >gi|10176791|dbj|BAA96919.2| gene_id:MCK7.15~unknown
  misc_feature (63)..(159): Homolog of NCBI NO: 34904376 NR Description: unnamed protein product [Oryza sativa (japonica group)] >gi|8467994|dbj|BAA96595.1| unnamed protein product
MKKRSIPRTPEKKMVIVRRSSRISNSSSVPVDVKRVHIQRRGVGKKRDLLNRVYVSEEIRDEAISRANKFQDELGSGYPSFVKSMLQSHVSGGFWLGLPVQFCKSHLGLHDGVITLIDEEGEEYETIYLARKNGLSGGWMGFAVAHNLAYGDTLVFELVRRTAFKVYITRVGSCGESSKDMS

SEQ ID NO: 78443 - DNA, 2622 bp, Arabidopsis thaliana
  misc_feature (1)..(2622): Ceres Seq. ID no. 12641430
  misc_feature: MA Experiment ID: 20000314 Result: Down-regulated in Transcription
  misc_feature: MA Experiment 20000314 PARAMETER Experiment Name: At_14day_Shoots-Roots_Sub_P Parameter: Age (day) Value: 14
  misc_feature: MA Experiment 20000314 PARAMETER Experiment Name: At_14day_Shoots-Roots_Sub_P Parameter: Organism Value: A. thaliana
  misc_feature: MA Experiment 20000314 PARAMETER Experiment Name: At_14day_Shoots-Roots_Sub_P Parameter: Plant Line Value: WS
  misc_feature: MA Experiment 20000314 PARAMETER Experiment Name: At_14day_Shoots-Roots_Sub_P Parameter: Tissue Value: Roots vs. Whole Plant
  misc_feature: MA Experiment ID: 20000315 Result: Down-regulated in Transcription
  misc_feature: MA Experiment 20000315 PARAMETER Experiment Name: At_14day_Shoots-Roots_Sub_P Parameter: Age (day) Value: 14
  misc_feature: MA Experiment 20000315 PARAMETER Experiment Name: At_14day_Shoots-Roots_Sub_P Parameter: Organism Value: A. thaliana
  misc_feature: MA Experiment 20000315 PARAMETER Experiment Name: At_14day_Shoots-Roots_Sub_P Parameter: Plant Line Value: WS
  misc_feature: MA Experiment 20000315 PARAMETER Experiment Name: At_14day_Shoots-Roots_Sub_P Parameter: Tissue Value: Shoots vs. Whole Plant
  misc_feature: MA Experiment ID: 20000327 Result: Down-regulated in Transcription
  misc_feature: MA Experiment 20000327 PARAMETER Experiment Name: At_42deg_Heat_Sub_P Parameter: Age (day) Value: 14
  misc_feature: MA Experiment 20000327 PARAMETER Experiment Name: At_42deg_Heat_Sub_P Parameter: Organism Value: A. thaliana
  misc_feature: MA Experiment 20000327 PARAMETER Experiment Name: At_42deg_Heat_Sub_P Parameter: Plant Line Value: WS
  misc_feature: MA Experiment 20000327 PARAMETER Experiment Name: At_42deg_Heat_Sub_P Parameter: Temperature (deg C) Value: 42 vs. 22
  misc_feature: MA Experiment 20000327 PARAMETER Experiment Name: At_42deg_Heat_Sub_P Parameter: Timepoint (hr) Value: 1
  misc_feature: MA Experiment 20000327 PARAMETER Experiment Name: At_42deg_Heat_Sub_P Parameter: Tissue Value: Aerial
  misc_feature: MA Experiment ID: 20000328 Result: Down-regulated in Transcription
  misc_feature: MA Experiment 20000328 PARAMETER Experiment Name: At_42deg_Heat_Sub_P Parameter: Age (day) Value: 14
  misc_feature: MA Experiment 20000328 PARAMETER Experiment Name: At_42deg_Heat_Sub_P Parameter: Organism Value: A. thaliana
  misc_feature: MA Experiment 20000328 PARAMETER Experiment Name: At_42deg_Heat_Sub_P Parameter: Plant Line Value: WS
  misc_feature: MA Experiment 20000328 PARAMETER Experiment Name: At_42deg_Heat_Sub_P Parameter: Temperature (deg C) Value: 42 vs. 22
  misc_feature: MA Experiment 20000328 PARAMETER Experiment Name: At_42deg_Heat_Sub_P Parameter: Timepoint (hr) Value: 6
  misc_feature: MA Experiment 20000328 PARAMETER Experiment Name: At_42deg_Heat_Sub_P Parameter: Tissue Value: Aerial
  misc_feature: MA Experiment ID: 20000347 Result: Up-regulated in Transcription
  misc_feature: MA Experiment 20000347 PARAMETER Experiment Name: At_2mM_SA_Sub_P Parameter: Age (day) Value: 14
  misc_feature: MA Experiment 20000347 PARAMETER Experiment Name: At_2mM_SA_Sub_P Parameter: Organism Value: A. thaliana
  misc_feature: MA Experiment 20000347 PARAMETER Experiment Name: At_2mM_SA_Sub_P Parameter: Plant Line Value: WS
  misc_feature: MA Experiment 20000347 PARAMETER Experiment Name: At_2mM_SA_Sub_P Parameter: Timepoint (hr) Value: 6
  misc_feature: MA Experiment 20000347 PARAMETER Experiment Name: At_2mM_SA_Sub_P Parameter: Tissue Value: Aerial
  misc_feature: MA Experiment 20000347 PARAMETER Experiment Name: At_2mM_SA_Sub_P Parameter: Treatment Value: 2mM SA vs. No Treatment
  misc_feature: MA Experiment ID: 20000355 Result: Down-regulated in Transcription
  misc_feature: MA Experiment 20000355 PARAMETER Experiment Name: At_Siliques_Sub_P Parameter: Age (day) Value: 21
  misc_feature: MA Experiment 20000355 PARAMETER Experiment Name: At_Siliques_Sub_P Parameter: Organism Value: A. thaliana
  misc_feature: MA Experiment 20000355 PARAMETER Experiment Name: At_Siliques_Sub_P Parameter: Plant Line Value: WS
  misc_feature: MA Experiment 20000355 PARAMETER Experiment Name: At_Siliques_Sub_P Parameter: Tissue Value: Less Than 5mm Siliques vs. Whole Plant
  misc_feature: MA Experiment ID: 20000440 Result: Down-regulated in Transcription
  misc_feature: MA Experiment 20000440 PARAMETER Experiment Name: At_Closed-Flower__Sub_P Parameter: Tissue Value: Closed Flower vs. Whole Plant
atgatccgtcacgctttgttaatattctctattctcgtttccacccccatagtaggagaaggagcaacgtcgacgtatgaacccaccgatgtctttctcttcaactgcggcgacacttcaaacaacgtcgacgttagtggccgaaactggacggcggaaaatcagaaaattctatcgtcaaatttagtcaacgcttcgttcactgcacaagcgtcataccaagaatcaggagtttctcagattccgtacatgacagctcgaatattccgatctgagttcacctacagttttccagtcactcccggttcaaattttctccggttatacttttacccgacccgatacggttcccaattcaacgccgtcaaatccttcttctccgtcaaagtcaacggcttcactctcttgaacaacttcagcgctgacttaacggtaaaagcatctaaaccgcaaacggagtttataatcaaagagtttattattccggtttaccaaacgttgaatctcactttcacgccgtctttagattccttagctttcgttaacggaatcgagattgtctccatacctaaccggttttactcaaagggaggatttgacgacgttataactaacgttggtagttccgttgactttcacatagaaaattcaacggcttttgagacagtttaccggttaaacgtagggggaaaaacggttggagattcgggaatgttccgacgatgggtctctgatgatgagatcatactcagtgaaagttcaggaatctctccgatcgtaccagatataaagattaactacacggagaaaactccgtcgtacgttgcgccggatgacgtgtacgccacgtctcgctcaatgggaaacgcggatcaccctgagcaaaacctaaattttaacctgacttggttattcaccgttgatgctgggtttagctaccttgtgaggcttcatttctgtgagactttgtcagaagtgaacaaagagggtcaacgcgtcttctctatctttattgaaaatcaaacggctacgcttgagatggacgtgtttcggatgagtggtggttcttggattccgatgtatctggattatactgtgattgcgggttcgggaagtggtcggagacatgatctaaggcttgatttgcatcctttggtgagcattaatccgaaatattatgatgctattctgaatggtgtggagattctcaagatgaatgatcccgatggtaatcttgcaggacctaatccagatcctctagtatcaccagacttaataccaaaccgtgcaacgccgcggattcgaaaaaataagtcacatattttgccgatcacacttgcagtggttggttctttagttgtgctagcaatgtttgttgttggtgttcttgttatcatgaagaagaagaagaagagcaagccatctacaaactcgtcatggtgtcctcttccgcacgggacagattctacgaatacaaaaccagcgaaatctctgcccgcggatctctgtcgtcgattctccattttcgaaatcaaatccgccacaaatgatttcgaggacaagctaatcatcggagtaggcgggtttggttctgtctacaaaggacaaatagacggtggagccacacttgttgcggttaaacggctggaaattacatcgaaccaaggtgctaaagagttcgaaacagagctcgagatgctctcaaagcttcgacatgtacatctcgtctctctaatcggctactgcgacgaggacaacgagatggtactagtctatgagtatatgccacatggtacacttaaagatcatcttttcaggagggacaaaacctctgatcctccattgtcatggaaacgaaggctagagatttgcattggagcagctcgtggattacagtatcttcatactggagccaagtacacgatcatacatagagacatcaaaaccacaaacatacttctcgatgagaacttcgtcactaaagtatctgactttggtttatcaagagttggtcctactagtgcttctcaaacgcatgtctccaccgtcgttaaaggaacgtttggttacttggaccccgagtactatcgccgtcaagtcttgaccgaaaaatctgacgtgtactcctttggagttgttctgttggaggttttgtgttgtagaccgattagaatgcaaagtgttccaccggaacaagcagatttgatccgatgggtgaagtcaaattacagaagaggaaccgttgatcagatcattgactcagatttatcggctgatatcacttcgacatcgttggaaaagttttgtgagatagccgttagatgcgttcaggaccgtggtatggaacggccaccgatgaacgacgttgtttgggcgcttgagtttgctcttcagcttcacgagactgctaagaagaagaatgacaacgtggagtctctggatctaatgccaagtggtgaggttggtacgaccacggacggagaagatgacttgtttagtaggactacaggacacgtggggaaatcgaccacgaccgatgactctgttctagttgttggtgatgagaggagtggttcgagttggggagtattttcggagatcaatgaacctaaagcacggtag

SEQ ID NO: 78444 - protein, 873 aa, Arabidopsis thaliana
  peptide (1)..(873): Ceres Seq. ID no. 12641431
  misc_feature (3)..(873): Homolog of NCBI NO: 15230520 NR Description: receptor-protein kinase-like protein; protein id:
  misc_feature (3)..(873): Homolog of NCBI NO: 14334760 NR Description: putative receptor-protein kinase [Arabidopsis
  misc_feature (4)..(479): Homolog of NCBI NO: 15241610 NR Description: receptor protein kinase - like protein; protein At5g39020.1 [Arabidopsis thaliana] >gi|10177547|dbj|BAB10826.1|
  misc_feature (502)..(829): Homolog of NCBI NO: 15241610 NR Description: receptor protein kinase - like protein; protein At5g39020.1 [Arabidopsis thaliana] >gi|10177547|dbj|BAB10826.1|
  misc_feature (1)..(540): Homolog of NCBI NO: 15241612 NR Description: receptor protein kinase - like protein; protein At5g39030.1 [Arabidopsis thaliana] >gi|10177548|dbj|BAB10827.1|
  misc_feature (502)..(831): Homolog of NCBI NO: 15241612 NR Description: receptor protein kinase - like protein; protein At5g39030.1 [Arabidopsis thaliana] >gi|10177548|dbj|BAB10827.1|
  misc_feature (35)..(831): Homolog of NCBI NO: 15229329 NR Description: putative protein kinase; protein id: At3g04690.1 thaliana] >gi|6175184|gb|AAF04910.1|AC011437_25 putative protein
  misc_feature (6)..(873): Homolog of NCBI NO: 15241880 NR Description: receptor-like protein kinase precursor - like;
  misc_feature (10)..(873): Homolog of NCBI NO: 34902826 NR Description: unnamed protein product [Oryza sativa (japonica group)] >gi|6498463|dbj|BAA87852.1| unnamed protein product
  misc_feature (11)..(801): Homolog of NCBI NO: 34393641 NR Description: putative PTH-2, resistance gene (PTO kinase)
MIRHALLIFSILVSTPIVGEGATSTYEPTDVFLFNCGDTSNNVDVSGRNWTAENQKILSSNLVNASFTAQASYQESGVSQIPYMTARIFRSEFTYSFPVTPGSNFLRLYFYPTRYGSQFNAVKSFFSVKVNGFTLLNNFSADLTVKASKPQTEFIIKEFIIPVYQTLNLTFTPSLDSLAFVNGIEIVSIPNRFYSKGGFDDVITNVGSSVDFHIENSTAFETVYRLNVGGKTVGDSGMFRRWVSDDEIILSESSGISPIVPDIKINYTEKTPSYVAPDDVYATSRSMGNADHPEQNLNFNLTWLFTVDAGFSYLVRLHFCETLSEVNKEGQRVFSIFIENQTATLEMDVFRMSGGSWIPMYLDYTVIAGSGSGRRHDLRLDLHPLVSINPKYYDAILNGVEILKMNDPDGNLAGPNPDPLVSPDLIPNRATPRIRKNKSHILPITLAVVGSLVVLAMFVVGVLVIMKKKKKSKPSTNSSWCPLPHGTDSTNTKPAKSLPADLCRRFSIFEIKSATNDFEDKLIIGVGGFGSVYKGQIDGGATLVAVKRLEITSNQGAKEFETELEMLSKLRHVHLVSLIGYCDEDNEMVLVYEYMPHGTLKDHLFRRDKTSDPPLSWKRRLEICIGAARGLQYLHTGAKYTIIHRDIKTTNILLDENFVTKVSDFGLSRVGPTSASQTHVSTVVKGTFGYLDPEYYRRQVLTEKSDVYSFGVVLLEVLCCRPIRMQSVPPEQADLIRWVKSNYRRGTVDQIIDSDLSADITSTSLEKFCEIAVRCVQDRGMERPPMNDVVWALEFALQLHETAKKKNDNVESLDLMPSGEVGTTTDGEDDLFSRTTGHVGKSTTTDDSVLVVGDERSGSSWGVFSEINEPKAR

SEQ ID NO: 78445 - protein, 790 aa, Arabidopsis thaliana
  peptide (1)..(790): Ceres Seq. ID no. 12641432
  misc_feature (1)..(790): Homolog of NCBI NO: 15230520 NR Description: receptor-protein kinase-like protein; protein id:
  misc_feature (1)..(790): Homolog of NCBI NO: 14334760 NR Description: putative receptor-protein kinase [Arabidopsis
  misc_feature (1)..(396): Homolog of NCBI NO: 15241610 NR Description: receptor protein kinase - like protein; protein At5g39020.1 [Arabidopsis thaliana] >gi|10177547|dbj|BAB10826.1|
  misc_feature (419)..(746): Homolog of NCBI NO: 15241610 NR Description: receptor protein kinase - like protein; protein At5g39020.1 [Arabidopsis thaliana] >gi|10177547|dbj|BAB10826.1|
  misc_feature (1)..(457): Homolog of NCBI NO: 15241612 NR Description: receptor protein kinase - like protein; protein At5g39030.1 [Arabidopsis thaliana] >gi|10177548|dbj|BAB10827.1|
  misc_feature (419)..(748): Homolog of NCBI NO: 15241612 NR Description: receptor protein kinase - like protein; protein At5g39030.1 [Arabidopsis thaliana] >gi|10177548|dbj|BAB10827.1|
  misc_feature (1)..(748): Homolog of NCBI NO: 15229329 NR Description: putative protein kinase; protein id: At3g04690.1 thaliana] >gi|6175184|gb|AAF04910.1|AC011437_25 putative protein
  misc_feature (1)..(790): Homolog of NCBI NO: 15241880 NR Description: receptor-like protein kinase precursor - like;
  misc_feature (1)..(790): Homolog of NCBI NO: 34902826 NR Description: unnamed protein product [Oryza sativa (japonica group)] >gi|6498463|dbj|BAA87852.1| unnamed protein product
  misc_feature (1)..(718): Homolog of NCBI NO: 34393641 NR Description: putative PTH-2, resistance gene (PTO kinase)
MTARIFRSEFTYSFPVTPGSNFLRLYFYPTRYGSQFNAVKSFFSVKVNGFTLLNNFSADLTVKASKPQTEFIIKEFIIPVYQTLNLTFTPSLDSLAFVNGIEIVSIPNRFYSKGGFDDVITNVGSSVDFHIENSTAFETVYRLNVGGKTVGDSGMFRRWVSDDEIILSESSGISPIVPDIKINYTEKTPSYVAPDDVYATSRSMGNADHPEQNLNFNLTWLFTVDAGFSYLVRLHFCETLSEVNKEGQRVFSIFIENQTATLEMDVFRMSGGSWIPMYLDYTVIAGSGSGRRHDLRLDLHPLVSINPKYYDAILNGVEILKMNDPDGNLAGPNPDPLVSPDLIPNRATPRIRKNKSHILPITLAVVGSLVVLAMFVVGVLVIMKKKKKSKPSTNSSWCPLPHGTDSTNTKPAKSLPADLCRRFSIFEIKSATNDFEDKLIIGVGGFGSVYKGQIDGGATLVAVKRLEITSNQGAKEFETELEMLSKLRHVHLVSLIGYCDEDNEMVLVYEYMPHGTLKDHLFRRDKTSDPPLSWKRRLEICIGAARGLQYLHTGAKYTIIHRDIKTTNILLDENFVTKVSDFGLSRVGPTSASQTHVSTVVKGTFGYLDPEYYRRQVLTEKSDVYSFGVVLLEVLCCRPIRMQSVPPEQADLIRWVKSNYRRGTVDQIIDSDLSADITSTSLEKFCEIAVRCVQDRGMERPPMNDVVWALEFALQLHETAKKKNDNVESLDLMPSGEVGTTTDGEDDLFSRTTGHVGKSTTTDDSVLVVGDERSGSSWGVFSEINEPKAR

SEQ ID NO: 78446 - protein, 636 aa, Arabidopsis thaliana
  peptide (1)..(636): Ceres Seq. ID no. 12641433
  misc_feature (1)..(636): Homolog of NCBI NO: 15230520 NR Description: receptor-protein kinase-like protein; protein id:
  misc_feature (1)..(636): Homolog of NCBI NO: 14334760 NR Description: putative receptor-protein kinase [Arabidopsis
  misc_feature (1)..(242): Homolog of NCBI NO: 15241610 NR Description: receptor protein kinase - like protein; protein At5g39020.1 [Arabidopsis thaliana] >gi|10177547|dbj|BAB10826.1|
  misc_feature (265)..(592): Homolog of NCBI NO: 15241610 NR Description: receptor protein kinase - like protein; protein At5g39020.1 [Arabidopsis thaliana] >gi|10177547|dbj|BAB10826.1|
  misc_feature (1)..(303): Homolog of NCBI NO: 15241612 NR Description: receptor protein kinase - like protein; protein At5g39030.1 [Arabidopsis thaliana] >gi|10177548|dbj|BAB10827.1|
  misc_feature (265)..(594): Homolog of NCBI NO: 15241612 NR Description: receptor protein kinase - like protein; protein At5g39030.1 [Arabidopsis thaliana] >gi|10177548|dbj|BAB10827.1|
  misc_feature (1)..(594): Homolog of NCBI NO: 15229329 NR Description: putative protein kinase; protein id: At3g04690.1 thaliana] >gi|6175184|gb|AAF04910.1|AC011437_25 putative protein
  misc_feature (1)..(636): Homolog of NCBI NO: 15241880 NR Description: receptor-like protein kinase precursor - like;
  misc_feature (1)..(636): Homolog of NCBI NO: 34902826 NR Description: unnamed protein product [Oryza sativa (japonica group)] >gi|6498463|dbj|BAA87852.1| unnamed protein product
  misc_feature (1)..(564): Homolog of NCBI NO: 34393641 NR Description: putative PTH-2, resistance gene (PTO kinase)
MFRRWVSDDEIILSESSGISPIVPDIKINYTEKTPSYVAPDDVYATSRSMGNADHPEQNLNFNLTWLFTVDAGFSYLVRLHFCETLSEVNKEGQRVFSIFIENQTATLEMDVFRMSGGSWIPMYLDYTVIAGSGSGRRHDLRLDLHPLVSINPKYYDAILNGVEILKMNDPDGNLAGPNPDPLVSPDLIPNRATPRIRKNKSHILPITLAVVGSLVVLAMFVVGVLVIMKKKKKSKPSTNSSWCPLPHGTDSTNTKPAKSLPADLCRRFSIFEIKSATNDFEDKLIIGVGGFGSVYKGQIDGGATLVAVKRLEITSNQGAKEFETELEMLSKLRHVHLVSLIGYCDEDNEMVLVYEYMPHGTLKDHLFRRDKTSDPPLSWKRRLEICIGAARGLQYLHTGAKYTIIHRDIKTTNILLDENFVTKVSDFGLSRVGPTSASQTHVSTVVKGTFGYLDPEYYRRQVLTEKSDVYSFGVVLLEVLCCRPIRMQSVPPEQADLIRWVKSNYRRGTVDQIIDSDLSADITSTSLEKFCEIAVRCVQDRGMERPPMNDVVWALEFALQLHETAKKKNDNVESLDLMPSGEVGTTTDGEDDLFSRTTGHVGKSTTTDDSVLVVGDERSGSSWGVFSEINEPKAR

SEQ ID NO: 78447 - DNA, 1368 bp, Arabidopsis thaliana
  misc_feature (1)..(1368): Ceres Seq. ID no. 12641434
  misc_feature: MA Experiment ID: 20000307 Result: Down-regulated in Transcription
  misc_feature: MA Experiment 20000307 PARAMETER Experiment Name: At_Germinating_Seeds_Sub_P Parameter: Age (hr) Value: 24 vs. 0
  misc_feature: MA Experiment 20000307 PARAMETER Experiment Name: At_Germinating_Seeds_Sub_P Parameter: Organism Value: A. thaliana
  misc_feature: MA Experiment 20000307 PARAMETER Experiment Name: At_Germinating_Seeds_Sub_P Parameter: Plant Line Value: WS
  misc_feature: MA Experiment 20000307 PARAMETER Experiment Name: At_Germinating_Seeds_Sub_P Parameter: Tissue Value: Germinating Seeds
  misc_feature: MA Experiment ID: 20000346 Result: Up-regulated in Transcription
  misc_feature: MA Experiment 20000346 PARAMETER Experiment Name: At_2mM_SA_Sub_P Parameter: Age (day) Value: 14
  misc_feature: MA Experiment 20000346 PARAMETER Experiment Name: At_2mM_SA_Sub_P Parameter: Organism Value: A. thaliana
  misc_feature: MA Experiment 20000346 PARAMETER Experiment Name: At_2mM_SA_Sub_P Parameter: Plant Line Value: WS
  misc_feature: MA Experiment 20000346 PARAMETER Experiment Name: At_2mM_SA_Sub_P Parameter: Timepoint (hr) Value: 1
  misc_feature: MA Experiment 20000346 PARAMETER Experiment Name: At_2mM_SA_Sub_P Parameter: Tissue Value: Aerial
  misc_feature: MA Experiment 20000346 PARAMETER Experiment Name: At_2mM_SA_Sub_P Parameter: Treatment Value: 2mM SA vs. No Treatment
atggtgaacgaagaaatggagtcatcacttaaagtcatcgacgtggcacgagtcacaccatcaaactccgactcgtccgagtcactcactctcccactcaccttcttcgacctcctctggtacaaacttcacgccgtcgaacgagtcatcttctacaaactcaccgacgcaagtcgtcctttctttgactcagtcatcgtcccaaacctcaaaacatctctctcctcatccctctctcactacctcccactcgccggaaaactcgtgtgggaaccacttgatcccaaaccgaaaatcgtctacaccccaaacgacgccgtttcattcaccgtcgccgagtcaaacgcagacttctcacgtttaaccggcaaagaaccgttccccaccaccgagttatacccgttagtccccgagttacatgtctccgacgactcagcttccgccgtgtcgtttcaagtcacgttatttccaaaccaagggttttgcatcagcgttaatgcacatcatgccgttttagatggaaaaacgacaaccaactttctcaaatcttgggcacgcacatgtaaaaaccaagattcttttctaccgcaggatctaatcccagtttacgatcgtacggtcataaaagatccaatggatttagatacaaagatcttaaacgcttggcacagagtagccaaagtgttcaccggtggtaaagaaccagaaaaccccaagagtttaaagcttttatggtcgccggagattggtcctgacgttttccgatacactctcaatctcactagagaagatatccaaaagcttcgagagagactcaagaaagagtcttcttcttcctctgtttcctcatcacccaaagagcttcgtttatcaacgtttgtgattgtttactcttatgctttaacgtgtttaatcaaagctcgaggcggtgatccgagtagaccagtcgggtacggattcgctgtggattgtcgaagccttatggttccaccggttccatcgagttattttgagacttttatgagtgaagaagggtttttagctgctgcgagaatggttagtgattctgttgaggcattggatgagaatgttgcattgaagattccagagattttggaagggtttacgactctttcaccaggaacacaggttttgtctgttgccgggtcgacccggttcggagtttacgggttggattttgggtggggtagaccggagaaagtggtggttgtgtcaattgaccaaggtgaagcgatttcttttgcggagagtagagatgggagtggtggtgtagagcttggcttctccctcaagaaacatgaaatggatgttcttgttgatttgcttcacaagggactagaaaattaa

SEQ ID NO: 78448 - protein, 455 aa, Arabidopsis thaliana
  peptide (1)..(455): Ceres Seq. ID no. 12641435
  misc_feature (8)..(452): Pfam Name: Transferase family Pfam Description: Transferase family
  misc_feature (1)..(455): Homolog of NCBI NO: 10177550 NR Description: anthocyanin acyltransferase-like protein
  misc_feature (1)..(455): Homolog of NCBI NO: 15450469 NR Description: AT5g39050/MXF12_60 [Arabidopsis thaliana]
  misc_feature (1)..(342): Homolog of NCBI NO: 18421824 NR Description: acyltransferase - like protein; protein id:
  misc_feature (6)..(450): Homolog of NCBI NO: 15241631 NR Description: acyltransferase -like protein; protein id: supported by cDNA: 37806. [Arabidopsis thaliana]
  misc_feature (6)..(450): Homolog of NCBI NO: 21593292 NR Description: acyltransferase-like protein [Arabidopsis
  misc_feature (6)..(454): Homolog of NCBI NO: 15241632 NR Description: acyltransferase -like protein; protein id:
  misc_feature (9)..(454): Homolog of NCBI NO: 15230034 NR Description: hypothetical protein; protein id: At3g29635.1
  misc_feature (1)..(454): Homolog of NCBI NO: 15230013 NR Description: Anthocyanin 5-aromatic acyltransferase, putative; id: At3g29590.1 [Arabidopsis thaliana]
  misc_feature (9)..(455): Homolog of NCBI NO: 15230048 NR Description: anthocyanin 5-aromatic acyltransferase, putative; id: At3g29670.1 [Arabidopsis thaliana]
  misc_feature (9)..(448): Homolog of NCBI NO: 15230049 NR Description: anthocyanin 5-aromatic acyltransferase, putative; id: At3g29680.1 [Arabidopsis thaliana]
MVNEEMESSLKVIDVARVTPSNSDSSESLTLPLTFFDLLWYKLHAVERVIFYKLTDASRPFFDSVIVPNLKTSLSSSLSHYLPLAGKLVWEPLDPKPKIVYTPNDAVSFTVAESNADFSRLTGKEPFPTTELYPLVPELHVSDDSASAVSFQVTLFPNQGFCISVNAHHAVLDGKTTTNFLKSWARTCKNQDSFLPQDLIPVYDRTVIKDPMDLDTKILNAWHRVAKVFTGGKEPENPKSLKLLWSPEIGPDVFRYTLNLTREDIQKLRERLKKESSSSSVSSSPKELRLSTFVIVYSYALTCLIKARGGDPSRPVGYGFAVDCRSLMVPPVPSSYFETFMSEEGFLAAARMVSDSVEALDENVALKIPEILEGFTTLSPGTQVLSVAGSTRFGVYGLDFGWGRPEKVVVVSIDQGEAISFAESRDGSGGVELGFSLKKHEMDVLVDLLHKGLEN

SEQ ID NO: 78449 - protein, 450 aa, Arabidopsis thaliana
  peptide (1)..(450): Ceres Seq. ID no. 12641436
  misc_feature (3)..(447): Pfam Name: Transferase family Pfam Description: Transferase family
  misc_feature (1)..(450): Homolog of NCBI NO: 10177550 NR Description: anthocyanin acyltransferase-like protein
  misc_feature (1)..(450): Homolog of NCBI NO: 15450469 NR Description: AT5g39050/MXF12_60 [Arabidopsis thaliana]
  misc_feature (1)..(337): Homolog of NCBI NO: 18421824 NR Description: acyltransferase - like protein; protein id:
  misc_feature (1)..(445): Homolog of NCBI NO: 15241631 NR Description: acyltransferase -like protein; protein id: supported by cDNA: 37806. [Arabidopsis thaliana]
  misc_feature (1)..(445): Homolog of NCBI NO: 21593292 NR Description: acyltransferase-like protein [Arabidopsis
  misc_feature (1)..(449): Homolog of NCBI NO: 15241632 NR Description: acyltransferase -like protein; protein id:
  misc_feature (4)..(449): Homolog of NCBI NO: 15230034 NR Description: hypothetical protein; protein id: At3g29635.1
  misc_feature (1)..(449): Homolog of NCBI NO: 15230013 NR Description: Anthocyanin 5-aromatic acyltransferase, putative; id: At3g29590.1 [Arabidopsis thaliana]
  misc_feature (4)..(450): Homolog of NCBI NO: 15230048 NR Description: anthocyanin 5-aromatic acyltransferase, putative; id: At3g29670.1 [Arabidopsis thaliana]
  misc_feature (4)..(443): Homolog of NCBI NO: 15230049 NR Description: anthocyanin 5-aromatic acyltransferase, putative; id: At3g29680.1 [Arabidopsis thaliana]
MESSLKVIDVARVTPSNSDSSESLTLPLTFFDLLWYKLHAVERVIFYKLTDASRPFFDSVIVPNLKTSLSSSLSHYLPLAGKLVWEPLDPKPKIVYTPNDAVSFTVAESNADFSRLTGKEPFPTTELYPLVPELHVSDDSASAVSFQVTLFPNQGFCISVNAHHAVLDGKTTTNFLKSWARTCKNQDSFLPQDLIPVYDRTVIKDPMDLDTKILNAWHRVAKVFTGGKEPENPKSLKLLWSPEIGPDVFRYTLNLTREDIQKLRERLKKESSSSSVSSSPKELRLSTFVIVYSYALTCLIKARGGDPSRPVGYGFAVDCRSLMVPPVPSSYFETFMSEEGFLAAARMVSDSVEALDENVALKIPEILEGFTTLSPGTQVLSVAGSTRFGVYGLDFGWGRPEKVVVVSIDQGEAISFAESRDGSGGVELGFSLKKHEMDVLVDLLHKGLEN

SEQ ID NO: 78450 - protein, 244 aa, Arabidopsis thaliana
  peptide (1)..(244): Ceres Seq. ID no. 12641437
  misc_feature (1)..(241): Pfam Name: Transferase family Pfam Description: Transferase family
  misc_feature (1)..(244): Homolog of NCBI NO: 10177550 NR Description: anthocyanin acyltransferase-like protein
  misc_feature (1)..(244): Homolog of NCBI NO: 15450469 NR Description: AT5g39050/MXF12_60 [Arabidopsis thaliana]
  misc_feature (1)..(131): Homolog of NCBI NO: 18421824 NR Description: acyltransferase - like protein; protein id:
  misc_feature (1)..(239): Homolog of NCBI NO: 15241631 NR Description: acyltransferase -like protein; protein id: supported by cDNA: 37806. [Arabidopsis thaliana]
  misc_feature (1)..(239): Homolog of NCBI NO: 21593292 NR Description: acyltransferase-like protein [Arabidopsis
  misc_feature (1)..(243): Homolog of NCBI NO: 15241632 NR Description: acyltransferase -like protein; protein id:
  misc_feature (1)..(243): Homolog of NCBI NO: 15230034 NR Description: hypothetical protein; protein id: At3g29635.1
  misc_feature (1)..(243): Homolog of NCBI NO: 15230013 NR Description: Anthocyanin 5-aromatic acyltransferase, putative; id: At3g29590.1 [Arabidopsis thaliana]
  misc_feature (1)..(244): Homolog of NCBI NO: 15230048 NR Description: anthocyanin 5-aromatic acyltransferase, putative; id: At3g29670.1 [Arabidopsis thaliana]
  misc_feature (1)..(237): Homolog of NCBI NO: 15230049 NR Description: anthocyanin 5-aromatic acyltransferase, putative; id: At3g29680.1 [Arabidopsis thaliana]
MDLDTKILNAWHRVAKVFTGGKEPENPKSLKLLWSPEIGPDVFRYTLNLTREDIQKLRERLKKESSSSSVSSSPKELRLSTFVIVYSYALTCLIKARGGDPSRPVGYGFAVDCRSLMVPPVPSSYFETFMSEEGFLAAARMVSDSVEALDENVALKIPEILEGFTTLSPGTQVLSVAGSTRFGVYGLDFGWGRPEKVVVVSIDQGEAISFAESRDGSGGVELGFSLKKHEMDVLVDLLHKGLEN

SEQ ID NO: 78451 - DNA, 666 bp, Arabidopsis thaliana
  misc_feature (1)..(666): Ceres Seq. ID no. 12641467
  misc_feature: MA Experiment ID: 20000355 Result: Down-regulated in Transcription
  misc_feature: MA Experiment 20000355 PARAMETER Experiment Name: At_Siliques_Sub_P Parameter: Age (day) Value: 21
  misc_feature: MA Experiment 20000355 PARAMETER Experiment Name: At_Siliques_Sub_P Parameter: Organism Value: A. thaliana
  misc_feature: MA Experiment 20000355 PARAMETER Experiment Name: At_Siliques_Sub_P Parameter: Plant Line Value: WS
  misc_feature: MA Experiment 20000355 PARAMETER Experiment Name: At_Siliques_Sub_P Parameter: Tissue Value: Less Than 5mm Siliques vs. Whole Plant
  misc_feature: MA Experiment ID: 20000440 Result: Down-regulated in Transcription
  misc_feature: MA Experiment 20000440 PARAMETER Experiment Name: At_Closed-Flower__Sub_P Parameter: Tissue Value: Closed Flower vs. Whole Plant
atgaaggtgtccatgtctctcatcctgataaccttatcagctttggtcaccattgccaaagcatatgatccaagtccacttcaagacttctgtgtggccattgatgaccctaaaaatggtgtttttgtgaatggtaagttttgcaaggatccaaagcaagcaaaggcagaagatttcttttcctcaggcctcaaccaagcaggaatcactaataacaaagtccaatccaacgtgacaacagtcaatgtcgatcagattccagggttaaacactttgggaatatccttggtccgcatagactatgcgccatatggtcaaaacccgcctcacacacaccctcgtgccactgagatccttgttcttgttgaaggaacattatatgttggttttgtctcttcgaatcaagacaacaaccgtttattcgccaaagtgctgaacccgggagacgtgttcgtgttccccataggaatgatccattttcaagtgaatatcgggaagacccccgcagtggcctttgctggactaagtagtcaaaatgctggtgtcatcacgatcgcagatatagtgtttggatcaacgcctccgattaatccagatattttggctcaggcgtttcagttagatgtcaatgttgtcaaagaccttgaggccaagtttaaaaactaa

SEQ ID NO: 78452 - protein, 221 aa, Arabidopsis thaliana
  peptide (1)..(221): Ceres Seq. ID no. 12641468
  misc_feature (62)..(213): Pfam Name: Cupin Pfam Description: Cupin
  misc_feature (1)..(221): Homolog of NCBI NO: 15241660 NR Description: germin-like protein; protein id: At5g39180.1
  misc_feature (1)..(221): Homolog of NCBI NO: 15241653 NR Description: germin - like protein; protein id: At5g39150.1
  misc_feature (1)..(221): Homolog of NCBI NO: 15241638 NR Description: germin - like protein; protein id: At5g39120.1
  misc_feature (1)..(221): Homolog of NCBI NO: 18202454 NR Description: Germin-like protein subfamily 1 member 13
  misc_feature (1)..(221): Homolog of NCBI NO: 15241636 NR Description: germin -like protein; protein id: At5g39110.1
  misc_feature (1)..(219): Homolog of NCBI NO: 22327459 NR Description: germin-like protein (GLP2a) copy1; protein id:
  misc_feature (1)..(219): Homolog of NCBI NO: 15241662 NR Description: germin-like protein (GLP2a) copy2; protein id:
  misc_feature (1)..(219): Homolog of NCBI NO: 15241640 NR Description: germin - like protein; protein id: At5g39130.1, by cDNA: gi_17065441 [Arabidopsis thaliana]
  misc_feature (1)..(219): Homolog of NCBI NO: 2129594 NR Description: germin type 2 - Arabidopsis thaliana
  misc_feature (3)..(221): Homolog of NCBI NO: 15230587 NR Description: germin-like protein; protein id: At3g05950.1
MKVSMSLILITLSALVTIAKAYDPSPLQDFCVAIDDPKNGVFVNGKFCKDPKQAKAEDFFSSGLNQAGITNNKVQSNVTTVNVDQIPGLNTLGISLVRIDYAPYGQNPPHTHPRATEILVLVEGTLYVGFVSSNQDNNRLFAKVLNPGDVFVFPIGMIHFQVNIGKTPAVAFAGLSSQNAGVITIADIVFGSTPPINPDILAQAFQLDVNVVKDLEAKFKN

SEQ ID NO: 78453 - protein, 217 aa, Arabidopsis thaliana
  peptide (1)..(217): Ceres Seq. ID no. 12641469
  misc_feature (58)..(209): Pfam Name: Cupin Pfam Description: Cupin
  misc_feature (1)..(217): Homolog of NCBI NO: 15241660 NR Description: germin-like protein; protein id: At5g39180.1
  misc_feature (1)..(217): Homolog of NCBI NO: 15241653 NR Description: germin - like protein; protein id: At5g39150.1
  misc_feature (1)..(217): Homolog of NCBI NO: 15241638 NR Description: germin - like protein; protein id: At5g39120.1
  misc_feature (1)..(217): Homolog of NCBI NO: 18202454 NR Description: Germin-like protein subfamily 1 member 13
  misc_feature (1)..(217): Homolog of NCBI NO: 15241636 NR Description: germin -like protein; protein id: At5g39110.1
  misc_feature (1)..(215): Homolog of NCBI NO: 22327459 NR Description: germin-like protein (GLP2a) copy1; protein id:
  misc_feature (1)..(215): Homolog of NCBI NO: 15241662 NR Description: germin-like protein (GLP2a) copy2; protein id:
  misc_feature (1)..(215): Homolog of NCBI NO: 15241640 NR Description: germin - like protein; protein id: At5g39130.1, by cDNA: gi_17065441 [Arabidopsis thaliana]
  misc_feature (1)..(215): Homolog of NCBI NO: 2129594 NR Description: germin type 2 - Arabidopsis thaliana
  misc_feature (1)..(217): Homolog of NCBI NO: 15230587 NR Description: germin-like protein; protein id: At3g05950.1
MSLILITLSALVTIAKAYDPSPLQDFCVAIDDPKNGVFVNGKFCKDPKQAKAEDFFSSGLNQAGITNNKVQSNVTTVNVDQIPGLNTLGISLVRIDYAPYGQNPPHTHPRATEILVLVEGTLYVGFVSSNQDNNRLFAKVLNPGDVFVFPIGMIHFQVNIGKTPAVAFAGLSSQNAGVITIADIVFGSTPPINPDILAQAFQLDVNVVKDLEAKFKN

SEQ ID NO: 78454 - DNA, 792 bp, Arabidopsis thaliana
  misc_feature (1)..(792): Ceres Seq. ID no. 12641492
  misc_feature: MA Experiment ID: 20000315 Result: Down-regulated in Transcription
  misc_feature: MA Experiment 20000315 PARAMETER Experiment Name: At_14day_Shoots-Roots_Sub_P Parameter: Age (day) Value: 14
  misc_feature: MA Experiment 20000315 PARAMETER Experiment Name: At_14day_Shoots-Roots_Sub_P Parameter: Organism Value: A. thaliana
  misc_feature: MA Experiment 20000315 PARAMETER Experiment Name: At_14day_Shoots-Roots_Sub_P Parameter: Plant Line Value: WS
  misc_feature: MA Experiment 20000315 PARAMETER Experiment Name: At_14day_Shoots-Roots_Sub_P Parameter: Tissue Value: Shoots vs. Whole Plant
  misc_feature: MA Experiment ID: 20000355 Result: Up-regulated in Transcription
  misc_feature: MA Experiment 20000355 PARAMETER Experiment Name: At_Siliques_Sub_P Parameter: Age (day) Value: 21
  misc_feature: MA Experiment 20000355 PARAMETER Experiment Name: At_Siliques_Sub_P Parameter: Organism Value: A. thaliana
  misc_feature: MA Experiment 20000355 PARAMETER Experiment Name: At_Siliques_Sub_P Parameter: Plant Line Value: WS
  misc_feature: MA Experiment 20000355 PARAMETER Experiment Name: At_Siliques_Sub_P Parameter: Tissue Value: Less Than 5mm Siliques vs. Whole Plant
atggtgatatgggtcgtgcccatgagttacggtcatggagcgatgattggtaatgcagtcgaagcacctgatgtagcggaagcaccagggattaatgacccaagcaaggcactcgacactaattggtatgacgcacgagccacgttctacggtgacatccatggtggcgacactcaacagggagcttgtggatacggtaatctattcagacaaggctatggtctagccaccgcagcgttaagtacggcactcttcaacgacgggtacacatgtggggcttgttatgaaatcatgtgcacgcgtgatccacaatggtgtttacccggatccgtcaagatcacagcaacaaacttctgtcccgcaaattacagcaaaaccacagacctttggtgcaacccaccacagaaacactttgatctctccttagcaatgtttctcaagattgccaagtacaaagccggggttgtcccagttagatacagacgtattccttgtagcaaaactggtggtgtcaagtttgaaaccaaaggaaacccttatttcttaatggtcttgatatacaacgtaggaggagctggagatattaagtacgtgcaagttaaaggaaacaagaccgggtggataacaatgaaaaagaactgggggcagaattggaccactattacagtattgaccggccaaggtttatcgttcagggttacaacgagtgatgggattacaaaagatttttggaatgtgatgccaaaaaattgggggtttggacagacttttgatggtaggattaacttttag

SEQ ID NO: 78455 - protein, 263 aa, Arabidopsis thaliana
  peptide (1)..(263): Ceres Seq. ID no. 12641493
  misc_feature (171)..(248): Pfam Name: Pollen allergen Pfam Description: Pollen allergen
  misc_feature (1)..(263): Homolog of NCBI NO: 9758856 NR Description: expansin-like protein [Arabidopsis thaliana]
  misc_feature (1)..(263): Homolog of NCBI NO: 20137958 NR Description: Putative alpha-expansin 22 precursor (At-EXP22)
  misc_feature (1)..(263): Homolog of NCBI NO: 15241678 NR Description: expansin-like protein; protein id: At5g39270.1
  misc_feature (1)..(263): Homolog of NCBI NO: 15241682 NR Description: expansin, putative; protein id: At5g39290.1
  misc_feature (1)..(263): Homolog of NCBI NO: 20137956 NR Description: Putative alpha-expansin 26 precursor (At-EXP26)
  misc_feature (1)..(263): Homolog of NCBI NO: 15241684 NR Description: expansin, putative; protein id: At5g39300.1
  misc_feature (1)..(263): Homolog of NCBI NO: 20137955 NR Description: Putative alpha-expansin 25 precursor (At-EXP25)
  misc_feature (8)..(263): Homolog of NCBI NO: 9758859 NR Description: expansin-like protein [Arabidopsis thaliana]
  misc_feature (1)..(263): Homolog of NCBI NO: 15241680 NR Description: expansin, putative; protein id: At5g39280.1
  misc_feature (1)..(263): Homolog of NCBI NO: 20137957 NR Description: Putative alpha-expansin 23 precursor (At-EXP23)
MVIWVVPMSYGHGAMIGNAVEAPDVAEAPGINDPSKALDTNWYDARATFYGDIHGGDTQQGACGYGNLFRQGYGLATAALSTALFNDGYTCGACYEIMCTRDPQWCLPGSVKITATNFCPANYSKTTDLWCNPPQKHFDLSLAMFLKIAKYKAGVVPVRYRRIPCSKTGGVKFETKGNPYFLMVLIYNVGGAGDIKYVQVKGNKTGWITMKKNWGQNWTTITVLTGQGLSFRVTTSDGITKDFWNVMPKNWGFGQTFDGRINF

SEQ ID NO: 78456 - protein, 256 aa, Arabidopsis thaliana
  peptide (1)..(256): Ceres Seq. ID no. 12641494
  misc_feature (164)..(241): Pfam Name: Pollen allergen Pfam Description: Pollen allergen
  misc_feature (1)..(256): Homolog of NCBI NO: 9758856 NR Description: expansin-like protein [Arabidopsis thaliana]
  misc_feature (1)..(256): Homolog of NCBI NO: 20137958 NR Description: Putative alpha-expansin 22 precursor (At-EXP22)
  misc_feature (1)..(256): Homolog of NCBI NO: 15241678 NR Description: expansin-like protein; protein id: At5g39270.1
  misc_feature (1)..(256): Homolog of NCBI NO: 15241682 NR Description: expansin, putative; protein id: At5g39290.1
  misc_feature (1)..(256): Homolog of NCBI NO: 20137956 NR Description: Putative alpha-expansin 26 precursor (At-EXP26)
  misc_feature (1)..(256): Homolog of NCBI NO: 15241684 NR Description: expansin, putative; protein id: At5g39300.1
  misc_feature (1)..(256): Homolog of NCBI NO: 20137955 NR Description: Putative alpha-expansin 25 precursor (At-EXP25)
  misc_feature (1)..(256): Homolog of NCBI NO: 9758859 NR Description: expansin-like protein [Arabidopsis thaliana]
  misc_feature (1)..(256): Homolog of NCBI NO: 15241680 NR Description: expansin, putative; protein id: At5g39280.1
  misc_feature (1)..(256): Homolog of NCBI NO: 20137957 NR Description: Putative alpha-expansin 23 precursor (At-EXP23)
MSYGHGAMIGNAVEAPDVAEAPGINDPSKALDTNWYDARATFYGDIHGGDTQQGACGYGNLFRQGYGLATAALSTALFNDGYTCGACYEIMCTRDPQWCLPGSVKITATNFCPANYSKTTDLWCNPPQKHFDLSLAMFLKIAKYKAGVVPVRYRRIPCSKTGGVKFETKGNPYFLMVLIYNVGGAGDIKYVQVKGNKTGWITMKKNWGQNWTTITVLTGQGLSFRVTTSDGITKDFWNVMPKNWGFGQTFDGRINF

SEQ ID NO: 78457 - protein, 249 aa, Arabidopsis thaliana
  peptide (1)..(249): Ceres Seq. ID no. 12641495
  misc_feature (157)..(234): Pfam Name: Pollen allergen Pfam Description: Pollen allergen
  misc_feature (1)..(249): Homolog of NCBI NO: 9758856 NR Description: expansin-like protein [Arabidopsis thaliana]
  misc_feature (1)..(249): Homolog of NCBI NO: 20137958 NR Description: Putative alpha-expansin 22 precursor (At-EXP22)
  misc_feature (1)..(249): Homolog of NCBI NO: 15241678 NR Description: expansin-like protein; protein id: At5g39270.1
  misc_feature (1)..(249): Homolog of NCBI NO: 15241682 NR Description: expansin, putative; protein id: At5g39290.1
  misc_feature (1)..(249): Homolog of NCBI NO: 20137956 NR Description: Putative alpha-expansin 26 precursor (At-EXP26)
  misc_feature (1)..(249): Homolog of NCBI NO: 15241684 NR Description: expansin, putative; protein id: At5g39300.1
  misc_feature (1)..(249): Homolog of NCBI NO: 20137955 NR Description: Putative alpha-expansin 25 precursor (At-EXP25)
  misc_feature (1)..(249): Homolog of NCBI NO: 9758859 NR Description: expansin-like protein [Arabidopsis thaliana]
  misc_feature (1)..(249): Homolog of NCBI NO: 15241680 NR Description: expansin, putative; protein id: At5g39280.1
  misc_feature (1)..(249): Homolog of NCBI NO: 20137957 NR Description: Putative alpha-expansin 23 precursor (At-EXP23)
MIGNAVEAPDVAEAPGINDPSKALDTNWYDARATFYGDIHGGDTQQGACGYGNLFRQGYGLATAALSTALFNDGYTCGACYEIMCTRDPQWCLPGSVKITATNFCPANYSKTTDLWCNPPQKHFDLSLAMFLKIAKYKAGVVPVRYRRIPCSKTGGVKFETKGNPYFLMVLIYNVGGAGDIKYVQVKGNKTGWITMKKNWGQNWTTITVLTGQGLSFRVTTSDGITKDFWNVMPKNWGFGQTFDGRINF

SEQ ID NO: 78458 - DNA, 792 bp, Arabidopsis thaliana
  misc_feature (1)..(792): Ceres Seq. ID no. 12641496
  misc_feature: MA Experiment ID: 20000315 Result: Down-regulated in Transcription
  misc_feature: MA Experiment 20000315 PARAMETER Experiment Name: At_14day_Shoots-Roots_Sub_P Parameter: Age (day) Value: 14
  misc_feature: MA Experiment 20000315 PARAMETER Experiment Name: At_14day_Shoots-Roots_Sub_P Parameter: Organism Value: A. thaliana
  misc_feature: MA Experiment 20000315 PARAMETER Experiment Name: At_14day_Shoots-Roots_Sub_P Parameter: Plant Line Value: WS
  misc_feature: MA Experiment 20000315 PARAMETER Experiment Name: At_14day_Shoots-Roots_Sub_P Parameter: Tissue Value: Shoots vs. Whole Plant
  misc_feature: MA Experiment ID: 20000355 Result: Up-regulated in Transcription
  misc_feature: MA Experiment 20000355 PARAMETER Experiment Name: At_Siliques_Sub_P Parameter: Age (day) Value: 21
  misc_feature: MA Experiment 20000355 PARAMETER Experiment Name: At_Siliques_Sub_P Parameter: Organism Value: A. thaliana
  misc_feature: MA Experiment 20000355 PARAMETER Experiment Name: At_Siliques_Sub_P Parameter: Plant Line Value: WS
  misc_feature: MA Experiment 20000355 PARAMETER Experiment Name: At_Siliques_Sub_P Parameter: Tissue Value: Less Than 5mm Siliques vs. Whole Plant
atggcgatgtgggtcgtgccaatgagttacggtcatggagcgatgattggtaatgcagtcgaagcacctgatgtagccgaagcacccgggattaatgacccaagcaaggcactcgaccctaattggtatgacgcacgagccacgttctacggtgacatccatggtggagacactcaacagggagcttgtggatacggtaatctattcagacaaggctatggtctagccacagcagcgttaagtacggcactcttcaacgacgggtacacatgtggggcttgttatgaaatcatgtgcacgcgtgatccacaatggtgtttacccggatccgtcaagatcacagcaacaaacttctgtcccgcaaattacagcaaaaccacagacctttggtgcaatccaccacagaaacactttgatctctccttagcaatgtttctcaagattgccaagtacaaagccggggttgtcccagttagatacagacgtattccttgtagcaaaactggtggtgtcaagtttgaaaccaaaggaaacccttatttcttaatggtcttgatatacaacgtaggaggagctggagatattaagtacgtgcaagttaaagaaaacaagaccgggtggataacaatgaaaaagaactgggggcagaattggaccactagtacagtattgaccggccaaggtttgtcgttcagagttacgacgactgatgggattacaaaagatttttggaatgtgatgccaaaaaattggggatttggacagacttttgatggtaagattaacttttaa

SEQ ID NO: 78459 - protein, 263 aa, Arabidopsis thaliana
  peptide (1)..(263): Ceres Seq. ID no. 12641497
  misc_feature (171)..(248): Pfam Name: Pollen allergen Pfam Description: Pollen allergen
  misc_feature (1)..(263): Homolog of NCBI NO: 15241682 NR Description: expansin, putative; protein id: At5g39290.1
  misc_feature (1)..(263): Homolog of NCBI NO: 20137956 NR Description: Putative alpha-expansin 26 precursor (At-EXP26)
  misc_feature (1)..(263): Homolog of NCBI NO: 9758856 NR Description: expansin-like protein [Arabidopsis thaliana]
  misc_feature (1)..(263): Homolog of NCBI NO: 20137958 NR Description: Putative alpha-expansin 22 precursor (At-EXP22)
  misc_feature (1)..(263): Homolog of NCBI NO: 15241678 NR Description: expansin-like protein; protein id: At5g39270.1
  misc_feature (1)..(263): Homolog of NCBI NO: 15241684 NR Description: expansin, putative; protein id: At5g39300.1
  misc_feature (1)..(263): Homolog of NCBI NO: 20137955 NR Description: Putative alpha-expansin 25 precursor (At-EXP25)
  misc_feature (1)..(263): Homolog of NCBI NO: 15241680 NR Description: expansin, putative; protein id: At5g39280.1
  misc_feature (1)..(263): Homolog of NCBI NO: 20137957 NR Description: Putative alpha-expansin 23 precursor (At-EXP23)
  misc_feature (8)..(263): Homolog of NCBI NO: 9758859 NR Description: expansin-like protein [Arabidopsis thaliana]
MAMWVVPMSYGHGAMIGNAVEAPDVAEAPGINDPSKALDPNWYDARATFYGDIHGGDTQQGACGYGNLFRQGYGLATAALSTALFNDGYTCGACYEIMCTRDPQWCLPGSVKITATNFCPANYSKTTDLWCNPPQKHFDLSLAMFLKIAKYKAGVVPVRYRRIPCSKTGGVKFETKGNPYFLMVLIYNVGGAGDIKYVQVKENKTGWITMKKNWGQNWTTSTVLTGQGLSFRVTTTDGITKDFWNVMPKNWGFGQTFDGKINF

SEQ ID NO: 78460 - protein, 261 aa, Arabidopsis thaliana
  peptide (1)..(261): Ceres Seq. ID no. 12641498
  misc_feature (169)..(246): Pfam Name: Pollen allergen Pfam Description: Pollen allergen
  misc_feature (1)..(261): Homolog of NCBI NO: 15241682 NR Description: expansin, putative; protein id: At5g39290.1
  misc_feature (1)..(261): Homolog of NCBI NO: 20137956 NR Description: Putative alpha-expansin 26 precursor (At-EXP26)
  misc_feature (1)..(261): Homolog of NCBI NO: 9758856 NR Description: expansin-like protein [Arabidopsis thaliana]
  misc_feature (1)..(261): Homolog of NCBI NO: 20137958 NR Description: Putative alpha-expansin 22 precursor (At-EXP22)
  misc_feature (1)..(261): Homolog of NCBI NO: 15241678 NR Description: expansin-like protein; protein id: At5g39270.1
  misc_feature (1)..(261): Homolog of NCBI NO: 15241684 NR Description: expansin, putative; protein id: At5g39300.1
  misc_feature (1)..(261): Homolog of NCBI NO: 20137955 NR Description: Putative alpha-expansin 25 precursor (At-EXP25)
  misc_feature (1)..(261): Homolog of NCBI NO: 15241680 NR Description: expansin, putative; protein id: At5g39280.1
  misc_feature (1)..(261): Homolog of NCBI NO: 20137957 NR Description: Putative alpha-expansin 23 precursor (At-EXP23)
  misc_feature (6)..(261): Homolog of NCBI NO: 9758859 NR Description: expansin-like protein [Arabidopsis thaliana]
MWVVPMSYGHGAMIGNAVEAPDVAEAPGINDPSKALDPNWYDARATFYGDIHGGDTQQGACGYGNLFRQGYGLATAALSTALFNDGYTCGACYEIMCTRDPQWCLPGSVKITATNFCPANYSKTTDLWCNPPQKHFDLSLAMFLKIAKYKAGVVPVRYRRIPCSKTGGVKFETKGNPYFLMVLIYNVGGAGDIKYVQVKENKTGWITMKKNWGQNWTTSTVLTGQGLSFRVTTTDGITKDFWNVMPKNWGFGQTFDGKINF

SEQ ID NO: 78461 - protein, 256 aa, Arabidopsis thaliana
  peptide (1)..(256): Ceres Seq. ID no. 12641499
  misc_feature (164)..(241): Pfam Name: Pollen allergen Pfam Description: Pollen allergen
  misc_feature (1)..(256): Homolog of NCBI NO: 15241682 NR Description: expansin, putative; protein id: At5g39290.1
  misc_feature (1)..(256): Homolog of NCBI NO: 20137956 NR Description: Putative alpha-expansin 26 precursor (At-EXP26)
  misc_feature (1)..(256): Homolog of NCBI NO: 9758856 NR Description: expansin-like protein [Arabidopsis thaliana]
  misc_feature (1)..(256): Homolog of NCBI NO: 20137958 NR Description: Putative alpha-expansin 22 precursor (At-EXP22)
  misc_feature (1)..(256): Homolog of NCBI NO: 15241678 NR Description: expansin-like protein; protein id: At5g39270.1
  misc_feature (1)..(256): Homolog of NCBI NO: 15241684 NR Description: expansin, putative; protein id: At5g39300.1
  misc_feature (1)..(256): Homolog of NCBI NO: 20137955 NR Description: Putative alpha-expansin 25 precursor (At-EXP25)
  misc_feature (1)..(256): Homolog of NCBI NO: 15241680 NR Description: expansin, putative; protein id: At5g39280.1
  misc_feature (1)..(256): Homolog of NCBI NO: 20137957 NR Description: Putative alpha-expansin 23 precursor (At-EXP23)
  misc_feature (1)..(256): Homolog of NCBI NO: 9758859 NR Description: expansin-like protein [Arabidopsis thaliana]
MSYGHGAMIGNAVEAPDVAEAPGINDPSKALDPNWYDARATFYGDIHGGDTQQGACGYGNLFRQGYGLATAALSTALFNDGYTCGACYEIMCTRDPQWCLPGSVKITATNFCPANYSKTTDLWCNPPQKHFDLSLAMFLKIAKYKAGVVPVRYRRIPCSKTGGVKFETKGNPYFLMVLIYNVGGAGDIKYVQVKENKTGWITMKKNWGQNWTTSTVLTGQGLSFRVTTTDGITKDFWNVMPKNWGFGQTFDGKINF

SEQ ID NO: 78462 - DNA, 783 bp, Arabidopsis thaliana
  misc_feature (1)..(783): Ceres Seq. ID no. 12641500
  misc_feature: MA Experiment ID: 20000314 Result: Down-regulated in Transcription
  misc_feature: MA Experiment 20000314 PARAMETER Experiment Name: At_14day_Shoots-Roots_Sub_P Parameter: Age (day) Value: 14
  misc_feature: MA Experiment 20000314 PARAMETER Experiment Name: At_14day_Shoots-Roots_Sub_P Parameter: Organism Value: A. thaliana
  misc_feature: MA Experiment 20000314 PARAMETER Experiment Name: At_14day_Shoots-Roots_Sub_P Parameter: Plant Line Value: WS
  misc_feature: MA Experiment 20000314 PARAMETER Experiment Name: At_14day_Shoots-Roots_Sub_P Parameter: Tissue Value: Roots vs. Whole Plant
  misc_feature: MA Experiment ID: 20000315 Result: Down-regulated in Transcription
  misc_feature: MA Experiment 20000315 PARAMETER Experiment Name: At_14day_Shoots-Roots_Sub_P Parameter: Age (day) Value: 14
  misc_feature: MA Experiment 20000315 PARAMETER Experiment Name: At_14day_Shoots-Roots_Sub_P Parameter: Organism Value: A. thaliana
  misc_feature: MA Experiment 20000315 PARAMETER Experiment Name: At_14day_Shoots-Roots_Sub_P Parameter: Plant Line Value: WS
  misc_feature: MA Experiment 20000315 PARAMETER Experiment Name: At_14day_Shoots-Roots_Sub_P Parameter: Tissue Value: Shoots vs. Whole Plant
  misc_feature: MA Experiment ID: 20000355 Result: Up-regulated in Transcription
  misc_feature: MA Experiment 20000355 PARAMETER Experiment Name: At_Siliques_Sub_P Parameter: Age (day) Value: 21
  misc_feature: MA Experiment 20000355 PARAMETER Experiment Name: At_Siliques_Sub_P Parameter: Organism Value: A. thaliana
  misc_feature: MA Experiment 20000355 PARAMETER Experiment Name: At_Siliques_Sub_P Parameter: Plant Line Value: WS
  misc_feature: MA Experiment 20000355 PARAMETER Experiment Name: At_Siliques_Sub_P Parameter: Tissue Value: Less Than 5mm Siliques vs. Whole Plant
  misc_feature: MA Experiment ID: 20000440 Result: Down-regulated in Transcription
  misc_feature: MA Experiment 20000440 PARAMETER Experiment Name: At_Closed-Flower__Sub_P Parameter: Tissue Value: Closed Flower vs. Whole Plant
atggctacattgttagtgtccatgagttacggtcatcgagcgatgattaatgatgtagccgaagcacccgtgattgacaatgtaggcagcccaaccaacggactcgacagttcttggtatgatgcacgagcaacattttacggtgatatccatggtggagaaactcaacagggagcctgtggatacggtgatttattcaaacaaggctatggtctagagacagcggcattgagcacagcactcttcaacgaagggtatacatgtggggcttgttaccagatcatgtgtgtgcacgacccacaatggtgtttacccggaaccatcaagattacagcaacaaatttctgtccaccagattactccaaaaccgaaggcgtttggtgcaacccaccacaaaagcactttgacctctccctaccaatgttcctcaagatcgcccaatacaaagctggagttgtcccagttaaatacagacgtatttcttgtgcaagaactggtggtgtcaagtttgaaaccaaaggaaacccttatttcttaatgatcttgccatacaatgtaggaggcgctggagatatcaagttgatgcaagttaaaggagacaagaccgggtggataacaatgcaaaagaactggggacaaaactggaccactggtgttaatttgactggtcagggtatttcattcagggttacgacgagtgatggggttacaaaagattttaataatgtgatgccaaacaattggggatttggacagacttttgatggaaagattaacttttag

SEQ ID NO: 78463 - protein, 260 aa, Arabidopsis thaliana
  peptide (1)..(260): Ceres Seq. ID no. 12641501
  misc_feature (168)..(245): Pfam Name: Pollen allergen Pfam Description: Pollen allergen
  misc_feature (1)..(260): Homolog of NCBI NO: 15241684 NR Description: expansin, putative; protein id: At5g39300.1
  misc_feature (1)..(260): Homolog of NCBI NO: 20137955 NR Description: Putative alpha-expansin 25 precursor (At-EXP25)
  misc_feature (8)..(260): Homolog of NCBI NO: 9758859 NR Description: expansin-like protein [Arabidopsis thaliana]
  misc_feature (1)..(260): Homolog of NCBI NO: 15241680 NR Description: expansin, putative; protein id: At5g39280.1
  misc_feature (1)..(260): Homolog of NCBI NO: 20137957 NR Description: Putative alpha-expansin 23 precursor (At-EXP23)
  misc_feature (8)..(260): Homolog of NCBI NO: 9758857 NR Description: expansin-like protein [Arabidopsis thaliana]
  misc_feature (1)..(260): Homolog of NCBI NO: 9758856 NR Description: expansin-like protein [Arabidopsis thaliana]
  misc_feature (1)..(260): Homolog of NCBI NO: 20137958 NR Description: Putative alpha-expansin 22 precursor (At-EXP22)
  misc_feature (1)..(260): Homolog of NCBI NO: 15241682 NR Description: expansin, putative; protein id: At5g39290.1
  misc_feature (1)..(260): Homolog of NCBI NO: 20137956 NR Description: Putative alpha-expansin 26 precursor (At-EXP26)
MATLLVSMSYGHRAMINDVAEAPVIDNVGSPTNGLDSSWYDARATFYGDIHGGETQQGACGYGDLFKQGYGLETAALSTALFNEGYTCGACYQIMCVHDPQWCLPGTIKITATNFCPPDYSKTEGVWCNPPQKHFDLSLPMFLKIAQYKAGVVPVKYRRISCARTGGVKFETKGNPYFLMILPYNVGGAGDIKLMQVKGDKTGWITMQKNWGQNWTTGVNLTGQGISFRVTTSDGVTKDFNNVMPNNWGFGQTFDGKINF

SEQ ID NO: 78464 - protein, 253 aa, Arabidopsis thaliana
  peptide (1)..(253): Ceres Seq. ID no. 12641502
  misc_feature (161)..(238): Pfam Name: Pollen allergen Pfam Description: Pollen allergen
  misc_feature (1)..(253): Homolog of NCBI NO: 15241684 NR Description: expansin, putative; protein id: At5g39300.1
  misc_feature (1)..(253): Homolog of NCBI NO: 20137955 NR Description: Putative alpha-expansin 25 precursor (At-EXP25)
  misc_feature (1)..(253): Homolog of NCBI NO: 9758859 NR Description: expansin-like protein [Arabidopsis thaliana]
  misc_feature (1)..(253): Homolog of NCBI NO: 15241680 NR Description: expansin, putative; protein id: At5g39280.1
  misc_feature (1)..(253): Homolog of NCBI NO: 20137957 NR Description: Putative alpha-expansin 23 precursor (At-EXP23)
  misc_feature (1)..(253): Homolog of NCBI NO: 9758857 NR Description: expansin-like protein [Arabidopsis thaliana]
  misc_feature (1)..(253): Homolog of NCBI NO: 9758856 NR Description: expansin-like protein [Arabidopsis thaliana]
  misc_feature (1)..(253): Homolog of NCBI NO: 20137958 NR Description: Putative alpha-expansin 22 precursor (At-EXP22)
  misc_feature (1)..(253): Homolog of NCBI NO: 15241682 NR Description: expansin, putative; protein id: At5g39290.1
  misc_feature (1)..(253): Homolog of NCBI NO: 20137956 NR Description: Putative alpha-expansin 26 precursor (At-EXP26)
MSYGHRAMINDVAEAPVIDNVGSPTNGLDSSWYDARATFYGDIHGGETQQGACGYGDLFKQGYGLETAALSTALFNEGYTCGACYQIMCVHDPQWCLPGTIKITATNFCPPDYSKTEGVWCNPPQKHFDLSLPMFLKIAQYKAGVVPVKYRRISCARTGGVKFETKGNPYFLMILPYNVGGAGDIKLMQVKGDKTGWITMQKNWGQNWTTGVNLTGQGISFRVTTSDGVTKDFNNVMPNNWGFGQTFDGKINF

SEQ ID NO: 78465 - protein, 246 aa, Arabidopsis thaliana
  peptide (1)..(246): Ceres Seq. ID no. 12641503
  misc_feature (154)..(231): Pfam Name: Pollen allergen Pfam Description: Pollen allergen
  misc_feature (1)..(246): Homolog of NCBI NO: 15241684 NR Description: expansin, putative; protein id: At5g39300.1
  misc_feature (1)..(246): Homolog of NCBI NO: 20137955 NR Description: Putative alpha-expansin 25 precursor (At-EXP25)
  misc_feature (1)..(246): Homolog of NCBI NO: 9758859 NR Description: expansin-like protein [Arabidopsis thaliana]
  misc_feature (1)..(246): Homolog of NCBI NO: 15241680 NR Description: expansin, putative; protein id: At5g39280.1
  misc_feature (1)..(246): Homolog of NCBI NO: 20137957 NR Description: Putative alpha-expansin 23 precursor (At-EXP23)
  misc_feature (1)..(246): Homolog of NCBI NO: 9758857 NR Description: expansin-like protein [Arabidopsis thaliana]
  misc_feature (1)..(246): Homolog of NCBI NO: 9758856 NR Description: expansin-like protein [Arabidopsis thaliana]
  misc_feature (1)..(246): Homolog of NCBI NO: 20137958 NR Description: Putative alpha-expansin 22 precursor (At-EXP22)
  misc_feature (1)..(246): Homolog of NCBI NO: 15241682 NR Description: expansin, putative; protein id: At5g39290.1
  misc_feature (1)..(246): Homolog of NCBI NO: 20137956 NR Description: Putative alpha-expansin 26 precursor (At-EXP26)
MINDVAEAPVIDNVGSPTNGLDSSWYDARATFYGDIHGGETQQGACGYGDLFKQGYGLETAALSTALFNEGYTCGACYQIMCVHDPQWCLPGTIKITATNFCPPDYSKTEGVWCNPPQKHFDLSLPMFLKIAQYKAGVVPVKYRRISCARTGGVKFETKGNPYFLMILPYNVGGAGDIKLMQVKGDKTGWITMQKNWGQNWTTGVNLTGQGISFRVTTSDGVTKDFNNVMPNNWGFGQTFDGKINF

SEQ ID NO: 78466 - DNA, 1443 bp, Arabidopsis thaliana
  misc_feature (1)..(1443): Ceres Seq. ID no. 12641504
  misc_feature: MA Experiment ID: 108569 Result: Up-regulated in Transcription
  misc_feature: MA Experiment 108569 PARAMETER Experiment Name: At_0.001%_MeJA__cDNA_P Parameter: Timepoint (hr) Value: 6
  misc_feature: MA Experiment 108569 PARAMETER Experiment Name: At_0.001%_MeJA__cDNA_P Parameter: Tissue Value: Aerial
  misc_feature: MA Experiment 108569 PARAMETER Experiment Name: At_0.001%_MeJA__cDNA_P Parameter: Treatment Value: 0.001% MeJA vs. No Treatment
  misc_feature: MA Experiment ID: 108577 Result: Up-regulated in Transcription
  misc_feature: MA Experiment 108577 PARAMETER Experiment Name: At_42deg_Heat_cDNA_P Parameter: Temperature (deg C) Value: 42 vs. 22
  misc_feature: MA Experiment 108577 PARAMETER Experiment Name: At_42deg_Heat_cDNA_P Parameter: Timepoint (hr) Value: 6
  misc_feature: MA Experiment 108577 PARAMETER Experiment Name: At_42deg_Heat_cDNA_P Parameter: Tissue Value: Aerial
  misc_feature: MA Experiment ID: 108595 Result: Down-regulated in Transcription
  misc_feature: MA Experiment 108595 PARAMETER Experiment Name: At_Ler-pi_Ovule_cDNA_P Parameter: Plant Line Value: null
atggtgaagatctgttgtattggagctggatatgtaggaggaccaacaatggcagtgattgcattgaaatgtccagatattgaagtggcagttgttgatatctctgttcctagaatcaacgcttggaacagtgatcagcttccgatttacgagccaggtcttgacgatatcgttaagcaatgcagaggaaagaatcttttcttcagtactgatgtggagaaacatgttagagaagctgatattgtctttgtctctgttaacacaccgactaaaacgactggtcttggagctgggaaagctgctgatctcacttattgggagagtgctgctcgtatgatcgcggatgtatcggtttctgacaagattgttgttgagaaatcgactgttccggtgaagacagctgaagctattgagaagattttgatgcataacagtaaaggaatcaagtttcagattctttcgaatccggagtttcttgctgaaggaactgctatcgctgatctttttaaccctgaccgtgttttgatcggagggcgagaaacacctgaaggattcaaagctgttcagacacttaaagaggtttatgctaattgggttcctgaaggtcagatcatcacaactaatctctggtctgctgagctttctaagttagctgcaaatgctttcttggctcagaggatttcatcagtcaatgccatgtctgcactttgtgaatccactggtgctgatgttactcaagtgtcttacgctgttggtactgattcaagaatcggttccaaattcttgaacgctagtgttggattcggaggttcttgtttccagaaggacattctgaatctcgtctacatctgtcaatgcaacggacttccagaagtggcggaatactggaaacaagtgatcaagatcaacgattaccaaaagaaccggttcgtgaacagaatcgtgtcctctatgttcaacactgtctccaacaagaaggttgcgattcttggattcgcattcaagaaagacactggtgacacaagggaaacacctgccattgatgtgtgtaaaggtctattaggagacaaagcacagatcagtatctatgatcctcaagtcacagaggaacagattcagagagatctctcgatgaaaaagttcgactgggaccatcctcttcacttgcagccaatgagtccaaccacagtgaaacaagtgagtgtgacttgggacgcatatgaagctacaaaagacgcacacgcggtttgcgttttgactgagtgggacgagtttaagtcgttagattaccagaagatcttcgacaacatgcagaaaccggcttttatcttcgacggaagaaacattatgaatgttaacaagttaagagagattggtttcattgtttactccattggtaagccacttgacccatggctcaaggacatgcctgcctttgtctaa

SEQ ID NO: 78467 - protein, 480 aa, Arabidopsis thaliana
  peptide (1)..(480): Ceres Seq. ID no. 12641505
  misc_feature (2)..(200): Pfam Name: UDP-glucose/GDP-mannose dehydrogenase family, Pfam Description: UDP-glucose/GDP-mannose dehydrogenase family,
  misc_feature (1)..(480): Homolog of NCBI NO: 15241704 NR Description: UDP-glucose dehydrogenase-like protein; protein
  misc_feature (1)..(480): Homolog of NCBI NO: 30102540 NR Description: At5g39320 [Arabidopsis thaliana]
  misc_feature (1)..(478): Homolog of NCBI NO: 21618158 NR Description: UDP-glucose dehydrogenase, putative [Arabidopsis
  misc_feature (1)..(478): Homolog of NCBI NO: 15228687 NR Description: UDP-glucose dehydrogenase, putative; protein id:
  misc_feature (1)..(478): Homolog of NCBI NO: 15983404 NR Description: AT3g29360/MUO10_6 [Arabidopsis thaliana]
  misc_feature (1)..(478): Homolog of NCBI NO: 15242316 NR Description: UDP-glucose dehydrogenase-like protein; protein At5g15490.1, supported by cDNA: gi_15810322 [Arabidopsis
MVKICCIGAGYVGGPTMAVIALKCPDIEVAVVDISVPRINAWNSDQLPIYEPGLDDIVKQCRGKNLFFSTDVEKHVREADIVFVSVNTPTKTTGLGAGKAADLTYWESAARMIADVSVSDKIVVEKSTVPVKTAEAIEKILMHNSKGIKFQILSNPEFLAEGTAIADLFNPDRVLIGGRETPEGFKAVQTLKEVYANWVPEGQIITTNLWSAELSKLAANAFLAQRISSVNAMSALCESTGADVTQVSYAVGTDSRIGSKFLNASVGFGGSCFQKDILNLVYICQCNGLPEVAEYWKQVIKINDYQKNRFVNRIVSSMFNTVSNKKVAILGFAFKKDTGDTRETPAIDVCKGLLGDKAQISIYDPQVTEEQIQRDLSMKKFDWDHPLHLQPMSPTTVKQVSVTWDAYEATKDAHAVCVLTEWDEFKSLDYQKIFDNMQKPAFIFDGRNIMNVNKLREIGFIVYSIGKPLDPWLKDMPAFV

SEQ ID NO: 78468 - protein, 464 aa, Arabidopsis thaliana
  peptide (1)..(464): Ceres Seq. ID no. 12641506
  misc_feature (1)..(184): Pfam Name: UDP-glucose/GDP-mannose dehydrogenase family, Pfam Description: UDP-glucose/GDP-mannose dehydrogenase family,
  misc_feature (1)..(464): Homolog of NCBI NO: 15241704 NR Description: UDP-glucose dehydrogenase-like protein; protein
  misc_feature (1)..(464): Homolog of NCBI NO: 30102540 NR Description: At5g39320 [Arabidopsis thaliana]
  misc_feature (1)..(462): Homolog of NCBI NO: 21618158 NR Description: UDP-glucose dehydrogenase, putative [Arabidopsis
  misc_feature (1)..(462): Homolog of NCBI NO: 15228687 NR Description: UDP-glucose dehydrogenase, putative; protein id:
  misc_feature (1)..(462): Homolog of NCBI NO: 15983404 NR Description: AT3g29360/MUO10_6 [Arabidopsis thaliana]
  misc_feature (1)..(462): Homolog of NCBI NO: 15242316 NR Description: UDP-glucose dehydrogenase-like protein; protein At5g15490.1, supported by cDNA: gi_15810322 [Arabidopsis
MAVIALKCPDIEVAVVDISVPRINAWNSDQLPIYEPGLDDIVKQCRGKNLFFSTDVEKHVREADIVFVSVNTPTKTTGLGAGKAADLTYWESAARMIADVSVSDKIVVEKSTVPVKTAEAIEKILMHNSKGIKFQILSNPEFLAEGTAIADLFNPDRVLIGGRETPEGFKAVQTLKEVYANWVPEGQIITTNLWSAELSKLAANAFLAQRISSVNAMSALCESTGADVTQVSYAVGTDSRIGSKFLNASVGFGGSCFQKDILNLVYICQCNGLPEVAEYWKQVIKINDYQKNRFVNRIVSSMFNTVSNKKVAILGFAFKKDTGDTRETPAIDVCKGLLGDKAQISIYDPQVTEEQIQRDLSMKKFDWDHPLHLQPMSPTTVKQVSVTWDAYEATKDAHAVCVLTEWDEFKSLDYQKIFDNMQKPAFIFDGRNIMNVNKLREIGFIVYSIGKPLDPWLKDMPAFV

SEQ ID NO: 78469 - protein, 369 aa, Arabidopsis thaliana
  peptide (1)..(369): Ceres Seq. ID no. 12641507
  misc_feature (1)..(89): Pfam Name: UDP-glucose/GDP-mannose dehydrogenase family, Pfam Description: UDP-glucose/GDP-mannose dehydrogenase family,
  misc_feature (1)..(369): Homolog of NCBI NO: 15241704 NR Description: UDP-glucose dehydrogenase-like protein; protein
  misc_feature (1)..(369): Homolog of NCBI NO: 30102540 NR Description: At5g39320 [Arabidopsis thaliana]
  misc_feature (1)..(367): Homolog of NCBI NO: 21618158 NR Description: UDP-glucose dehydrogenase, putative [Arabidopsis
  misc_feature (1)..(367): Homolog of NCBI NO: 15228687 NR Description: UDP-glucose dehydrogenase, putative; protein id:
  misc_feature (1)..(367): Homolog of NCBI NO: 15983404 NR Description: AT3g29360/MUO10_6 [Arabidopsis thaliana]
  misc_feature (1)..(367): Homolog of NCBI NO: 15242316 NR Description: UDP-glucose dehydrogenase-like protein; protein At5g15490.1, supported by cDNA: gi_15810322 [Arabidopsis
MIADVSVSDKIVVEKSTVPVKTAEAIEKILMHNSKGIKFQILSNPEFLAEGTAIADLFNPDRVLIGGRETPEGFKAVQTLKEVYANWVPEGQIITTNLWSAELSKLAANAFLAQRISSVNAMSALCESTGADVTQVSYAVGTDSRIGSKFLNASVGFGGSCFQKDILNLVYICQCNGLPEVAEYWKQVIKINDYQKNRFVNRIVSSMFNTVSNKKVAILGFAFKKDTGDTRETPAIDVCKGLLGDKAQISIYDPQVTEEQIQRDLSMKKFDWDHPLHLQPMSPTTVKQVSVTWDAYEATKDAHAVCVLTEWDEFKSLDYQKIFDNMQKPAFIFDGRNIMNVNKLREIGFIVYSIGKPLDPWLKDMPAFV

SEQ ID NO: 78470 - DNA, 1980 bp, Arabidopsis thaliana
  misc_feature (1)..(1980): Ceres Seq. ID no. 12641512
  misc_feature: MA Experiment ID: 20000307 Result: Down-regulated in Transcription
  misc_feature: MA Experiment 20000307 PARAMETER Experiment Name: At_Germinating_Seeds_Sub_P Parameter: Age (hr) Value: 24 vs. 0
  misc_feature: MA Experiment 20000307 PARAMETER Experiment Name: At_Germinating_Seeds_Sub_P Parameter: Organism Value: A. thaliana
  misc_feature: MA Experiment 20000307 PARAMETER Experiment Name: At_Germinating_Seeds_Sub_P Parameter: Plant Line Value: WS
  misc_feature: MA Experiment 20000307 PARAMETER Experiment Name: At_Germinating_Seeds_Sub_P Parameter: Tissue Value: Germinating Seeds
atgagtgaagttttgcgcagagccaacaacgcacttagtagcgtcaagcaataccaatctctcttgaatcactttgcagctactcaatcaatttcaaaaaccaaagctttacactgccacgtcatcaccggcggtcgagtttccggccacattctctcgactctctccgtaacttatgcgttatgtggtcacatcacttatgcacggaagctgttcgaggaaatgcctcaaagctctttgctttcttataacattgttattagaatgtacgtgcgtgaaggattgtatcacgatgcgattagcgtgtttattaggatggttagtgagggggttaagtgtgttccggatggttatacatacccttttgttgctaaagctgctggagaattgaaatcgatgaaattggggttggttgttcatgggaggatcttgaggagttggtttggtagggataagtatgtgcagaacgcgttgttagcgatgtatatgaactttgggaaggttgaaatggcgagggatgtgtttgatgtgatgaagaaccgtgatgtgatttcgtggaacacgatgattagtgggtattataggaatggttatatgaatgatgcgttaatgatgtttgattggatggttaatgaaagtgttgatcttgaccatgctacgattgtttctatgttgcctgtttgtggtcacttgaaggatttggagatggggaggaatgttcataagttggtggaagagaagcggttaggggataaaattgaggtgaagaatgcgttggtgaatatgtacttgaaatgtggtcgtatggatgaagcgagatttgtttttgacaggatggaacgaagggatgtgatcacgtggacttgtatgattaacggatatactgaagatggagatgtggaaaacgctttagagttgtgtagattgatgcagtttgaaggcgtaagacctaatgctgtgactatagcttctcttgtttcggtgtgtggtgatgctttgaaggtgaatgatggtaaatgtttacacggttgggcggtgaggcaacaggtttattccgatatcattatagaaacatctttgatcagcatgtatgctaaatgcaaacgtgtagacctctgctttagagtattttcggggaatgaacttgtgagtgatgcgttaggtctattcaaacggatgcgacgggaagatgtggagcccaatattgctacattaaacagtctccttccagcatatgcagctttggcagatttgcgtcaagcaatgaatatccattgctacctaaccaaaaccgggtttatgtcaagccttgatgctgctacagggttggttcatgtttactcaaagtgtggaacattagaatctgctcacaagatattcaatggaatccaggaaaaacacaagagcaaagatgtagttctatggggtgcgttaatatccggctacgggatgcacggagatggtcataatgcgttgcaagttttcatggaaatggttcgatctggtgtaacgccaaacgaaatcacatttacatctgccttgaatgcttgcagtcattcgggtttggttgaagaaggcttgacattattcaggttcatgcttgaacattacaaaacgttagccagatcaaaccattacacttgcattgttgatctccttggtcgagcaggtcggttagacgaagcttacaatctcatcacaacaattccatttgaaccaacgtcaaccgtttggggtgcgttgcttgctgcttgtgtcacacatgagaatgtccagcttggagaaatggcagcaaacaagttgttcgagctggaaccagagaacacgggcaactatgtgttgttggcaaacatctatgcggctttaggacgatggaaagatatggagaaggtgagaagcatgatggagaatgttggattgagaaagaaaccaggtcatagcacaatcgagatcagaagtaattcagttgatacaagatga

SEQ ID NO: 78471 - protein, 659 aa, Arabidopsis thaliana
  peptide (1)..(659): Ceres Seq. ID no. 12641513
  misc_feature (184)..(218): Pfam Name: PPR repeat Pfam Description: PPR repeat
  misc_feature (153)..(381): Homolog of NCBI NO: 15241714 NR Description: putative protein; protein id: At5g39350.1
  misc_feature (20)..(652): Homolog of NCBI NO: 15234006 NR Description: putative protein; protein id: At4g18750.1
  misc_feature (41)..(653): Homolog of NCBI NO: 15220337 NR Description: hypothetical protein; protein id: At1g11290.1
  misc_feature (51)..(658): Homolog of NCBI NO: 38606535 NR Description: OSJNBa0016O02.23 [Oryza sativa (japonica
  misc_feature (59)..(654): Homolog of NCBI NO: 15228590 NR Description: hypothetical protein; protein id: At3g03580.1 thaliana] >gi|6091764|gb|AAF03474.1|AC009327_13 hypothetical [Arabidopsis thaliana] >gi|28393735|gb|AAO42278.1| unknown
  misc_feature (68)..(655): Homolog of NCBI NO: 15236277 NR Description: putative protein; protein id: At4g35130.1
  misc_feature (53)..(655): Homolog of NCBI NO: 34903762 NR Description: unnamed protein product [Oryza sativa (japonica group)] >gi|7340873|dbj|BAA92963.1| unnamed protein product
  misc_feature (47)..(367): Homolog of NCBI NO: 21741755 NR Description: OSJNBa0060B20.9 [Oryza sativa (japonica
  misc_feature (384)..(650): Homolog of NCBI NO: 21741755 NR Description: OSJNBa0060B20.9 [Oryza sativa (japonica
  misc_feature (1)..(651): Homolog of NCBI NO: 15234831 NR Description: putative protein; protein id: At4g30700.1
MSEVLRRANNALSSVKQYQSLLNHFAATQSISKTKALHCHVITGGRVSGHILSTLSVTYALCGHITYARKLFEEMPQSSLLSYNIVIRMYVREGLYHDAISVFIRMVSEGVKCVPDGYTYPFVAKAAGELKSMKLGLVVHGRILRSWFGRDKYVQNALLAMYMNFGKVEMARDVFDVMKNRDVISWNTMISGYYRNGYMNDALMMFDWMVNESVDLDHATIVSMLPVCGHLKDLEMGRNVHKLVEEKRLGDKIEVKNALVNMYLKCGRMDEARFVFDRMERRDVITWTCMINGYTEDGDVENALELCRLMQFEGVRPNAVTIASLVSVCGDALKVNDGKCLHGWAVRQQVYSDIIIETSLISMYAKCKRVDLCFRVFSGNELVSDALGLFKRMRREDVEPNIATLNSLLPAYAALADLRQAMNIHCYLTKTGFMSSLDAATGLVHVYSKCGTLESAHKIFNGIQEKHKSKDVVLWGALISGYGMHGDGHNALQVFMEMVRSGVTPNEITFTSALNACSHSGLVEEGLTLFRFMLEHYKTLARSNHYTCIVDLLGRAGRLDEAYNLITTIPFEPTSTVWGALLAACVTHENVQLGEMAANKLFELEPENTGNYVLLANIYAALGRWKDMEKVRSMMENVGLRKKPGHSTIEIRSNSVDTR

SEQ ID NO: 78472 - protein, 585 aa, Arabidopsis thaliana
  peptide (1)..(585): Ceres Seq. ID no. 12641514
  misc_feature (110)..(144): Pfam Name: PPR repeat Pfam Description: PPR repeat
  misc_feature (79)..(307): Homolog of NCBI NO: 15241714 NR Description: putative protein; protein id: At5g39350.1
  misc_feature (1)..(578): Homolog of NCBI NO: 15234006 NR Description: putative protein; protein id: At4g18750.1
  misc_feature (1)..(579): Homolog of NCBI NO: 15220337 NR Description: hypothetical protein; protein id: At1g11290.1
  misc_feature (1)..(584): Homolog of NCBI NO: 38606535 NR Description: OSJNBa0016O02.23 [Oryza sativa (japonica
  misc_feature (1)..(580): Homolog of NCBI NO: 15228590 NR Description: hypothetical protein; protein id: At3g03580.1 thaliana] >gi|6091764|gb|AAF03474.1|AC009327_13 hypothetical [Arabidopsis thaliana] >gi|28393735|gb|AAO42278.1| unknown
  misc_feature (1)..(581): Homolog of NCBI NO: 15236277 NR Description: putative protein; protein id: At4g35130.1
  misc_feature (1)..(581): Homolog of NCBI NO: 34903762 NR Description: unnamed protein product [Oryza sativa (japonica group)] >gi|7340873|dbj|BAA92963.1| unnamed protein product
  misc_feature (1)..(293): Homolog of NCBI NO: 21741755 NR Description: OSJNBa0060B20.9 [Oryza sativa (japonica
  misc_feature (310)..(576): Homolog of NCBI NO: 21741755 NR Description: OSJNBa0060B20.9 [Oryza sativa (japonica
  misc_feature (1)..(577): Homolog of NCBI NO: 15234831 NR Description: putative protein; protein id: At4g30700.1
MPQSSLLSYNIVIRMYVREGLYHDAISVFIRMVSEGVKCVPDGYTYPFVAKAAGELKSMKLGLVVHGRILRSWFGRDKYVQNALLAMYMNFGKVEMARDVFDVMKNRDVISWNTMISGYYRNGYMNDALMMFDWMVNESVDLDHATIVSMLPVCGHLKDLEMGRNVHKLVEEKRLGDKIEVKNALVNMYLKCGRMDEARFVFDRMERRDVITWTCMINGYTEDGDVENALELCRLMQFEGVRPNAVTIASLVSVCGDALKVNDGKCLHGWAVRQQVYSDIIIETSLISMYAKCKRVDLCFRVFSGNELVSDALGLFKRMRREDVEPNIATLNSLLPAYAALADLRQAMNIHCYLTKTGFMSSLDAATGLVHVYSKCGTLESAHKIFNGIQEKHKSKDVVLWGALISGYGMHGDGHNALQVFMEMVRSGVTPNEITFTSALNACSHSGLVEEGLTLFRFMLEHYKTLARSNHYTCIVDLLGRAGRLDEAYNLITTIPFEPTSTVWGALLAACVTHENVQLGEMAANKLFELEPENTGNYVLLANIYAALGRWKDMEKVRSMMENVGLRKKPGHSTIEIRSNSVDTR

SEQ ID NO: 78473 - protein, 571 aa, Arabidopsis thaliana
  peptide (1)..(571): Ceres Seq. ID no. 12641515
  misc_feature (96)..(130): Pfam Name: PPR repeat Pfam Description: PPR repeat
  misc_feature (65)..(293): Homolog of NCBI NO: 15241714 NR Description: putative protein; protein id: At5g39350.1
  misc_feature (1)..(564): Homolog of NCBI NO: 15234006 NR Description: putative protein; protein id: At4g18750.1
  misc_feature (1)..(565): Homolog of NCBI NO: 15220337 NR Description: hypothetical protein; protein id: At1g11290.1
  misc_feature (1)..(570): Homolog of NCBI NO: 38606535 NR Description: OSJNBa0016O02.23 [Oryza sativa (japonica
  misc_feature (1)..(566): Homolog of NCBI NO: 15228590 NR Description: hypothetical protein; protein id: At3g03580.1 thaliana] >gi|6091764|gb|AAF03474.1|AC009327_13 hypothetical [Arabidopsis thaliana] >gi|28393735|gb|AAO42278.1| unknown
  misc_feature (1)..(567): Homolog of NCBI NO: 15236277 NR Description: putative protein; protein id: At4g35130.1
  misc_feature (1)..(567): Homolog of NCBI NO: 34903762 NR Description: unnamed protein product [Oryza sativa (japonica group)] >gi|7340873|dbj|BAA92963.1| unnamed protein product
  misc_feature (1)..(279): Homolog of NCBI NO: 21741755 NR Description: OSJNBa0060B20.9 [Oryza sativa (japonica
  misc_feature (296)..(562): Homolog of NCBI NO: 21741755 NR Description: OSJNBa0060B20.9 [Oryza sativa (japonica
  misc_feature (1)..(563): Homolog of NCBI NO: 15234831 NR Description: putative protein; protein id: At4g30700.1
MYVREGLYHDAISVFIRMVSEGVKCVPDGYTYPFVAKAAGELKSMKLGLVVHGRILRSWFGRDKYVQNALLAMYMNFGKVEMARDVFDVMKNRDVISWNTMISGYYRNGYMNDALMMFDWMVNESVDLDHATIVSMLPVCGHLKDLEMGRNVHKLVEEKRLGDKIEVKNALVNMYLKCGRMDEARFVFDRMERRDVITWTCMINGYTEDGDVENALELCRLMQFEGVRPNAVTIASLVSVCGDALKVNDGKCLHGWAVRQQVYSDIIIETSLISMYAKCKRVDLCFRVFSGNELVSDALGLFKRMRREDVEPNIATLNSLLPAYAALADLRQAMNIHCYLTKTGFMSSLDAATGLVHVYSKCGTLESAHKIFNGIQEKHKSKDVVLWGALISGYGMHGDGHNALQVFMEMVRSGVTPNEITFTSALNACSHSGLVEEGLTLFRFMLEHYKTLARSNHYTCIVDLLGRAGRLDEAYNLITTIPFEPTSTVWGALLAACVTHENVQLGEMAANKLFELEPENTGNYVLLANIYAALGRWKDMEKVRSMMENVGLRKKPGHSTIEIRSNSVDTR

SEQ ID NO: 78474 - DNA, 1425 bp, Arabidopsis thaliana
  misc_feature (1)..(1425): Ceres Seq. ID no. 12641682
  misc_feature: MA Experiment ID: 20000166 Result: Up-regulated in Transcription
  misc_feature: MA Experiment 20000166 PARAMETER Experiment Name: At_100uM_ABA_P Parameter: Age (day) Value: 14
  misc_feature: MA Experiment 20000166 PARAMETER Experiment Name: At_100uM_ABA_P Parameter: Organism Value: A. thaliana
  misc_feature: MA Experiment 20000166 PARAMETER Experiment Name: At_100uM_ABA_P Parameter: Plant Line Value: WS
  misc_feature: MA Experiment 20000166 PARAMETER Experiment Name: At_100uM_ABA_P Parameter: Timepoint (hr) Value: 1
  misc_feature: MA Experiment 20000166 PARAMETER Experiment Name: At_100uM_ABA_P Parameter: Tissue Value: Aerial
  misc_feature: MA Experiment 20000166 PARAMETER Experiment Name: At_100uM_ABA_P Parameter: Treatment Value: 100uM ABA vs. No Treatment
  misc_feature: MA Experiment ID: 20000169 Result: Up-regulated in Transcription
  misc_feature: MA Experiment 20000169 PARAMETER Experiment Name: At_100uM_ABA_P Parameter: Age (day) Value: 14
  misc_feature: MA Experiment 20000169 PARAMETER Experiment Name: At_100uM_ABA_P Parameter: Organism Value: A. thaliana
  misc_feature: MA Experiment 20000169 PARAMETER Experiment Name: At_100uM_ABA_P Parameter: Plant Line Value: WS
  misc_feature: MA Experiment 20000169 PARAMETER Experiment Name: At_100uM_ABA_P Parameter: Timepoint (hr) Value: 6
  misc_feature: MA Experiment 20000169 PARAMETER Experiment Name: At_100uM_ABA_P Parameter: Tissue Value: Aerial
  misc_feature: MA Experiment 20000169 PARAMETER Experiment Name: At_100uM_ABA_P Parameter: Treatment Value: 100uM ABA vs. No Treatment
  misc_feature: MA Experiment ID: 20000171 Result: Up-regulated in Transcription
  misc_feature: MA Experiment 20000171 PARAMETER Experiment Name: At_42deg_Heat_P Parameter: Age (day) Value: 14
  misc_feature: MA Experiment 20000171 PARAMETER Experiment Name: At_42deg_Heat_P Parameter: Organism Value: A. thaliana
  misc_feature: MA Experiment 20000171 PARAMETER Experiment Name: At_42deg_Heat_P Parameter: Plant Line Value: WS
  misc_feature: MA Experiment 20000171 PARAMETER Experiment Name: At_42deg_Heat_P Parameter: Temperature (deg C) Value: 42 vs. 22
  misc_feature: MA Experiment 20000171 PARAMETER Experiment Name: At_42deg_Heat_P Parameter: Timepoint (hr) Value: 1
  misc_feature: MA Experiment 20000171 PARAMETER Experiment Name: At_42deg_Heat_P Parameter: Tissue Value: Aerial
  misc_feature: MA Experiment ID: 20000173 Result: Up-regulated in Transcription
  misc_feature: MA Experiment 20000173 PARAMETER Experiment Name: At_42deg_Heat_P Parameter: Age (day) Value: 14
  misc_feature: MA Experiment 20000173 PARAMETER Experiment Name: At_42deg_Heat_P Parameter: Organism Value: A. thaliana
  misc_feature: MA Experiment 20000173 PARAMETER Experiment Name: At_42deg_Heat_P Parameter: Plant Line Value: WS
  misc_feature: MA Experiment 20000173 PARAMETER Experiment Name: At_42deg_Heat_P Parameter: Temperature (deg C) Value: 42 vs. 22
  misc_feature: MA Experiment 20000173 PARAMETER Experiment Name: At_42deg_Heat_P Parameter: Timepoint (hr) Value: 6
  misc_feature: MA Experiment 20000173 PARAMETER Experiment Name: At_42deg_Heat_P Parameter: Tissue Value: Aerial
  misc_feature: MA Experiment ID: 20000179 Result: Down-regulated in Transcription
  misc_feature: MA Experiment 20000179 PARAMETER Experiment Name: At_Germinating_Seeds_P Parameter: Age (hr) Value: 6 vs. 0
  misc_feature: MA Experiment 20000179 PARAMETER Experiment Name: At_Germinating_Seeds_P Parameter: Tissue Value: Germinating Seeds
  misc_feature: MA Experiment ID: 20000180 Result: Down-regulated in Transcription
  misc_feature: MA Experiment 20000180 PARAMETER Experiment Name: At_Germinating_Seeds_P Parameter: Age (hr) Value: 24 vs. 0
  misc_feature: MA Experiment 20000180 PARAMETER Experiment Name: At_Germinating_Seeds_P Parameter: Tissue Value: Germinating Seeds
  misc_feature: MA Experiment ID: 20000182 Result: Up-regulated in Transcription
  misc_feature: MA Experiment 20000182 PARAMETER Experiment Name: At_2mM_SA_P Parameter: Age (day) Value: 14
  misc_feature: MA Experiment 20000182 PARAMETER Experiment Name: At_2mM_SA_P Parameter: Organism Value: A. thaliana
  misc_feature: MA Experiment 20000182 PARAMETER Experiment Name: At_2mM_SA_P Parameter: Plant Line Value: WS
  misc_feature: MA Experiment 20000182 PARAMETER Experiment Name: At_2mM_SA_P Parameter: Timepoint (hr) Value: 6
  misc_feature: MA Experiment 20000182 PARAMETER Experiment Name: At_2mM_SA_P Parameter: Tissue Value: Aerial
  misc_feature: MA Experiment 20000182 PARAMETER Experiment Name: At_2mM_SA_P Parameter: Treatment Value: 2mM SA vs. No Treatment
  misc_feature: MA Experiment ID: 20000185 Result: Up-regulated in Transcription
  misc_feature: MA Experiment 20000185 PARAMETER Experiment Name: At_Roots__P Parameter: Age (day) Value: 7 vs. 21
  misc_feature: MA Experiment 20000185 PARAMETER Experiment Name: At_Roots__P Parameter: Organism Value: A. thaliana
  misc_feature: MA Experiment 20000185 PARAMETER Experiment Name: At_Roots__P Parameter: Tissue Value: Roots vs. Whole Plant
  misc_feature: MA Experiment ID: 20000268 Result: Up-regulated in Transcription
  misc_feature: MA Experiment 20000268 PARAMETER Experiment Name: At_100mM_NaCl__P Parameter: Age (day) Value: 14
  misc_feature: MA Experiment 20000268 PARAMETER Experiment Name: At_100mM_NaCl__P Parameter: Organism Value: A. thaliana
  misc_feature: MA Experiment 20000268 PARAMETER Experiment Name: At_100mM_NaCl__P Parameter: Plant Line Value: WS
  misc_feature: MA Experiment 20000268 PARAMETER Experiment Name: At_100mM_NaCl__P Parameter: Timepoint (hr) Value: 6
  misc_feature: MA Experiment 20000268 PARAMETER Experiment Name: At_100mM_NaCl__P Parameter: Tissue Value: Whole Plant
  misc_feature: MA Experiment 20000268 PARAMETER Experiment Name: At_100mM_NaCl__P Parameter: Treatment Value: 100mM NaCl vs. No Treatment
  misc_feature: MA Experiment ID: 20000436 Result: Up-regulated in Transcription
  misc_feature: MA Experiment 20000436 PARAMETER Experiment Name: At_Drought_P Parameter: Age (day) Value: 7
  misc_feature: MA Experiment 20000436 PARAMETER Experiment Name: At_Drought_P Parameter: Organism Value: A. thaliana
  misc_feature: MA Experiment 20000436 PARAMETER Experiment Name: At_Drought_P Parameter: Plant Line Value: WS
  misc_feature: MA Experiment 20000436 PARAMETER Experiment Name: At_Drought_P Parameter: Timepoint (hr) Value: 12
  misc_feature: MA Experiment 20000436 PARAMETER Experiment Name: At_Drought_P Parameter: Tissue Value: Whole Plant
  misc_feature: MA Experiment 20000436 PARAMETER Experiment Name: At_Drought_P Parameter: Treatment Value: Drought vs. No Drought
  misc_feature: MA Experiment ID: 20000439 Result: Up-regulated in Transcription
  misc_feature: MA Experiment 20000439 PARAMETER Experiment Name: At_Roots__P Parameter: Age (day) Value: 14 vs. 21
  misc_feature: MA Experiment 20000439 PARAMETER Experiment Name: At_Roots__P Parameter: Organism Value: A. thaliana
  misc_feature: MA Experiment 20000439 PARAMETER Experiment Name: At_Roots__P Parameter: Tissue Value: Roots vs. Whole Plant
  misc_feature: MA Experiment ID: 20000453 Result: Up-regulated in Transcription
  misc_feature: MA Experiment 20000453 PARAMETER Experiment Name: At_100uM_ABA_P Parameter: Age (day) Value: 15
  misc_feature: MA Experiment 20000453 PARAMETER Experiment Name: At_100uM_ABA_P Parameter: Organism Value: A. thaliana
  misc_feature: MA Experiment 20000453 PARAMETER Experiment Name: At_100uM_ABA_P Parameter: Plant Line Value: WS
  misc_feature: MA Experiment 20000453 PARAMETER Experiment Name: At_100uM_ABA_P Parameter: Timepoint (hr) Value: 24
  misc_feature: MA Experiment 20000453 PARAMETER Experiment Name: At_100uM_ABA_P Parameter: Tissue Value: Aerial
  misc_feature: MA Experiment 20000453 PARAMETER Experiment Name: At_100uM_ABA_P Parameter: Treatment Value: 100uM ABA vs. No Treatment
  misc_feature: MA Experiment ID: 20000455 Result: Up-regulated in Transcription
  misc_feature: MA Experiment 20000455 PARAMETER Experiment Name: At_100uM_ABA_P Parameter: Age (day) Value: 16
  misc_feature: MA Experiment 20000455 PARAMETER Experiment Name: At_100uM_ABA_P Parameter: Organism Value: A. thaliana
  misc_feature: MA Experiment 20000455 PARAMETER Experiment Name: At_100uM_ABA_P Parameter: Plant Line Value: WS
  misc_feature: MA Experiment 20000455 PARAMETER Experiment Name: At_100uM_ABA_P Parameter: Timepoint (hr) Value: 48
  misc_feature: MA Experiment 20000455 PARAMETER Experiment Name: At_100uM_ABA_P Parameter: Tissue Value: Aerial
  misc_feature: MA Experiment 20000455 PARAMETER Experiment Name: At_100uM_ABA_P Parameter: Treatment Value: 100uM ABA vs. No Treatment
  misc_feature: MA Experiment ID: 20000606 Result: Down-regulated in Transcription
  misc_feature: MA Experiment 20000606 PARAMETER Experiment Name: At_CS8548_Mutant_P Parameter: Age (day) Value: 14
  misc_feature: MA Experiment 20000606 PARAMETER Experiment Name: At_CS8548_Mutant_P Parameter: Plant Line Value: CS8548 vs. wt
  misc_feature: MA Experiment 20000606 PARAMETER Experiment Name: At_CS8548_Mutant_P Parameter: Tissue Value: Whole Plant
  misc_feature: MA Experiment ID: 20000709 Result: Up-regulated in Transcription
  misc_feature: MA Experiment 20000709 PARAMETER Experiment Name: At_15mM_NH4NO3_L-to-H_P Parameter: Age (hr) Value: 14
  misc_feature: MA Experiment 20000709 PARAMETER Experiment Name: At_15mM_NH4NO3_L-to-H_P Parameter: Organism Value: A. thaliana
  misc_feature: MA Experiment 20000709 PARAMETER Experiment Name: At_15mM_NH4NO3_L-to-H_P Parameter: Plant Line Value: WS
  misc_feature: MA Experiment 20000709 PARAMETER Experiment Name: At_15mM_NH4NO3_L-to-H_P Parameter: Timepoint (hr) Value: 4
  misc_feature: MA Experiment 20000709 PARAMETER Experiment Name: At_15mM_NH4NO3_L-to-H_P Parameter: Tissue Value: Aerial
  misc_feature: MA Experiment 20000709 PARAMETER Experiment Name: At_15mM_NH4NO3_L-to-H_P Parameter: Treatment Value: 15mM NH4NO3 vs. 30mM Mannitol
  misc_feature: MA Experiment ID: 20000794 Result: Up-regulated in Transcription
  misc_feature: MA Experiment 20000794 PARAMETER Experiment Name: At_Petals_P Parameter: Age (day) Value: 23-25 days
  misc_feature: MA Experiment 20000794 PARAMETER Experiment Name: At_Petals_P Parameter: Plant Line Value: WS
  misc_feature: MA Experiment 20000794 PARAMETER Experiment Name: At_Petals_P Parameter: Tissue Value: Petals vs. Whole plant
  misc_feature: MA Experiment ID: 20001553 Result: Up-regulated in Transcription
  misc_feature: MA Experiment 20001553 PARAMETER Experiment Name: At_Drought_Soil_Dry_P Parameter: Age (day) Value: 19
  misc_feature: MA Experiment 20001553 PARAMETER Experiment Name: At_Drought_Soil_Dry_P Parameter: Organism Value: A. thaliana
  misc_feature: MA Experiment 20001553 PARAMETER Experiment Name: At_Drought_Soil_Dry_P Parameter: Plant Line Value: WS
  misc_feature: MA Experiment 20001553 PARAMETER Experiment Name: At_Drought_Soil_Dry_P Parameter: Post Timepoint (hr) Value: None
  misc_feature: MA Experiment 20001553 PARAMETER Experiment Name: At_Drought_Soil_Dry_P Parameter: Post-Treatment Value: None
  misc_feature: MA Experiment 20001553 PARAMETER Experiment Name: At_Drought_Soil_Dry_P Parameter: Timepoint (day) Value: 5
  misc_feature: MA Experiment 20001553 PARAMETER Experiment Name: At_Drought_Soil_Dry_P Parameter: Treatment Value: Drought vs. No Drought
  misc_feature: MA Experiment ID: 20001554 Result: Up-regulated in Transcription
  misc_feature: MA Experiment 20001554 PARAMETER Experiment Name: At_Drought_Soil_Dry_P Parameter: Age (day) Value: 21
  misc_feature: MA Experiment 20001554 PARAMETER Experiment Name: At_Drought_Soil_Dry_P Parameter: Organism Value: A. thaliana
  misc_feature: MA Experiment 20001554 PARAMETER Experiment Name: At_Drought_Soil_Dry_P Parameter: Plant Line Value: WS
  misc_feature: MA Experiment 20001554 PARAMETER Experiment Name: At_Drought_Soil_Dry_P Parameter: Post Timepoint (hr) Value: None
  misc_feature: MA Experiment 20001554 PARAMETER Experiment Name: At_Drought_Soil_Dry_P Parameter: Post-Treatment Value: None
  misc_feature: MA Experiment 20001554 PARAMETER Experiment Name: At_Drought_Soil_Dry_P Parameter: Timepoint (day) Value: 7
  misc_feature: MA Experiment 20001554 PARAMETER Experiment Name: At_Drought_Soil_Dry_P Parameter: Treatment Value: Drought vs. No Drought
  misc_feature: MA Experiment ID: 20001555 Result: Up-regulated in Transcription
  misc_feature: MA Experiment 20001555 PARAMETER Experiment Name: At_Drought_Soil_Dry_P Parameter: Age (day) Value: 24
  misc_feature: MA Experiment 20001555 PARAMETER Experiment Name: At_Drought_Soil_Dry_P Parameter: Organism Value: A. thaliana
  misc_feature: MA Experiment 20001555 PARAMETER Experiment Name: At_Drought_Soil_Dry_P Parameter: Plant Line Value: WS
  misc_feature: MA Experiment 20001555 PARAMETER Experiment Name: At_Drought_Soil_Dry_P Parameter: Post Timepoint (hr) Value: None
  misc_feature: MA Experiment 20001555 PARAMETER Experiment Name: At_Drought_Soil_Dry_P Parameter: Post-Treatment Value: None
  misc_feature: MA Experiment 20001555 PARAMETER Experiment Name: At_Drought_Soil_Dry_P Parameter: Timepoint (day) Value: 10
  misc_feature: MA Experiment 20001555 PARAMETER Experiment Name: At_Drought_Soil_Dry_P Parameter: Treatment Value: Drought vs. No Drought
  misc_feature: MA Experiment ID: 20001904 Result: Up-regulated in Transcription
  misc_feature: MA Experiment 20001904 PARAMETER Experiment Name: At_Drought_Reproduction_P Parameter: Age (day) Value: 37
  misc_feature: MA Experiment 20001904 PARAMETER Experiment Name: At_Drought_Reproduction_P Parameter: Organism Value: A. thaliana
  misc_feature: MA Experiment 20001904 PARAMETER Experiment Name: At_Drought_Reproduction_P Parameter: Plant Line Value: WS
  misc_feature: MA Experiment 20001904 PARAMETER Experiment Name: At_Drought_Reproduction_P Parameter: Timepoint (day) Value: 7
  misc_feature: MA Experiment 20001904 PARAMETER Experiment Name: At_Drought_Reproduction_P Parameter: Tissue Value: Rosettes
  misc_feature: MA Experiment 20001904 PARAMETER Experiment Name: At_Drought_Reproduction_P Parameter: Treatment Value: Drought vs. No Drought
  misc_feature: MA Experiment ID: 20001905 Result: Up-regulated in Transcription
  misc_feature: MA Experiment 20001905 PARAMETER Experiment Name: At_Drought_Reproduction_P Parameter: Age (day) Value: 40
  misc_feature: MA Experiment 20001905 PARAMETER Experiment Name: At_Drought_Reproduction_P Parameter: Organism Value: A. thaliana
  misc_feature: MA Experiment 20001905 PARAMETER Experiment Name: At_Drought_Reproduction_P Parameter: Plant Line Value: WS
  misc_feature: MA Experiment 20001905 PARAMETER Experiment Name: At_Drought_Reproduction_P Parameter: Timepoint (day) Value: 10
  misc_feature: MA Experiment 20001905 PARAMETER Experiment Name: At_Drought_Reproduction_P Parameter: Tissue Value: Rosettes
  misc_feature: MA Experiment 20001905 PARAMETER Experiment Name: At_Drought_Reproduction_P Parameter: Treatment Value: Drought vs. No Drought
  misc_feature: MA Experiment ID: 20001911 Result: Up-regulated in Transcription
  misc_feature: MA Experiment 20001911 PARAMETER Experiment Name: At_Drought_Reproduction_P Parameter: Age (day) Value: 40
  misc_feature: MA Experiment 20001911 PARAMETER Experiment Name: At_Drought_Reproduction_P Parameter: Organism Value: A. thaliana
  misc_feature: MA Experiment 20001911 PARAMETER Experiment Name: At_Drought_Reproduction_P Parameter: Plant Line Value: WS
  misc_feature: MA Experiment 20001911 PARAMETER Experiment Name: At_Drought_Reproduction_P Parameter: Timepoint (day) Value: 10
  misc_feature: MA Experiment 20001911 PARAMETER Experiment Name: At_Drought_Reproduction_P Parameter: Tissue Value: Flowers
  misc_feature: MA Experiment 20001911 PARAMETER Experiment Name: At_Drought_Reproduction_P Parameter: Treatment Value: Drought vs. No Drought
atggctcgttaccacaggagatcgatgatcttgtgcttagttctgctctcattaagcatatcgccgagccaaggcttcctagggacagaggaaaagatcaaatccgctgtcttttactcaccaaaacttgtgatgaatccaggatcagttgcaaatccttacttattcgacatcgatttcccaagaggtcatatcggcctcaaagctttcgatgctgaagtggttgacgaagcgggcaaacccgttcctctacacgagacctatctccaccattggattgtcgagccatactatgtacgtaaaggttccaagcttccacagagagaaatgttcaggaatcatggattttccagggaagatcctgaaagcaatcttgattccaagtcagatattattcttgtgaaaaatggagggttgtgcaggagtttaacactcagacatttctttggtttaggatcagaaacccgcgaaacctcgacgtatgttcctgatccctacgctattgaaatcggtaatcctgaggaaacacctgatggttatgaattcaaatggcttcttaacattcacgcgatagacaccagaggtgtggaagataagaaaggatgcatagaatgtttgtgtgatctgtataatgttaccattgatgagtatggtcgagctataaggcctggatacaaaggaggtttatactgctgctatgataagactcaatgtcgggtgaaaagcggatttgacaatggggagaaaacaagaactctgtatttgaagtataccgtgagatgggttgattgggacagctcggttttgcccgctaaggtttatattttcgatgttacagattcttgggaaagatcaaaaggagatagccaagaacatatttgccatgtggaatacgaggtgaaaccgtgcaaaaccaatggcgatggatgcgttgacgttaagaaaaagagcttagtgatgccatttgatgggtatattgtctacggggtagctcaccagcacgctggtggtatcggtggtgctctataccgagagaacggtgaagggatatgcgcttcaatgccgaagtatggcaatggagatgaacctggaaacgaagctggttacattgttggaatgtcgtcttgttatccagctgatccagtgaaagtgagctatggagagacattgactttggaatctaattacagtaatgccgttggtcataccggagttatgggactcttttacatcctcgttgctcagcagctgccggaaccagatagctccttgcctaataaacaacattttgaggcacctgcgagaagcttgagctttttagccatttttgcagtgacggtagttgtggctgttgtggttttaatagccgccgtgatataccggagacagaaacgggaagatggttaccaatcacttagtacttaa

SEQ ID NO: 78475 - protein, 474 aa, Arabidopsis thaliana; identical to SEQ ID NO: 50126
  peptide (1)..(474): Ceres Seq. ID no. 12641683
  misc_feature (1)..(431): Homolog of NCBI NO: 10176875 NR Description: MtN19-like protein [Arabidopsis thaliana]
  misc_feature (1)..(474): Homolog of NCBI NO: 22328003 NR Description: putative protein; protein id: At5g61820.1, by cDNA: gi_17529155, supported by cDNA: gi_19698868 [Arabidopsis >gi|17529156|gb|AAL38804.1| unknown protein [Arabidopsis
  misc_feature (1)..(474): Homolog of NCBI NO: 19698869 NR Description: putative protein [Arabidopsis thaliana]
  misc_feature (132)..(424): Homolog of NCBI NO: 38175553 NR Description: putative MtN19 [Oryza sativa (japonica
  misc_feature (6)..(119): Homolog of NCBI NO: 38175553 NR Description: putative MtN19 [Oryza sativa (japonica
  misc_feature (102)..(418): Homolog of NCBI NO: 2598589 NR Description: MtN19 [Medicago truncatula]
  misc_feature (10)..(120): Homolog of NCBI NO: 2598589 NR Description: MtN19 [Medicago truncatula]

SEQ ID NO: 78476 - protein, 466 aa, Arabidopsis thaliana
  peptide (1)..(466): Ceres Seq. ID no. 12641684
  misc_feature (1)..(423): Homolog of NCBI NO: 10176875 NR Description: MtN19-like protein [Arabidopsis thaliana]
  misc_feature (1)..(466): Homolog of NCBI NO: 22328003 NR Description: putative protein; protein id: At5g61820.1, by cDNA: gi_17529155, supported by cDNA: gi_19698868 [Arabidopsis >gi|17529156|gb|AAL38804.1| unknown protein [Arabidopsis
  misc_feature (1)..(466): Homolog of NCBI NO: 19698869 NR Description: putative protein [Arabidopsis thaliana]
  misc_feature (124)..(416): Homolog of NCBI NO: 38175553 NR Description: putative MtN19 [Oryza sativa (japonica
  misc_feature (1)..(111): Homolog of NCBI NO: 38175553 NR Description: putative MtN19 [Oryza sativa (japonica
  misc_feature (94)..(410): Homolog of NCBI NO: 2598589 NR Description: MtN19 [Medicago truncatula]
  misc_feature (2)..(112): Homolog of NCBI NO: 2598589 NR Description: MtN19 [Medicago truncatula]
MILCLVLLSLSISPSQGFLGTEEKIKSAVFYSPKLVMNPGSVANPYLFDIDFPRGHIGLKAFDAEVVDEAGKPVPLHETYLHHWIVEPYYVRKGSKLPQREMFRNHGFSREDPESNLDSKSDIILVKNGGLCRSLTLRHFFGLGSETRETSTYVPDPYAIEIGNPEETPDGYEFKWLLNIHAIDTRGVEDKKGCIECLCDLYNVTIDEYGRAIRPGYKGGLYCCYDKTQCRVKSGFDNGEKTRTLYLKYTVRWVDWDSSVLPAKVYIFDVTDSWERSKGDSQEHICHVEYEVKPCKTNGDGCVDVKKKSLVMPFDGYIVYGVAHQHAGGIGGALYRENGEGICASMPKYGNGDEPGNEAGYIVGMSSCYPADPVKVSYGETLTLESNYSNAVGHTGVMGLFYILVAQQLPEPDSSLPNKQHFEAPARSLSFLAIFAVTVVVAVVVLIAAVIYRRQKREDGYQSLST

SEQ ID NO: 78477 - protein, 430 aa, Arabidopsis thaliana
  peptide (1)..(430): Ceres Seq. ID no. 12641685
  misc_feature (1)..(387): Homolog of NCBI NO: 10176875 NR Description: MtN19-like protein [Arabidopsis thaliana]
  misc_feature (1)..(430): Homolog of NCBI NO: 22328003 NR Description: putative protein; protein id: At5g61820.1, by cDNA: gi_17529155, supported by cDNA: gi_19698868 [Arabidopsis >gi|17529156|gb|AAL38804.1| unknown protein [Arabidopsis
  misc_feature (1)..(430): Homolog of NCBI NO: 19698869 NR Description: putative protein [Arabidopsis thaliana]
  misc_feature (88)..(380): Homolog of NCBI NO: 38175553 NR Description: putative MtN19 [Oryza sativa (japonica
  misc_feature (1)..(75): Homolog of NCBI NO: 38175553 NR Description: putative MtN19 [Oryza sativa (japonica
  misc_feature (58)..(374): Homolog of NCBI NO: 2598589 NR Description: MtN19 [Medicago truncatula]
  misc_feature (1)..(76): Homolog of NCBI NO: 2598589 NR Description: MtN19 [Medicago truncatula]
MNPGSVANPYLFDIDFPRGHIGLKAFDAEVVDEAGKPVPLHETYLHHWIVEPYYVRKGSKLPQREMFRNHGFSREDPESNLDSKSDIILVKNGGLCRSLTLRHFFGLGSETRETSTYVPDPYAIEIGNPEETPDGYEFKWLLNIHAIDTRGVEDKKGCIECLCDLYNVTIDEYGRAIRPGYKGGLYCCYDKTQCRVKSGFDNGEKTRTLYLKYTVRWVDWDSSVLPAKVYIFDVTDSWERSKGDSQEHICHVEYEVKPCKTNGDGCVDVKKKSLVMPFDGYIVYGVAHQHAGGIGGALYRENGEGICASMPKYGNGDEPGNEAGYIVGMSSCYPADPVKVSYGETLTLESNYSNAVGHTGVMGLFYILVAQQLPEPDSSLPNKQHFEAPARSLSFLAIFAVTVVVAVVVLIAAVIYRRQKREDGYQSLST

SEQ ID NO: 78478 - DNA, 1740 bp, Arabidopsis thaliana
  misc_feature (1)..(1740): Ceres Seq. ID no. 12641735
  misc_feature: MA Experiment ID: 20000235 Result: Up-regulated in Transcription
  misc_feature: MA Experiment 20000235 PARAMETER Experiment Name: At_Siliques_P Parameter: Age (day) Value: 21
  misc_feature: MA Experiment 20000235 PARAMETER Experiment Name: At_Siliques_P Parameter: Organism Value: A. thaliana
  misc_feature: MA Experiment 20000235 PARAMETER Experiment Name: At_Siliques_P Parameter: Plant Line Value: WS
  misc_feature: MA Experiment 20000235 PARAMETER Experiment Name: At_Siliques_P Parameter: Tissue Value: 5-10mm Siliques vs. Whole Plant
  misc_feature: MA Experiment ID: 20001450 Result: Up-regulated in Transcription
  misc_feature: MA Experiment 20001450 PARAMETER Experiment Name: At_Far-red-induction_P Parameter: Age (day) Value: 7
  misc_feature: MA Experiment 20001450 PARAMETER Experiment Name: At_Far-red-induction_P Parameter: Light Value: Far-red vs. White
  misc_feature: MA Experiment 20001450 PARAMETER Experiment Name: At_Far-red-induction_P Parameter: Organism Value: A. thaliana
  misc_feature: MA Experiment 20001450 PARAMETER Experiment Name: At_Far-red-induction_P Parameter: Plant Line Value: Columbia
  misc_feature: MA Experiment 20001450 PARAMETER Experiment Name: At_Far-red-induction_P Parameter: Timepoint (hr) Value: 8
  misc_feature: MA Experiment 20001450 PARAMETER Experiment Name: At_Far-red-induction_P Parameter: Tissue Value: Whole Plant
atgatatcttgttcagaagaaggtagtaacaagatccttgtggcgatctcgttggaccgtgacgagagccaaaatgttctatcttgggccatcaatgttcttgctaaaccaagtgacaccgttgtggctcttcatcttcttgttggtgaagaaccgagaaaattgccaatgaagaagaagaagagaactcagattcgacatgccaaagctcatgttatctccatgcttggagagttcgcttacacttgctgccacaaccaggtgaatttggaagccaaggtagggtttagctcaaacattggaagaggactaatcgatgaagtcaaatccatttctgctcattatcttgttctttctcgaccaacaacccacgagtttaggatatggaatgacatcaaaagatatgtctccgactttgctccatcaagttgctctgttgttttagtcggaaaccaaagaaaaccgcataaagattgttactctgactccgcgatttctctagacataaatagtgagaagtattcaccacgtagtgtactaaacactttatcaagagattcacttagctcttcaggcgatgatgcttcaagcttcaatggttcaatggtctcttctagcttcgcttcgccttcagacaaaccgaagcataagtcaatctctccttacaaattcatatcttctcttatcatgaattctcctctgaggaaatggagaggaagtgagactaagaacaagcccaaacctcagcctctaattcaatgcttcacttacaacgagatttcaaaggccacaaatgattttcaccaagggaatatagtaggcataggaggctactctgaagtgtacagaggagatttatgggatggaagaagaatagcagtgaagagattagccaaggagagtggtgacatgaacaaggagaaagagtttcttacggaacttggcatcataagtcatgtctctcatcccaacactgctcttctcttaggttgttgtgttgagaaaggtctttatcttgtcttcagattctccgagaatggaaccttgtactctgcgctgcacgagaatgagaatgggtcgttagattggcctgtacggtacaaaattgcggttggagttgctcgagggcttcattatcttcacaaacgctgcaaccaccggatcattcaccgcgacattaaatcttccaatgttttacttggacctgattacgaaccgcagataactgattttggattggccaaatggttgcctaacaaatggactcaccatgcggttataccggttgaaggaacgtttggttatctagctccagagtccttaatgcaaggaaccatcgacgagaaaaccgacatctacgcattcggcattctccttctagagatcataactggtcgaagaccggttaatcccactcagaaacacattctcttatgggcaaagccggcgatggagacaggtaacacaagtgagttggttgatccgaaattgcaagataagtacgacgaccaacagatgaacaagctagtccttacagcttcacattgtgttcaacaatctccgatattacgaccaaccatgactcaggtattggagttgcttacaaatgggaacgaggctgagattgcaaagagctggagaatgcctaaggatatgactaatgacgatgatgataataatgaatgggatgattattctatgattttcggatatgatgttccttcagattcttctttttaa

SEQ ID NO: 78479 - protein, 579 aa, Arabidopsis thaliana
  peptide (1)..(579): Ceres Seq. ID no. 12641736
  misc_feature (8)..(113): Pfam Name: Universal stress protein family Pfam Description: Universal stress protein family
  misc_feature (167)..(579): Homolog of NCBI NO: 15242821 NR Description: putative protein; protein id: At5g57670.1 thaliana] >gi|9759263|dbj|BAB09584.1| contains similarity to
  misc_feature (239)..(558): Homolog of NCBI NO: 40253745 NR Description: SERK1 protein-like [Oryza sativa (japonica
  misc_feature (10)..(193): Homolog of NCBI NO: 40253745 NR Description: SERK1 protein-like [Oryza sativa (japonica
  misc_feature (249)..(551): Homolog of NCBI NO: 15224251 NR Description: putative protein kinase; protein id: At2g18890.1
  misc_feature (246)..(530): Homolog of NCBI NO: 38343967 NR Description: OSJNBb0022F16.6 [Oryza sativa (japonica
  misc_feature (249)..(544): Homolog of NCBI NO: 30687061 NR Description: protein kinase family [Arabidopsis thaliana] putative protein kinase [Arabidopsis thaliana]
  misc_feature (249)..(539): Homolog of NCBI NO: 22330852 NR Description: putative serine/threonine protein kinase; protein At3g05140.1, supported by cDNA: gi_19698986 [Arabidopsis >gi|19698987|gb|AAL91229.1| putative serine/threonine protein
  misc_feature (249)..(539): Homolog of NCBI NO: 26452369 NR Description: unknown protein [Arabidopsis thaliana]
  misc_feature (249)..(539): Homolog of NCBI NO: 30698132 NR Description: protein kinase, putative [Arabidopsis thaliana]
  misc_feature (255)..(538): Homolog of NCBI NO: 15239245 NR Description: serine/threonine protein kinase-like; protein id: [Arabidopsis thaliana] >gi|9758799|dbj|BAB09252.1|
MISCSEEGSNKILVAISLDRDESQNVLSWAINVLAKPSDTVVALHLLVGEEPRKLPMKKKKRTQIRHAKAHVISMLGEFAYTCCHNQVNLEAKVGFSSNIGRGLIDEVKSISAHYLVLSRPTTHEFRIWNDIKRYVSDFAPSSCSVVLVGNQRKPHKDCYSDSAISLDINSEKYSPRSVLNTLSRDSLSSSGDDASSFNGSMVSSSFASPSDKPKHKSISPYKFISSLIMNSPLRKWRGSETKNKPKPQPLIQCFTYNEISKATNDFHQGNIVGIGGYSEVYRGDLWDGRRIAVKRLAKESGDMNKEKEFLTELGIISHVSHPNTALLLGCCVEKGLYLVFRFSENGTLYSALHENENGSLDWPVRYKIAVGVARGLHYLHKRCNHRIIHRDIKSSNVLLGPDYEPQITDFGLAKWLPNKWTHHAVIPVEGTFGYLAPESLMQGTIDEKTDIYAFGILLLEIITGRRPVNPTQKHILLWAKPAMETGNTSELVDPKLQDKYDDQQMNKLVLTASHCVQQSPILRPTMTQVLELLTNGNEAEIAKSWRMPKDMTNDDDDNNEWDDYSMIFGYDVPSDSSF

SEQ ID NO: 78480 - protein, 523 aa, Arabidopsis thaliana
  peptide (1)..(523): Ceres Seq. ID no. 12641737
  misc_feature (1)..(57): Pfam Name: Universal stress protein family Pfam Description: Universal stress protein family
  misc_feature (111)..(523): Homolog of NCBI NO: 15242821 NR Description: putative protein; protein id: At5g57670.1 thaliana] >gi|9759263|dbj|BAB09584.1| contains similarity to
  misc_feature (183)..(502): Homolog of NCBI NO: 40253745 NR Description: SERK1 protein-like [Oryza sativa (japonica
  misc_feature (1)..(137): Homolog of NCBI NO: 40253745 NR Description: SERK1 protein-like [Oryza sativa (japonica
  misc_feature (193)..(495): Homolog of NCBI NO: 15224251 NR Description: putative protein kinase; protein id: At2g18890.1
  misc_feature (190)..(474): Homolog of NCBI NO: 38343967 NR Description: OSJNBb0022F16.6 [Oryza sativa (japonica
  misc_feature (193)..(488): Homolog of NCBI NO: 30687061 NR Description: protein kinase family [Arabidopsis thaliana] putative protein kinase [Arabidopsis thaliana]
  misc_feature (193)..(483): Homolog of NCBI NO: 22330852 NR Description: putative serine/threonine protein kinase; protein At3g05140.1, supported by cDNA: gi_19698986 [Arabidopsis >gi|19698987|gb|AAL91229.1| putative serine/threonine protein
  misc_feature (193)..(483): Homolog of NCBI NO: 26452369 NR Description: unknown protein [Arabidopsis thaliana]
  misc_feature (193)..(483): Homolog of NCBI NO: 30698132 NR Description: protein kinase, putative [Arabidopsis thaliana]
  misc_feature (199)..(482): Homolog of NCBI NO: 15239245 NR Description: serine/threonine protein kinase-like; protein id: [Arabidopsis thaliana] >gi|9758799|dbj|BAB09252.1|
MKKKKRTQIRHAKAHVISMLGEFAYTCCHNQVNLEAKVGFSSNIGRGLIDEVKSISAHYLVLSRPTTHEFRIWNDIKRYVSDFAPSSCSVVLVGNQRKPHKDCYSDSAISLDINSEKYSPRSVLNTLSRDSLSSSGDDASSFNGSMVSSSFASPSDKPKHKSISPYKFISSLIMNSPLRKWRGSETKNKPKPQPLIQCFTYNEISKATNDFHQGNIVGIGGYSEVYRGDLWDGRRIAVKRLAKESGDMNKEKEFLTELGIISHVSHPNTALLLGCCVEKGLYLVFRFSENGTLYSALHENENGSLDWPVRYKIAVGVARGLHYLHKRCNHRIIHRDIKSSNVLLGPDYEPQITDFGLAKWLPNKWTHHAVIPVEGTFGYLAPESLMQGTIDEKTDIYAFGILLLEIITGRRPVNPTQKHILLWAKPAMETGNTSELVDPKLQDKYDDQQMNKLVLTASHCVQQSPILRPTMTQVLELLTNGNEAEIAKSWRMPKDMTNDDDDNNEWDDYSMIFGYDVPSDSSF

SEQ ID NO: 78481 - protein, 505 aa, Arabidopsis thaliana
  peptide (1)..(505): Ceres Seq. ID no. 12641738
  misc_feature (93)..(505): Homolog of NCBI NO: 15242821 NR Description: putative protein; protein id: At5g57670.1 thaliana] >gi|9759263|dbj|BAB09584.1| contains similarity to
  misc_feature (165)..(484): Homolog of NCBI NO: 40253745 NR Description: SERK1 protein-like [Oryza sativa (japonica
  misc_feature (1)..(119): Homolog of NCBI NO: 40253745 NR Description: SERK1 protein-like [Oryza sativa (japonica
  misc_feature (175)..(477): Homolog of NCBI NO: 15224251 NR Description: putative protein kinase; protein id: At2g18890.1
  misc_feature (172)..(456): Homolog of NCBI NO: 38343967 NR Description: OSJNBb0022F16.6 [Oryza sativa (japonica
  misc_feature (175)..(470): Homolog of NCBI NO: 30687061 NR Description: protein kinase family [Arabidopsis thaliana] putative protein kinase [Arabidopsis thaliana]
  misc_feature (175)..(465): Homolog of NCBI NO: 22330852 NR Description: putative serine/threonine protein kinase; protein At3g05140.1, supported by cDNA: gi_19698986 [Arabidopsis >gi|19698987|gb|AAL91229.1| putative serine/threonine protein
  misc_feature (175)..(465): Homolog of NCBI NO: 26452369 NR Description: unknown protein [Arabidopsis thaliana]
  misc_feature (175)..(465): Homolog of NCBI NO: 30698132 NR Description: protein kinase, putative [Arabidopsis thaliana]
  misc_feature (181)..(464): Homolog of NCBI NO: 15239245 NR Description: serine/threonine protein kinase-like; protein id: [Arabidopsis thaliana] >gi|9758799|dbj|BAB09252.1|
MLGEFAYTCCHNQVNLEAKVGFSSNIGRGLIDEVKSISAHYLVLSRPTTHEFRIWNDIKRYVSDFAPSSCSVVLVGNQRKPHKDCYSDSAISLDINSEKYSPRSVLNTLSRDSLSSSGDDASSFNGSMVSSSFASPSDKPKHKSISPYKFISSLIMNSPLRKWRGSETKNKPKPQPLIQCFTYNEISKATNDFHQGNIVGIGGYSEVYRGDLWDGRRIAVKRLAKESGDMNKEKEFLTELGIISHVSHPNTALLLGCCVEKGLYLVFRFSENGTLYSALHENENGSLDWPVRYKIAVGVARGLHYLHKRCNHRIIHRDIKSSNVLLGPDYEPQITDFGLAKWLPNKWTHHAVIPVEGTFGYLAPESLMQGTIDEKTDIYAFGILLLEIITGRRPVNPTQKHILLWAKPAMETGNTSELVDPKLQDKYDDQQMNKLVLTASHCVQQSPILRPTMTQVLELLTNGNEAEIAKSWRMPKDMTNDDDDNNEWDDYSMIFGYDVPSDSSF

SEQ ID NO: 78482 - DNA, 737 bp, Arabidopsis thaliana
  misc_feature (1)..(737): Ceres Seq. ID no. 12641905
  misc_feature: MA Experiment ID: 108607 Result: Up-regulated in Transcription
  misc_feature: MA Experiment 108607 PARAMETER Experiment Name: At_100uM_ABA_cDNA_P Parameter: Timepoint (hr) Value: 4
  misc_feature: MA Experiment 108607 PARAMETER Experiment Name: At_100uM_ABA_cDNA_P Parameter: Tissue Value: Aerial
  misc_feature: MA Experiment 108607 PARAMETER Experiment Name: At_100uM_ABA_cDNA_P Parameter: Treatment Value: 100uM ABA vs. No Treatment
  misc_feature: MA Experiment ID: 20000069 Result: Up-regulated in Transcription
  misc_feature: MA Experiment 20000069 PARAMETER Experiment Name: At_100uM_ABA_Mutants_cDNA_P Parameter: Plant Line Value: CS23
  misc_feature: MA Experiment 20000069 PARAMETER Experiment Name: At_100uM_ABA_Mutants_cDNA_P Parameter: Timepoint (hr) Value: 6
  misc_feature: MA Experiment 20000069 PARAMETER Experiment Name: At_100uM_ABA_Mutants_cDNA_P Parameter: Tissue Value: Aerial
  misc_feature: MA Experiment 20000069 PARAMETER Experiment Name: At_100uM_ABA_Mutants_cDNA_P Parameter: Treatment Value: 100uM ABA vs. No Treatment
  misc_feature: MA Experiment ID: 20000070 Result: Up-regulated in Transcription
  misc_feature: MA Experiment 20000070 PARAMETER Experiment Name: At_100uM_ABA_Mutants_cDNA_P Parameter: Plant Line Value: CS24
  misc_feature: MA Experiment 20000070 PARAMETER Experiment Name: At_100uM_ABA_Mutants_cDNA_P Parameter: Timepoint (hr) Value: 6
  misc_feature: MA Experiment 20000070 PARAMETER Experiment Name: At_100uM_ABA_Mutants_cDNA_P Parameter: Tissue Value: Aerial
  misc_feature: MA Experiment 20000070 PARAMETER Experiment Name: At_100uM_ABA_Mutants_cDNA_P Parameter: Treatment Value: 100uM ABA vs. No Treatment
  misc_feature: MA Experiment ID: 20000086 Result: Up-regulated in Transcription
  misc_feature: MA Experiment 20000086 PARAMETER Experiment Name: At_100uM_ABA_Mutants_cDNA_P Parameter: Plant Line Value: CS22
  misc_feature: MA Experiment 20000086 PARAMETER Experiment Name: At_100uM_ABA_Mutants_cDNA_P Parameter: Timepoint (hr) Value: 6
  misc_feature: MA Experiment 20000086 PARAMETER Experiment Name: At_100uM_ABA_Mutants_cDNA_P Parameter: Tissue Value: Aerial
  misc_feature: MA Experiment 20000086 PARAMETER Experiment Name: At_100uM_ABA_Mutants_cDNA_P Parameter: Treatment Value: 100uM ABA vs. No Treatment
  misc_feature: MA Experiment ID: 20000179 Result: Up-regulated in Transcription
  misc_feature: MA Experiment 20000179 PARAMETER Experiment Name: At_Germinating_Seeds_P Parameter: Age (hr) Value: 6 vs. 0
  misc_feature: MA Experiment 20000179 PARAMETER Experiment Name: At_Germinating_Seeds_P Parameter: Tissue Value: Germinating Seeds
  misc_feature: MA Experiment ID: 20000180 Result: Up-regulated in Transcription
  misc_feature: MA Experiment 20000180 PARAMETER Experiment Name: At_Germinating_Seeds_P Parameter: Age (hr) Value: 24 vs. 0
  misc_feature: MA Experiment 20000180 PARAMETER Experiment Name: At_Germinating_Seeds_P Parameter: Tissue Value: Germinating Seeds
  misc_feature: MA Experiment ID: 20000185 Result: Up-regulated in Transcription
  misc_feature: MA Experiment 20000185 PARAMETER Experiment Name: At_Roots__P Parameter: Age (day) Value: 7 vs. 21
  misc_feature: MA Experiment 20000185 PARAMETER Experiment Name: At_Roots__P Parameter: Organism Value: A. thaliana
  misc_feature: MA Experiment 20000185 PARAMETER Experiment Name: At_Roots__P Parameter: Tissue Value: Roots vs. Whole Plant
  misc_feature: MA Experiment ID: 20000437 Result: Down-regulated in Transcription
  misc_feature: MA Experiment 20000437 PARAMETER Experiment Name: At_Drought_P Parameter: Age (day) Value: 8
  misc_feature: MA Experiment 20000437 PARAMETER Experiment Name: At_Drought_P Parameter: Organism Value: A. thaliana
  misc_feature: MA Experiment 20000437 PARAMETER Experiment Name: At_Drought_P Parameter: Plant Line Value: WS
  misc_feature: MA Experiment 20000437 PARAMETER Experiment Name: At_Drought_P Parameter: Timepoint (hr) Value: 24
  misc_feature: MA Experiment 20000437 PARAMETER Experiment Name: At_Drought_P Parameter: Tissue Value: Whole Plant
  misc_feature: MA Experiment 20000437 PARAMETER Experiment Name: At_Drought_P Parameter: Treatment Value: Drought vs. No Drought
  misc_feature: MA Experiment ID: 20001554 Result: Down-regulated in Transcription
  misc_feature: MA Experiment 20001554 PARAMETER Experiment Name: At_Drought_Soil_Dry_P Parameter: Age (day) Value: 21
  misc_feature: MA Experiment 20001554 PARAMETER Experiment Name: At_Drought_Soil_Dry_P Parameter: Organism Value: A. thaliana
  misc_feature: MA Experiment 20001554 PARAMETER Experiment Name: At_Drought_Soil_Dry_P Parameter: Plant Line Value: WS
  misc_feature: MA Experiment 20001554 PARAMETER Experiment Name: At_Drought_Soil_Dry_P Parameter: Post Timepoint (hr) Value: None
  misc_feature: MA Experiment 20001554 PARAMETER Experiment Name: At_Drought_Soil_Dry_P Parameter: Post-Treatment Value: None
  misc_feature: MA Experiment 20001554 PARAMETER Experiment Name: At_Drought_Soil_Dry_P Parameter: Timepoint (day) Value: 7
  misc_feature: MA Experiment 20001554 PARAMETER Experiment Name: At_Drought_Soil_Dry_P Parameter: Treatment Value: Drought vs. No Drought
  misc_feature: MA Experiment ID: 20001555 Result: Down-regulated in Transcription
  misc_feature: MA Experiment 20001555 PARAMETER Experiment Name: At_Drought_Soil_Dry_P Parameter: Age (day) Value: 24
  misc_feature: MA Experiment 20001555 PARAMETER Experiment Name: At_Drought_Soil_Dry_P Parameter: Organism Value: A. thaliana
  misc_feature: MA Experiment 20001555 PARAMETER Experiment Name: At_Drought_Soil_Dry_P Parameter: Plant Line Value: WS
  misc_feature: MA Experiment 20001555 PARAMETER Experiment Name: At_Drought_Soil_Dry_P Parameter: Post Timepoint (hr) Value: None
  misc_feature: MA Experiment 20001555 PARAMETER Experiment Name: At_Drought_Soil_Dry_P Parameter: Post-Treatment Value: None
  misc_feature: MA Experiment 20001555 PARAMETER Experiment Name: At_Drought_Soil_Dry_P Parameter: Timepoint (day) Value: 10
  misc_feature: MA Experiment 20001555 PARAMETER Experiment Name: At_Drought_Soil_Dry_P Parameter: Treatment Value: Drought vs. No Drought
  misc_feature: MA Experiment ID: 20001556 Result: Down-regulated in Transcription
  misc_feature: MA Experiment 20001556 PARAMETER Experiment Name: At_Drought_Soil_Dry_P Parameter: Age (day) Value: 26
  misc_feature: MA Experiment 20001556 PARAMETER Experiment Name: At_Drought_Soil_Dry_P Parameter: Organism Value: A. thaliana
  misc_feature: MA Experiment 20001556 PARAMETER Experiment Name: At_Drought_Soil_Dry_P Parameter: Plant Line Value: WS
  misc_feature: MA Experiment 20001556 PARAMETER Experiment Name: At_Drought_Soil_Dry_P Parameter: Post Timepoint (hr) Value: None
  misc_feature: MA Experiment 20001556 PARAMETER Experiment Name: At_Drought_Soil_Dry_P Parameter: Post-Treatment Value: None
  misc_feature: MA Experiment 20001556 PARAMETER Experiment Name: At_Drought_Soil_Dry_P Parameter: Timepoint (day) Value: 12
  misc_feature: MA Experiment 20001556 PARAMETER Experiment Name: At_Drought_Soil_Dry_P Parameter: Treatment Value: Drought vs. No Drought
  misc_feature: MA Experiment ID: 20001560 Result: Up-regulated in Transcription
  misc_feature: MA Experiment 20001560 PARAMETER Experiment Name: At_Drought_Soil_Dry_P Parameter: Age (day) Value: 28
  misc_feature: MA Experiment 20001560 PARAMETER Experiment Name: At_Drought_Soil_Dry_P Parameter: Organism Value: A. thaliana
  misc_feature: MA Experiment 20001560 PARAMETER Experiment Name: At_Drought_Soil_Dry_P Parameter: Plant Line Value: WS
  misc_feature: MA Experiment 20001560 PARAMETER Experiment Name: At_Drought_Soil_Dry_P Parameter: Post Timepoint (hr) Value: None
  misc_feature: MA Experiment 20001560 PARAMETER Experiment Name: At_Drought_Soil_Dry_P Parameter: Post-Treatment Value: None
  misc_feature: MA Experiment 20001560 PARAMETER Experiment Name: At_Drought_Soil_Dry_P Parameter: Timepoint (day) Value: 14
  misc_feature: MA Experiment 20001560 PARAMETER Experiment Name: At_Drought_Soil_Dry_P Parameter: Treatment Value: Drought vs. No Drought
  misc_feature: MA Experiment ID: 20001905 Result: Down-regulated in Transcription
  misc_feature: MA Experiment 20001905 PARAMETER Experiment Name: At_Drought_Reproduction_P Parameter: Age (day) Value: 40
  misc_feature: MA Experiment 20001905 PARAMETER Experiment Name: At_Drought_Reproduction_P Parameter: Organism Value: A. thaliana
  misc_feature: MA Experiment 20001905 PARAMETER Experiment Name: At_Drought_Reproduction_P Parameter: Plant Line Value: WS
  misc_feature: MA Experiment 20001905 PARAMETER Experiment Name: At_Drought_Reproduction_P Parameter: Timepoint (day) Value: 10
  misc_feature: MA Experiment 20001905 PARAMETER Experiment Name: At_Drought_Reproduction_P Parameter: Tissue Value: Rosettes
  misc_feature: MA Experiment 20001905 PARAMETER Experiment Name: At_Drought_Reproduction_P Parameter: Treatment Value: Drought vs. No Drought
aacgacagattaaagcagagagaaaaacaaaatccattgaagaaggagaagaagaaaaaaaatgggagcattttgcaagttgatcgatgcggttctcttcttatactttgctctcatggcggtaattgcgccgcttatcgacggtcaaacgagtcttcccggcgatatcttcccggcgtttatcgtcgatctgaatcgctggtacattgatgaatttggagattatctagtcaaagagaagccgcatttcctagtcggactcgtctggcatgagcttttgcttctttggccgctctcaatcgtcaacgtctacgcaattctcgctgggaaatcgtggtttggtaccacctcaatggtgtacggagcttccgtcgtgacttctatggctgctatactgggagagatgataggatcagggaaggcatctgagaaattgttgatgatgtatgtgccattcatgggtgttggtattctagctcttcttcgtggtcttctttctcaatccaacaaaagtggtggagctgttggcaagagacctgctattttggccaggagaaagcgtgcttgaggtacacttgatgatcagcaagtgtatcttttgactctgagaatttctgctataggtggatttggcttttcaaacagaaaattttgaacctttgtgatgtattcttcctgtttttttagcaatatcatgtcatctgtgttcttgtttgaaattaaatgaagttaaactg

SEQ ID NO: 78483 - protein, 168 aa, Arabidopsis thaliana; identical to SEQ ID NO: 28325
  peptide (1)..(168): Ceres Seq. ID no. 12641906
  misc_feature (1)..(168): Homolog of NCBI NO: 18402955 NR Description: expressed protein; protein id: At2g32380.1, by cDNA: 9671. [Arabidopsis thaliana] >gi|25372728|pir||D84732
  misc_feature (1)..(168): Homolog of NCBI NO: 18390494 NR Description: expressed protein; protein id: At1g05210.1, by cDNA: 29808. [Arabidopsis thaliana] >gi|25372732|pir||E86186
  misc_feature (1)..(168): Homolog of NCBI NO: 15220447 NR Description: hypothetical protein; protein id: At1g05220.1
  misc_feature (1)..(168): Homolog of NCBI NO: 28411944 NR Description: OSJNBa0027N13.37 [Oryza sativa (japonica
  misc_feature (1)..(167): Homolog of NCBI NO: 28411943 NR Description: OSJNBa0027N13.35 [Oryza sativa (japonica
  misc_feature (2)..(116): Homolog of NCBI NO: 2135212 NR Description: gene MAC30 protein - human (fragment)
  misc_feature (1)..(112): Homolog of NCBI NO: 19526880 NR Description: RIKEN cDNA 1810014L12 [Mus musculus]
  misc_feature (1)..(112): Homolog of NCBI NO: 27688749 NR Description: similar to RIKEN cDNA 1810014L12 [Mus musculus] norvegicus] >gi|27688753|ref|XP_220742.1| similar to RIKEN cDNA

SEQ ID NO: 78484 - protein, 150 aa, Arabidopsis thaliana; identical to SEQ ID NO: 28326
  peptide (1)..(150): Ceres Seq. ID no. 12641907
  misc_feature (1)..(150): Homolog of NCBI NO: 18402955 NR Description: expressed protein; protein id: At2g32380.1, by cDNA: 9671. [Arabidopsis thaliana] >gi|25372728|pir||D84732
  misc_feature (1)..(150): Homolog of NCBI NO: 18390494 NR Description: expressed protein; protein id: At1g05210.1, by cDNA: 29808. [Arabidopsis thaliana] >gi|25372732|pir||E86186
  misc_feature (1)..(150): Homolog of NCBI NO: 15220447 NR Description: hypothetical protein; protein id: At1g05220.1
  misc_feature (1)..(150): Homolog of NCBI NO: 28411944 NR Description: OSJNBa0027N13.37 [Oryza sativa (japonica
  misc_feature (1)..(149): Homolog of NCBI NO: 28411943 NR Description: OSJNBa0027N13.35 [Oryza sativa (japonica
  misc_feature (1)..(98): Homolog of NCBI NO: 2135212 NR Description: gene MAC30 protein - human (fragment)
  misc_feature (1)..(94): Homolog of NCBI NO: 19526880 NR Description: RIKEN cDNA 1810014L12 [Mus musculus]
  misc_feature (1)..(94): Homolog of NCBI NO: 27688749 NR Description: similar to RIKEN cDNA 1810014L12 [Mus musculus] norvegicus] >gi|27688753|ref|XP_220742.1| similar to RIKEN cDNA

SEQ ID NO: 78485 - DNA, 966 bp, Arabidopsis thaliana
  misc_feature (1)..(966): Ceres Seq. ID no. 12641916
  misc_feature: MA Experiment ID: 20000264 Result: Up-regulated in Transcription
  misc_feature: MA Experiment 20000264 PARAMETER Experiment Name: At_Open_Flower_P Parameter: Age (day) Value: 21
  misc_feature: MA Experiment 20000264 PARAMETER Experiment Name: At_Open_Flower_P Parameter: Plant Line Value: WS
  misc_feature: MA Experiment 20000264 PARAMETER Experiment Name: At_Open_Flower_P Parameter: Tissue Value: Open Flower vs. Whole Plant
  misc_feature: MA Experiment ID: 20000794 Result: Up-regulated in Transcription
  misc_feature: MA Experiment 20000794 PARAMETER Experiment Name: At_Petals_P Parameter: Age (day) Value: 23-25 days
  misc_feature: MA Experiment 20000794 PARAMETER Experiment Name: At_Petals_P Parameter: Plant Line Value: WS
  misc_feature: MA Experiment 20000794 PARAMETER Experiment Name: At_Petals_P Parameter: Tissue Value: Petals vs. Whole plant
  misc_feature: MA Experiment ID: 20001910 Result: Up-regulated in Transcription
  misc_feature: MA Experiment 20001910 PARAMETER Experiment Name: At_Drought_Reproduction_P Parameter: Age (day) Value: 37
  misc_feature: MA Experiment 20001910 PARAMETER Experiment Name: At_Drought_Reproduction_P Parameter: Organism Value: A. thaliana
  misc_feature: MA Experiment 20001910 PARAMETER Experiment Name: At_Drought_Reproduction_P Parameter: Plant Line Value: WS
  misc_feature: MA Experiment 20001910 PARAMETER Experiment Name: At_Drought_Reproduction_P Parameter: Timepoint (day) Value: 7
  misc_feature: MA Experiment 20001910 PARAMETER Experiment Name: At_Drought_Reproduction_P Parameter: Tissue Value: Flowers
  misc_feature: MA Experiment 20001910 PARAMETER Experiment Name: At_Drought_Reproduction_P Parameter: Treatment Value: Drought vs. No Drought
atggatggtggtggagagacgacggcgacggctacgatggaggggagagggttgaagaaagggccgtggacaacgacggaggatgcgatcttgacggagtacgtgagaaaacacggtgaaggtaattggaacgccgtgcaaaagaactcaggtttgctccggtgtggcaaaagttgccgtctacggtgggcgaatcatctccggccaaatctaaagaaaggatcttttactcctgatgaagaaaagatcatcatcgaccttcacgctaagcttggaaacaaatgggctcgtatggcttctcagttacctggaagaacagacaatgagatcaagaactattggaacacgaggatgaagagaagacaaagagctggtttgcctttataccctcatgagattcaacatcaagggattgatattgatgatgattctagtcctattattgacaatggtgtccatcttgagccaccttctggcaatagtggactacttgatgccctcttggaggagtctcaagccttgtctcgaggcggactcttcaaggacgttagggtttcctccagtgacctatgtgaggttcaagataaaagggtgaagatggactttgagaatcttttaatagatcatctaaactcttctaatcattcatcattgggagcaaaccctaatattcacaacaagtacaatgagccaacaatggtaaaagtaacggtggatgatgatgatgaattattgacgagccttctcaacaacttcccttcaaccacaacacctttgcctgattggtatcgggtgacagaaatgcaaaacgaggcctcatatcttgccccaccaagtggaattcttatgggaaaccatcaaggtaacggcagggtggaaccacccacggtgccgccttcgtccagtgtagatcctatggcctcgttggggtcatgctattggagcaacatgcctagcatctgttag

SEQ ID NO: 78486 - protein, 321 aa, Arabidopsis thaliana
  peptide (1)..(321): Ceres Seq. ID no. 12641917
  misc_feature (20)..(67): Pfam Name: Myb-like DNA-binding domain Pfam Description: Myb-like DNA-binding domain
  misc_feature (144)..(321): Homolog of NCBI NO: 15225687 NR Description: putative MYB family transcription factor; protein At2g32460.1, supported by cDNA: gi_18087348 [Arabidopsis >gi|7438357|pir||T02545 probable MYB family transcription factor
  misc_feature (1)..(143): Homolog of NCBI NO: 15225687 NR Description: putative MYB family transcription factor; protein At2g32460.1, supported by cDNA: gi_18087348 [Arabidopsis >gi|7438357|pir||T02545 probable MYB family transcription factor
  misc_feature (144)..(321): Homolog of NCBI NO: 18087349 NR Description: putative transcription factor MYB101 [Arabidopsis
  misc_feature (1)..(143): Homolog of NCBI NO: 18087349 NR Description: putative transcription factor MYB101 [Arabidopsis
  misc_feature (1)..(136): Homolog of NCBI NO: 282965 NR Description: myb-related protein 3 - garden petunia
  misc_feature (2)..(258): Homolog of NCBI NO: 11066263 NR Description: anther-specific myb-related protein 2 [Nicotiana
  misc_feature (2)..(187): Homolog of NCBI NO: 4877649 NR Description: gibberellin MYB transcription factor [Lolium
  misc_feature (2)..(136): Homolog of NCBI NO: 11066265 NR Description: anther-specific myb-related protein 1 [Nicotiana
  misc_feature (15)..(187): Homolog of NCBI NO: 7438355 NR Description: myb-related protein - barley
  misc_feature (15)..(187): Homolog of NCBI NO: 13236696 NR Description: transcription factor GAMyb [Hordeum vulgare]
MDGGGETTATATMEGRGLKKGPWTTTEDAILTEYVRKHGEGNWNAVQKNSGLLRCGKSCRLRWANHLRPNLKKGSFTPDEEKIIIDLHAKLGNKWARMASQLPGRTDNEIKNYWNTRMKRRQRAGLPLYPHEIQHQGIDIDDDSSPIIDNGVHLEPPSGNSGLLDALLEESQALSRGGLFKDVRVSSSDLCEVQDKRVKMDFENLLIDHLNSSNHSSLGANPNIHNKYNEPTMVKVTVDDDDELLTSLLNNFPSTTTPLPDWYRVTEMQNEASYLAPPSGILMGNHQGNGRVEPPTVPPSSSVDPMASLGSCYWSNMPSIC

SEQ ID NO: 78487 - protein, 309 aa, Arabidopsis thaliana
  peptide (1)..(309): Ceres Seq. ID no. 12641918
  misc_feature (8)..(55): Pfam Name: Myb-like DNA-binding domain Pfam Description: Myb-like DNA-binding domain
  misc_feature (132)..(309): Homolog of NCBI NO: 15225687 NR Description: putative MYB family transcription factor; protein At2g32460.1, supported by cDNA: gi_18087348 [Arabidopsis >gi|7438357|pir||T02545 probable MYB family transcription factor
  misc_feature (1)..(131): Homolog of NCBI NO: 15225687 NR Description: putative MYB family transcription factor; protein At2g32460.1, supported by cDNA: gi_18087348 [Arabidopsis >gi|7438357|pir||T02545 probable MYB family transcription factor
  misc_feature (132)..(309): Homolog of NCBI NO: 18087349 NR Description: putative transcription factor MYB101 [Arabidopsis
  misc_feature (1)..(131): Homolog of NCBI NO: 18087349 NR Description: putative transcription factor MYB101 [Arabidopsis
  misc_feature (1)..(124): Homolog of NCBI NO: 282965 NR Description: myb-related protein 3 - garden petunia
  misc_feature (1)..(246): Homolog of NCBI NO: 11066263 NR Description: anther-specific myb-related protein 2 [Nicotiana
  misc_feature (1)..(175): Homolog of NCBI NO: 4877649 NR Description: gibberellin MYB transcription factor [Lolium
  misc_feature (1)..(124): Homolog of NCBI NO: 11066265 NR Description: anther-specific myb-related protein 1 [Nicotiana
  misc_feature (3)..(175): Homolog of NCBI NO: 7438355 NR Description: myb-related protein - barley
  misc_feature (3)..(175): Homolog of NCBI NO: 13236696 NR Description: transcription factor GAMyb [Hordeum vulgare]
MEGRGLKKGPWTTTEDAILTEYVRKHGEGNWNAVQKNSGLLRCGKSCRLRWANHLRPNLKKGSFTPDEEKIIIDLHAKLGNKWARMASQLPGRTDNEIKNYWNTRMKRRQRAGLPLYPHEIQHQGIDIDDDSSPIIDNGVHLEPPSGNSGLLDALLEESQALSRGGLFKDVRVSSSDLCEVQDKRVKMDFENLLIDHLNSSNHSSLGANPNIHNKYNEPTMVKVTVDDDDELLTSLLNNFPSTTTPLPDWYRVTEMQNEASYLAPPSGILMGNHQGNGRVEPPTVPPSSSVDPMASLGSCYWSNMPSIC

SEQ ID NO: 78488 - protein, 224 aa, Arabidopsis thaliana
  peptide (1)..(224): Ceres Seq. ID no. 12641919
  misc_feature (47)..(224): Homolog of NCBI NO: 15225687 NR Description: putative MYB family transcription factor; protein At2g32460.1, supported by cDNA: gi_18087348 [Arabidopsis >gi|7438357|pir||T02545 probable MYB family transcription factor
  misc_feature (1)..(46): Homolog of NCBI NO: 15225687 NR Description: putative MYB family transcription factor; protein At2g32460.1, supported by cDNA: gi_18087348 [Arabidopsis >gi|7438357|pir||T02545 probable MYB family transcription factor
  misc_feature (47)..(224): Homolog of NCBI NO: 18087349 NR Description: putative transcription factor MYB101 [Arabidopsis
  misc_feature (1)..(46): Homolog of NCBI NO: 18087349 NR Description: putative transcription factor MYB101 [Arabidopsis
  misc_feature (1)..(39): Homolog of NCBI NO: 282965 NR Description: myb-related protein 3 - garden petunia
  misc_feature (1)..(161): Homolog of NCBI NO: 11066263 NR Description: anther-specific myb-related protein 2 [Nicotiana
  misc_feature (1)..(90): Homolog of NCBI NO: 4877649 NR Description: gibberellin MYB transcription factor [Lolium
  misc_feature (1)..(39): Homolog of NCBI NO: 11066265 NR Description: anther-specific myb-related protein 1 [Nicotiana
  misc_feature (1)..(90): Homolog of NCBI NO: 7438355 NR Description: myb-related protein - barley
  misc_feature (1)..(90): Homolog of NCBI NO: 13236696 NR Description: transcription factor GAMyb [Hordeum vulgare]
MASQLPGRTDNEIKNYWNTRMKRRQRAGLPLYPHEIQHQGIDIDDDSSPIIDNGVHLEPPSGNSGLLDALLEESQALSRGGLFKDVRVSSSDLCEVQDKRVKMDFENLLIDHLNSSNHSSLGANPNIHNKYNEPTMVKVTVDDDDELLTSLLNNFPSTTTPLPDWYRVTEMQNEASYLAPPSGILMGNHQGNGRVEPPTVPPSSSVDPMASLGSCYWSNMPSIC

SEQ ID NO: 78489 - DNA, 1935 bp, Arabidopsis thaliana
  misc_feature (1)..(1935): Ceres Seq. ID no. 12641932
  misc_feature: MA Experiment ID: 20000234 Result: Up-regulated in Transcription
  misc_feature: MA Experiment 20000234 PARAMETER Experiment Name: At_Siliques_P Parameter: Age (day) Value: 21
  misc_feature: MA Experiment 20000234 PARAMETER Experiment Name: At_Siliques_P Parameter: Organism Value: A. thaliana
  misc_feature: MA Experiment 20000234 PARAMETER Experiment Name: At_Siliques_P Parameter: Plant Line Value: WS
  misc_feature: MA Experiment 20000234 PARAMETER Experiment Name: At_Siliques_P Parameter: Tissue Value: Less Than 5mm Siliques vs. Whole Plant
  misc_feature: MA Experiment ID: 20000264 Result: Up-regulated in Transcription
  misc_feature: MA Experiment 20000264 PARAMETER Experiment Name: At_Open_Flower_P Parameter: Age (day) Value: 21
  misc_feature: MA Experiment 20000264 PARAMETER Experiment Name: At_Open_Flower_P Parameter: Plant Line Value: WS
  misc_feature: MA Experiment 20000264 PARAMETER Experiment Name: At_Open_Flower_P Parameter: Tissue Value: Open Flower vs. Whole Plant
  misc_feature: MA Experiment ID: 20000286 Result: Up-regulated in Transcription
  misc_feature: MA Experiment 20000286 PARAMETER Experiment Name: At_Open_Flower_P Parameter: Age (day) Value: 21
  misc_feature: MA Experiment 20000286 PARAMETER Experiment Name: At_Open_Flower_P Parameter: Plant Line Value: WS
  misc_feature: MA Experiment 20000286 PARAMETER Experiment Name: At_Open_Flower_P Parameter: Tissue Value: Half Open vs. Whole Plant
  misc_feature: MA Experiment ID: 20000794 Result: Up-regulated in Transcription
  misc_feature: MA Experiment 20000794 PARAMETER Experiment Name: At_Petals_P Parameter: Age (day) Value: 23-25 days
  misc_feature: MA Experiment 20000794 PARAMETER Experiment Name: At_Petals_P Parameter: Plant Line Value: WS
  misc_feature: MA Experiment 20000794 PARAMETER Experiment Name: At_Petals_P Parameter: Tissue Value: Petals vs. Whole plant
  misc_feature: MA Experiment ID: 20001910 Result: Up-regulated in Transcription
  misc_feature: MA Experiment 20001910 PARAMETER Experiment Name: At_Drought_Reproduction_P Parameter: Age (day) Value: 37
  misc_feature: MA Experiment 20001910 PARAMETER Experiment Name: At_Drought_Reproduction_P Parameter: Organism Value: A. thaliana
  misc_feature: MA Experiment 20001910 PARAMETER Experiment Name: At_Drought_Reproduction_P Parameter: Plant Line Value: WS
  misc_feature: MA Experiment 20001910 PARAMETER Experiment Name: At_Drought_Reproduction_P Parameter: Timepoint (day) Value: 7
  misc_feature: MA Experiment 20001910 PARAMETER Experiment Name: At_Drought_Reproduction_P Parameter: Tissue Value: Flowers
  misc_feature: MA Experiment 20001910 PARAMETER Experiment Name: At_Drought_Reproduction_P Parameter: Treatment Value: Drought vs. No Drought
atgtcgcgatttcctcgaagattcatagatgattcatcaatggaagatgcaggaatctctctttgcccaagtattcactatagacctataaaccctaatgatctagatcgtttggagcaaatccatcgcgatatcttccccatcaagtatgagtctgagtttttccagagtgttgtgaacggagttgatatcgtctcatgggctgctgttgatcggagccggcctgatgatcactctgatgaacttattggttttgttactgccaaatttgtgcttgccaaagatagcgagatagatgatcttatacattacgattcctcgaaaggagaggagactttgatatacatcttgacactcggagttgtagaaacatacagaaaccgtggaatcgcaatgtcacttattagtgaggtaattaaatatgcttccggtttatctgtgtgtcgcggagtttaccttcatgtgattgcacacaacaatgctgcgatctgtttgtacaaaagattgatgttcagatgcgtgcggagattacatggattttatctaatcaatcgacatcattttgatgcgttcttgtttgtctacttcatcaacggttctcgaactccttgctcacccttagaggtggcgatgtttgttgtgaattatatgaagagtggtatcaagtcagtggcatctaagctggctaacaaggatgagaaagttagcttggttgaaaatagctcttttgcttcattggcaattatccaaaaacaaaatcaccagcttaggatgtcaaaaaataggttaaacgataattttatttacttccctcaaaaaagcctgagaaaatccccatcaaaggccaaaagaacagaaaaaagtttttttcacgcggtggcaatggcaatggcgtctgcttcttcctcctcctcctccatatccgtcatcattttcctcctcttggcgcctctctgcctttcacgtgagccaccttcacaaatcccaaacggaaccctagatctctctttactatggtacggccaattcacgcctactcaaaaggagagggttcacgatttcatagaatcgcttaacttcgacgccaaggaaggtcttgacccgaaggtatcggcgtggtggaaagtggtggagagttaccaagagaggtttgaggtgaaggatatttaccgacagaagaagagtaacagaaccgtagctccgaggattaaggtgaaggttgtccggagttatgtggatgagaagatgaagtatggaaaggaattgacaatggggaacggtgagaaacttgttgagacggctatcggaaatatgtcgaaagtggttcccgtggtattactttcggcgcaagttagggctcatggcgtagggttttgtgacggaacttgccaacataacgccctagccaaaattaaagtattagacaacaaacaaaagaaaaatttgacgtcattacgtaaatcccacgcaggtcaaaaagaaccacgacggtacataatggtaagcaacccggaggtggaatgtcccggagagtgcgcttggcctttccacacggccgataagggtccacgtggcatgacctatcaaccggcaagtggagaagtcggagctgacgcactggttattcagctagccaccggtttagccgatttggccaccaatccagatctaaccaagtccttattcaaatctgagacgacaccgtacaacgatgacgtaaagaaaaaccatgaatcttcgtcaatgtatattgtggaccctgcaaccaagtgcactcgggtttttggatccggagcttttccaggtttcactggtagaattcgggttgacccgattactggtggagcctttaattcacacggaatcaaccacttgaaattcttgattccttctatttgggaccctaagaccaaatcttgctggactcctatgtaa

SEQ ID NO: 78490 - protein, 644 aa, Arabidopsis thaliana
  peptide (1)..(644): Ceres Seq. ID no. 12641933
  misc_feature (321)..(472): Pfam Name: Phosphate-induced protein 1 conserved region Pfam Description: Phosphate-induced protein 1 conserved region
  misc_feature (295)..(472): Homolog of NCBI NO: 15228438 NR Description: phi-1-like protein; protein id: At3g02970.1
  misc_feature (491)..(644): Homolog of NCBI NO: 15228438 NR Description: phi-1-like protein; protein id: At3g02970.1
  misc_feature (1)..(234): Homolog of NCBI NO: 15228439 NR Description: putative N-acetlytransferase; protein id:
  misc_feature (1)..(269): Homolog of NCBI NO: 15237415 NR Description: putative protein; protein id: At5g16800.1
  misc_feature (488)..(642): Homolog of NCBI NO: 15219504 NR Description: phosphate-induced (phi-1) protein, putative; id: At1g35140.1, supported by cDNA: 118937., supported by cDNA:
  misc_feature (331)..(463): Homolog of NCBI NO: 15219504 NR Description: phosphate-induced (phi-1) protein, putative; id: At1g35140.1, supported by cDNA: 118937., supported by cDNA:
  misc_feature (498)..(642): Homolog of NCBI NO: 15236667 NR Description: putative phi-1-like phosphate-induced protein; id: At4g08950.1, supported by cDNA: 3552., supported by cDNA: supported by cDNA: gi_20259893, supported by cDNA: gi_20271141
  misc_feature (498)..(642): Homolog of NCBI NO: 21593043 NR Description: putative phi-1-like phosphate-induced protein
  misc_feature (330)..(465): Homolog of NCBI NO: 15236667 NR Description: putative phi-1-like phosphate-induced protein; id: At4g08950.1, supported by cDNA: 3552., supported by cDNA: supported by cDNA: gi_20259893, supported by cDNA: gi_20271141
  misc_feature (330)..(465): Homolog of NCBI NO: 21593043 NR Description: putative phi-1-like phosphate-induced protein
MSRFPRRFIDDSSMEDAGISLCPSIHYRPINPNDLDRLEQIHRDIFPIKYESEFFQSVVNGVDIVSWAAVDRSRPDDHSDELIGFVTAKFVLAKDSEIDDLIHYDSSKGEETLIYILTLGVVETYRNRGIAMSLISEVIKYASGLSVCRGVYLHVIAHNNAAICLYKRLMFRCVRRLHGFYLINRHHFDAFLFVYFINGSRTPCSPLEVAMFVVNYMKSGIKSVASKLANKDEKVSLVENSSFASLAIIQKQNHQLRMSKNRLNDNFIYFPQKSLRKSPSKAKRTEKSFFHAVAMAMASASSSSSSISVIIFLLLAPLCLSREPPSQIPNGTLDLSLLWYGQFTPTQKERVHDFIESLNFDAKEGLDPKVSAWWKVVESYQERFEVKDIYRQKKSNRTVAPRIKVKVVRSYVDEKMKYGKELTMGNGEKLVETAIGNMSKVVPVVLLSAQVRAHGVGFCDGTCQHNALAKIKVLDNKQKKNLTSLRKSHAGQKEPRRYIMVSNPEVECPGECAWPFHTADKGPRGMTYQPASGEVGADALVIQLATGLADLATNPDLTKSLFKSETTPYNDDVKKNHESSSMYIVDPATKCTRVFGSGAFPGFTGRIRVDPITGGAFNSHGINHLKFLIPSIWDPKTKSCWTPM

SEQ ID NO: 78491 - protein, 631 aa, Arabidopsis thaliana
  peptide (1)..(631): Ceres Seq. ID no. 12641934
  misc_feature (308)..(459): Pfam Name: Phosphate-induced protein 1 conserved region Pfam Description: Phosphate-induced protein 1 conserved region
  misc_feature (282)..(459): Homolog of NCBI NO: 15228438 NR Description: phi-1-like protein; protein id: At3g02970.1
  misc_feature (478)..(631): Homolog of NCBI NO: 15228438 NR Description: phi-1-like protein; protein id: At3g02970.1
  misc_feature (1)..(221): Homolog of NCBI NO: 15228439 NR Description: putative N-acetlytransferase; protein id:
  misc_feature (1)..(256): Homolog of NCBI NO: 15237415 NR Description: putative protein; protein id: At5g16800.1
  misc_feature (475)..(629): Homolog of NCBI NO: 15219504 NR Description: phosphate-induced (phi-1) protein, putative; id: At1g35140.1, supported by cDNA: 118937., supported by cDNA:
  misc_feature (318)..(450): Homolog of NCBI NO: 15219504 NR Description: phosphate-induced (phi-1) protein, putative; id: At1g35140.1, supported by cDNA: 118937., supported by cDNA:
  misc_feature (485)..(629): Homolog of NCBI NO: 15236667 NR Description: putative phi-1-like phosphate-induced protein; id: At4g08950.1, supported by cDNA: 3552., supported by cDNA: supported by cDNA: gi_20259893, supported by cDNA: gi_20271141
  misc_feature (485)..(629): Homolog of NCBI NO: 21593043 NR Description: putative phi-1-like phosphate-induced protein
  misc_feature (317)..(452): Homolog of NCBI NO: 15236667 NR Description: putative phi-1-like phosphate-induced protein; id: At4g08950.1, supported by cDNA: 3552., supported by cDNA: supported by cDNA: gi_20259893, supported by cDNA: gi_20271141
  misc_feature (317)..(452): Homolog of NCBI NO: 21593043 NR Description: putative phi-1-like phosphate-induced protein
MEDAGISLCPSIHYRPINPNDLDRLEQIHRDIFPIKYESEFFQSVVNGVDIVSWAAVDRSRPDDHSDELIGFVTAKFVLAKDSEIDDLIHYDSSKGEETLIYILTLGVVETYRNRGIAMSLISEVIKYASGLSVCRGVYLHVIAHNNAAICLYKRLMFRCVRRLHGFYLINRHHFDAFLFVYFINGSRTPCSPLEVAMFVVNYMKSGIKSVASKLANKDEKVSLVENSSFASLAIIQKQNHQLRMSKNRLNDNFIYFPQKSLRKSPSKAKRTEKSFFHAVAMAMASASSSSSSISVIIFLLLAPLCLSREPPSQIPNGTLDLSLLWYGQFTPTQKERVHDFIESLNFDAKEGLDPKVSAWWKVVESYQERFEVKDIYRQKKSNRTVAPRIKVKVVRSYVDEKMKYGKELTMGNGEKLVETAIGNMSKVVPVVLLSAQVRAHGVGFCDGTCQHNALAKIKVLDNKQKKNLTSLRKSHAGQKEPRRYIMVSNPEVECPGECAWPFHTADKGPRGMTYQPASGEVGADALVIQLATGLADLATNPDLTKSLFKSETTPYNDDVKKNHESSSMYIVDPATKCTRVFGSGAFPGFTGRIRVDPITGGAFNSHGINHLKFLIPSIWDPKTKSCWTPM

SEQ ID NO: 78492 - protein, 513 aa, Arabidopsis thaliana
  peptide (1)..(513): Ceres Seq. ID no. 12641935
  misc_feature (190)..(341): Pfam Name: Phosphate-induced protein 1 conserved region Pfam Description: Phosphate-induced protein 1 conserved region
  misc_feature (164)..(341): Homolog of NCBI NO: 15228438 NR Description: phi-1-like protein; protein id: At3g02970.1
  misc_feature (360)..(513): Homolog of NCBI NO: 15228438 NR Description: phi-1-like protein; protein id: At3g02970.1
  misc_feature (1)..(103): Homolog of NCBI NO: 15228439 NR Description: putative N-acetlytransferase; protein id:
  misc_feature (1)..(138): Homolog of NCBI NO: 15237415 NR Description: putative protein; protein id: At5g16800.1
  misc_feature (357)..(511): Homolog of NCBI NO: 15219504 NR Description: phosphate-induced (phi-1) protein, putative; id: At1g35140.1, supported by cDNA: 118937., supported by cDNA:
  misc_feature (200)..(332): Homolog of NCBI NO: 15219504 NR Description: phosphate-induced (phi-1) protein, putative; id: At1g35140.1, supported by cDNA: 118937., supported by cDNA:
  misc_feature (367)..(511): Homolog of NCBI NO: 15236667 NR Description: putative phi-1-like phosphate-induced protein; id: At4g08950.1, supported by cDNA: 3552., supported by cDNA: supported by cDNA: gi_20259893, supported by cDNA: gi_20271141
  misc_feature (367)..(511): Homolog of NCBI NO: 21593043 NR Description: putative phi-1-like phosphate-induced protein
  misc_feature (199)..(334): Homolog of NCBI NO: 15236667 NR Description: putative phi-1-like phosphate-induced protein; id: At4g08950.1, supported by cDNA: 3552., supported by cDNA: supported by cDNA: gi_20259893, supported by cDNA: gi_20271141
  misc_feature (199)..(334): Homolog of NCBI NO: 21593043 NR Description: putative phi-1-like phosphate-induced protein
MSLISEVIKYASGLSVCRGVYLHVIAHNNAAICLYKRLMFRCVRRLHGFYLINRHHFDAFLFVYFINGSRTPCSPLEVAMFVVNYMKSGIKSVASKLANKDEKVSLVENSSFASLAIIQKQNHQLRMSKNRLNDNFIYFPQKSLRKSPSKAKRTEKSFFHAVAMAMASASSSSSSISVIIFLLLAPLCLSREPPSQIPNGTLDLSLLWYGQFTPTQKERVHDFIESLNFDAKEGLDPKVSAWWKVVESYQERFEVKDIYRQKKSNRTVAPRIKVKVVRSYVDEKMKYGKELTMGNGEKLVETAIGNMSKVVPVVLLSAQVRAHGVGFCDGTCQHNALAKIKVLDNKQKKNLTSLRKSHAGQKEPRRYIMVSNPEVECPGECAWPFHTADKGPRGMTYQPASGEVGADALVIQLATGLADLATNPDLTKSLFKSETTPYNDDVKKNHESSSMYIVDPATKCTRVFGSGAFPGFTGRIRVDPITGGAFNSHGINHLKFLIPSIWDPKTKSCWTPM

SEQ ID NO: 78493 - DNA, 3219 bp, Arabidopsis thaliana
  misc_feature (1)..(3219): Ceres Seq. ID no. 12641950
  misc_feature: MA Experiment ID: 20001451 Result: Up-regulated in Transcription
  misc_feature: MA Experiment 20001451 PARAMETER Experiment Name: At_Far-red-induction_P Parameter: Age (day) Value: 7
  misc_feature: MA Experiment 20001451 PARAMETER Experiment Name: At_Far-red-induction_P Parameter: Light Value: Far-red vs. White
  misc_feature: MA Experiment 20001451 PARAMETER Experiment Name: At_Far-red-induction_P Parameter: Organism Value: A. thaliana
  misc_feature: MA Experiment 20001451 PARAMETER Experiment Name: At_Far-red-induction_P Parameter: Plant Line Value: Columbia
  misc_feature: MA Experiment 20001451 PARAMETER Experiment Name: At_Far-red-induction_P Parameter: Timepoint (hr) Value: 24
  misc_feature: MA Experiment 20001451 PARAMETER Experiment Name: At_Far-red-induction_P Parameter: Tissue Value: Whole Plant
atggctgccgagaagttaagagacttgagtcagccgattgacgtcgttttactcgatgccactgttgaggccttttactctaccggatctaaggaagaaagagcttctgcggataatatcttgcgggatttgaaagctaatcctgatacttggcttcaagttgttcacattctacagaacaccagtagtacgcataccaaattttttgcccttcaggtgctggaaggtgttataaaatataggtggaatgcattacccgttgaacaacgtgatggaatgaaaaattacatctctgatgtcattgtgcagctgtcaagggatgaagcatctttcagaacggaaaggctttatgtcaacaagttaaatatcatcctggttcagatcgtgaaacaggagtggccggcaaagtggaaaagctttattcctgatttagttatagctgctaagactagtgaaactatctgtgagaattgcatggctattttgaaactcctaagtgaagaggtctttgatttctcaaaaggagagatgactcagcaaaagataaaagaactgaaacagtctctaaacagcgagtttcaactcattcacgagttatgcctatatgtcctctcagcttcccaaagacaagagcttatacgtgctacactctctgcattgcatgcctatctttcttggattccgttgggatacatatttgagtcccctttgctggagatcctacttaaattcttccctgttccagcatataggaatctcacacttcaatgtttgtcagaggttgcatctcttaattttggggacttctacgatatgcaatatgtcaagatgtacagcattttcatgaatcagttgcaggcaattctccctttaaatttaaatatccctgaggcatattcaactggaagtagtgaagaacaggcttttatccagaacttggcactgtttttcacttcgtttttcaagttacatataaaaatcctagaatctgcacccgaaaatatttctctattacttgcgggtctgggatatctcattagcatatcgtatgttgatgacactgaagtattcaaggtttgtttggactattggaattcattagtgttggagttgtttgggacgcgacatcatgcgtgtcaccctgcactaactccaagtctgtttggattgcaaatggctttccttcctagtacagttgatggtgttaaatctgaagtcactgagcggcaaaaactttattcagatccaatgtcaaaattaaggggactcatgattagtcgcacggctaagcctgaagaagtgttaattgttgaggacgaaaatgggaacattgttcgtgaaactatgaaggataatgatgttcttgtccagtataagataatgcgggagacattaatctacctctcacaccttgatcatgaagataccgaaaaacagatgttgagtaagctaagcaaacagttgagcggggaggaatgggcatggaacaatctaaacactttatgctgggctattgggtctatttctgggtccatggtagtagaacaggaaaacagatttctcgtgatggttatccgtgatttgttaagtttatgtgaagtcgtcaagggaaaagacaataaagctgttattaagtacgttgttggacaatattcaagattcttaagagcccattggaagtttttgaagacagttgtccataagctgtttgaatttatgcatgagacgcatcctggtgttcaggacatggcttgcgacacattcttaaaaattgttcagaagtgtaagcgaaaatttgttattgttcaggttggagaaagtgagccatttgtgtctgaacttctatcaggccttgctacaatcgtcggagatcttcaacctcatcagattcatacattttatgaatctgttggtagtatgatccaggcagaatcagatcctcagaagaggggggaatacctccagaggttgatggctctcccgaatcagaaatgggcagaaattataggacaagcacgtcaaagtgcagatatcctcaaggaaccagatgtgatacgtactgtgcttaatatcctccagacaaatacgcgcgttgcaacttcactaggaacattcttcctgtctcaaatttcgttgatcttcttggatatgctgaatgtttacagaatgtatagtgaactcgtttcaagcagcattgctaatggtggcccatacgcttcgagaacatctcttgttaaacttttaaggtctgttaagagggaaattcttaagctgatagagacgtttttagataaagctgaaaaccagccacacattggaaaacagtttgttccaccaatgatggatcaagtacttggcgactatgcaagaaatgttcctgatgcaagagaatcagaagtcttgtcactctttgcgacaataatcaacaaatacaaggttgtaatgcgagatgaagttcccctcatatttgaagctgttttccagtgcacattggagatgattactaagaattttgaagattacccagagcaccgtctcaagtttttctcgttacttcgtgctattgctacattttgtttccgtgcgttgatacagttgtcaagtgagcaactgaagctagtgatggattcagttatctgggcatttaggcatactgaaagaaatatcgctgaaactgggctcaatctcttgctcgagatgctgaaaaactttcagaaatctgacttttgtaacaaattctaccaaacatactttctgcaaattgagcaagaagtatttgctgtcttgaccgataccttccacaagcctgggttcaagttgcatgtgttggtgttgcagcacttatttagcctggttgagagcggatcattggcagaaccattgtgggatgctgcaacggtaccgcatccttattcaaataatgtcgcctttgtgcttgagtacaccaccaagcttctaagctcatcattccccaacatgactacaacagaggtgacacagtttgtgaatggactttacgagtcgagaaacgatgttggcagatttaaggataacatacgcgacttccttatacagtccaaggaattttctgctcaggataacaaagatttatatgctgaggaagctgctgcccaaatggagagagagagacaaagaatgctttcgattcctggacttatagctcccagcgaaattcaagacgacatggccgattcttaa

SEQ ID NO: 78494 - protein, 1072 aa, Arabidopsis thaliana
  peptide (1)..(1072): Ceres Seq. ID no. 12641951
  misc_feature (37)..(103): Pfam Name: Importin-beta N-terminal domain Pfam Description: Importin-beta N-terminal domain
  misc_feature (2)..(1071): Homolog of NCBI NO: 5690335 NR Description: CRM1/XPO1 protein [Xenopus laevis]
  misc_feature (2)..(1071): Homolog of NCBI NO: 29789299 NR Description: exportin 1 (CRM1, yeast, homolog) [Rattus >gi|28971720|dbj|BAC65240.1| nuclear export factor CRM1 [Rattus
  misc_feature (2)..(1071): Homolog of NCBI NO: 4507943 NR Description: exportin 1; CRM1, yeast, homolog; Exportin-1 for chromosome region maintenance); exportin 1 (CRM1, yeast, [Homo sapiens] >gi|2626840|dbj|BAA23415.1| CRM1 protein [Homo
  misc_feature (4)..(1065): Homolog of NCBI NO: 11493965 NR Description: crm1 protein [Schizosaccharomyces pombe]
  misc_feature (4)..(1065): Homolog of NCBI NO: 19856107 NR Description: Exportin 1 (Chromosome region maintenance protein
  misc_feature (4)..(1065): Homolog of NCBI NO: 11281651 NR Description: CRM1/exportin 1 - fission yeast
  misc_feature (407)..(1063): Homolog of NCBI NO: 30790419 NR Description: CRM1 [Trypanosoma cruzi]
  misc_feature (4)..(425): Homolog of NCBI NO: 30790419 NR Description: CRM1 [Trypanosoma cruzi]
  misc_feature (417)..(1063): Homolog of NCBI NO: 30790417 NR Description: CRM1 [Trypanosoma brucei]
  misc_feature (4)..(364): Homolog of NCBI NO: 30790417 NR Description: CRM1 [Trypanosoma brucei]
MAAEKLRDLSQPIDVVLLDATVEAFYSTGSKEERASADNILRDLKANPDTWLQVVHILQNTSSTHTKFFALQVLEGVIKYRWNALPVEQRDGMKNYISDVIVQLSRDEASFRTERLYVNKLNIILVQIVKQEWPAKWKSFIPDLVIAAKTSETICENCMAILKLLSEEVFDFSKGEMTQQKIKELKQSLNSEFQLIHELCLYVLSASQRQELIRATLSALHAYLSWIPLGYIFESPLLEILLKFFPVPAYRNLTLQCLSEVASLNFGDFYDMQYVKMYSIFMNQLQAILPLNLNIPEAYSTGSSEEQAFIQNLALFFTSFFKLHIKILESAPENISLLLAGLGYLISISYVDDTEVFKVCLDYWNSLVLELFGTRHHACHPALTPSLFGLQMAFLPSTVDGVKSEVTERQKLYSDPMSKLRGLMISRTAKPEEVLIVEDENGNIVRETMKDNDVLVQYKIMRETLIYLSHLDHEDTEKQMLSKLSKQLSGEEWAWNNLNTLCWAIGSISGSMVVEQENRFLVMVIRDLLSLCEVVKGKDNKAVIKYVVGQYSRFLRAHWKFLKTVVHKLFEFMHETHPGVQDMACDTFLKIVQKCKRKFVIVQVGESEPFVSELLSGLATIVGDLQPHQIHTFYESVGSMIQAESDPQKRGEYLQRLMALPNQKWAEIIGQARQSADILKEPDVIRTVLNILQTNTRVATSLGTFFLSQISLIFLDMLNVYRMYSELVSSSIANGGPYASRTSLVKLLRSVKREILKLIETFLDKAENQPHIGKQFVPPMMDQVLGDYARNVPDARESEVLSLFATIINKYKVVMRDEVPLIFEAVFQCTLEMITKNFEDYPEHRLKFFSLLRAIATFCFRALIQLSSEQLKLVMDSVIWAFRHTERNIAETGLNLLLEMLKNFQKSDFCNKFYQTYFLQIEQEVFAVLTDTFHKPGFKLHVLVLQHLFSLVESGSLAEPLWDAATVPHPYSNNVAFVLEYTTKLLSSSFPNMTTTEVTQFVNGLYESRNDVGRFKDNIRDFLIQSKEFSAQDNKDLYAEEAAAQMERERQRMLSIPGLIAPSEIQDDMADS

SEQ ID NO: 78495 - protein, 980 aa, Arabidopsis thaliana
  peptide (1)..(980): Ceres Seq. ID no. 12641952
  misc_feature (1)..(979): Homolog of NCBI NO: 5690335 NR Description: CRM1/XPO1 protein [Xenopus laevis]
  misc_feature (1)..(979): Homolog of NCBI NO: 29789299 NR Description: exportin 1 (CRM1, yeast, homolog) [Rattus >gi|28971720|dbj|BAC65240.1| nuclear export factor CRM1 [Rattus
  misc_feature (1)..(979): Homolog of NCBI NO: 4507943 NR Description: exportin 1; CRM1, yeast, homolog; Exportin-1 for chromosome region maintenance); exportin 1 (CRM1, yeast, [Homo sapiens] >gi|2626840|dbj|BAA23415.1| CRM1 protein [Homo
  misc_feature (1)..(973): Homolog of NCBI NO: 11493965 NR Description: crm1 protein [Schizosaccharomyces pombe]
  misc_feature (1)..(973): Homolog of NCBI NO: 19856107 NR Description: Exportin 1 (Chromosome region maintenance protein
  misc_feature (1)..(973): Homolog of NCBI NO: 11281651 NR Description: CRM1/exportin 1 - fission yeast
  misc_feature (315)..(971): Homolog of NCBI NO: 30790419 NR Description: CRM1 [Trypanosoma cruzi]
  misc_feature (1)..(333): Homolog of NCBI NO: 30790419 NR Description: CRM1 [Trypanosoma cruzi]
  misc_feature (325)..(971): Homolog of NCBI NO: 30790417 NR Description: CRM1 [Trypanosoma brucei]
  misc_feature (1)..(272): Homolog of NCBI NO: 30790417 NR Description: CRM1 [Trypanosoma brucei]
MKNYISDVIVQLSRDEASFRTERLYVNKLNIILVQIVKQEWPAKWKSFIPDLVIAAKTSETICENCMAILKLLSEEVFDFSKGEMTQQKIKELKQSLNSEFQLIHELCLYVLSASQRQELIRATLSALHAYLSWIPLGYIFESPLLEILLKFFPVPAYRNLTLQCLSEVASLNFGDFYDMQYVKMYSIFMNQLQAILPLNLNIPEAYSTGSSEEQAFIQNLALFFTSFFKLHIKILESAPENISLLLAGLGYLISISYVDDTEVFKVCLDYWNSLVLELFGTRHHACHPALTPSLFGLQMAFLPSTVDGVKSEVTERQKLYSDPMSKLRGLMISRTAKPEEVLIVEDENGNIVRETMKDNDVLVQYKIMRETLIYLSHLDHEDTEKQMLSKLSKQLSGEEWAWNNLNTLCWAIGSISGSMVVEQENRFLVMVIRDLLSLCEVVKGKDNKAVIKYVVGQYSRFLRAHWKFLKTVVHKLFEFMHETHPGVQDMACDTFLKIVQKCKRKFVIVQVGESEPFVSELLSGLATIVGDLQPHQIHTFYESVGSMIQAESDPQKRGEYLQRLMALPNQKWAEIIGQARQSADILKEPDVIRTVLNILQTNTRVATSLGTFFLSQISLIFLDMLNVYRMYSELVSSSIANGGPYASRTSLVKLLRSVKREILKLIETFLDKAENQPHIGKQFVPPMMDQVLGDYARNVPDARESEVLSLFATIINKYKVVMRDEVPLIFEAVFQCTLEMITKNFEDYPEHRLKFFSLLRAIATFCFRALIQLSSEQLKLVMDSVIWAFRHTERNIAETGLNLLLEMLKNFQKSDFCNKFYQTYFLQIEQEVFAVLTDTFHKPGFKLHVLVLQHLFSLVESGSLAEPLWDAATVPHPYSNNVAFVLEYTTKLLSSSFPNMTTTEVTQFVNGLYESRNDVGRFKDNIRDFLIQSKEFSAQDNKDLYAEEAAAQMERERQRMLSIPGLIAPSEIQDDMADS

SEQ ID NO: 78496 - protein, 914 aa, Arabidopsis thaliana
  peptide (1)..(914): Ceres Seq. ID no. 12641953
  misc_feature (1)..(913): Homolog of NCBI NO: 5690335 NR Description: CRM1/XPO1 protein [Xenopus laevis]
  misc_feature (1)..(913): Homolog of NCBI NO: 29789299 NR Description: exportin 1 (CRM1, yeast, homolog) [Rattus >gi|28971720|dbj|BAC65240.1| nuclear export factor CRM1 [Rattus
  misc_feature (1)..(913): Homolog of NCBI NO: 4507943 NR Description: exportin 1; CRM1, yeast, homolog; Exportin-1 for chromosome region maintenance); exportin 1 (CRM1, yeast, [Homo sapiens] >gi|2626840|dbj|BAA23415.1| CRM1 protein [Homo
  misc_feature (1)..(907): Homolog of NCBI NO: 11493965 NR Description: crm1 protein [Schizosaccharomyces pombe]
  misc_feature (1)..(907): Homolog of NCBI NO: 19856107 NR Description: Exportin 1 (Chromosome region maintenance protein
  misc_feature (1)..(907): Homolog of NCBI NO: 11281651 NR Description: CRM1/exportin 1 - fission yeast
  misc_feature (249)..(905): Homolog of NCBI NO: 30790419 NR Description: CRM1 [Trypanosoma cruzi]
  misc_feature (1)..(267): Homolog of NCBI NO: 30790419 NR Description: CRM1 [Trypanosoma cruzi]
  misc_feature (259)..(905): Homolog of NCBI NO: 30790417 NR Description: CRM1 [Trypanosoma brucei]
  misc_feature (1)..(206): Homolog of NCBI NO: 30790417 NR Description: CRM1 [Trypanosoma brucei]
MAILKLLSEEVFDFSKGEMTQQKIKELKQSLNSEFQLIHELCLYVLSASQRQELIRATLSALHAYLSWIPLGYIFESPLLEILLKFFPVPAYRNLTLQCLSEVASLNFGDFYDMQYVKMYSIFMNQLQAILPLNLNIPEAYSTGSSEEQAFIQNLALFFTSFFKLHIKILESAPENISLLLAGLGYLISISYVDDTEVFKVCLDYWNSLVLELFGTRHHACHPALTPSLFGLQMAFLPSTVDGVKSEVTERQKLYSDPMSKLRGLMISRTAKPEEVLIVEDENGNIVRETMKDNDVLVQYKIMRETLIYLSHLDHEDTEKQMLSKLSKQLSGEEWAWNNLNTLCWAIGSISGSMVVEQENRFLVMVIRDLLSLCEVVKGKDNKAVIKYVVGQYSRFLRAHWKFLKTVVHKLFEFMHETHPGVQDMACDTFLKIVQKCKRKFVIVQVGESEPFVSELLSGLATIVGDLQPHQIHTFYESVGSMIQAESDPQKRGEYLQRLMALPNQKWAEIIGQARQSADILKEPDVIRTVLNILQTNTRVATSLGTFFLSQISLIFLDMLNVYRMYSELVSSSIANGGPYASRTSLVKLLRSVKREILKLIETFLDKAENQPHIGKQFVPPMMDQVLGDYARNVPDARESEVLSLFATIINKYKVVMRDEVPLIFEAVFQCTLEMITKNFEDYPEHRLKFFSLLRAIATFCFRALIQLSSEQLKLVMDSVIWAFRHTERNIAETGLNLLLEMLKNFQKSDFCNKFYQTYFLQIEQEVFAVLTDTFHKPGFKLHVLVLQHLFSLVESGSLAEPLWDAATVPHPYSNNVAFVLEYTTKLLSSSFPNMTTTEVTQFVNGLYESRNDVGRFKDNIRDFLIQSKEFSAQDNKDLYAEEAAAQMERERQRMLSIPGLIAPSEIQDDMADS

SEQ ID NO: 78497 - DNA, 423 bp, Arabidopsis thaliana
  misc_feature (1)..(423): Ceres Seq. ID no. 12641968
  misc_feature: MA Experiment ID: 20001557 Result: Down-regulated in Transcription
  misc_feature: MA Experiment 20001557 PARAMETER Experiment Name: At_Drought_Soil_Dry_P Parameter: Age (day) Value: 27
  misc_feature: MA Experiment 20001557 PARAMETER Experiment Name: At_Drought_Soil_Dry_P Parameter: Organism Value: A. thaliana
  misc_feature: MA Experiment 20001557 PARAMETER Experiment Name: At_Drought_Soil_Dry_P Parameter: Plant Line Value: WS
  misc_feature: MA Experiment 20001557 PARAMETER Experiment Name: At_Drought_Soil_Dry_P Parameter: Post Timepoint (hr) Value: 3
  misc_feature: MA Experiment 20001557 PARAMETER Experiment Name: At_Drought_Soil_Dry_P Parameter: Post-Treatment Value: Re-Water vs. No Drought
  misc_feature: MA Experiment 20001557 PARAMETER Experiment Name: At_Drought_Soil_Dry_P Parameter: Timepoint (day) Value: 13
  misc_feature: MA Experiment 20001557 PARAMETER Experiment Name: At_Drought_Soil_Dry_P Parameter: Treatment Value: Drought vs. No Drought
atggcttccttggagatgaatgacctaaaaaagatagggctaggtttgactggatttggtgtgttctttacattcctgggagtgatatttgtgtttgacaagggactcatagccatggggaacatcctcttcttagctggtgtgactctaaccattggaatcaacccagcaatccaattctttactaaacggcagaattttaagggtactatatcatttggattgggtttcttgttggttgtgtttggatggcctattttcggtttgcttcttgaatcatatgggttccttgtgctcttcagtggtttctggcctacacttgccgtcttccttcaaaggatacctctattaggctggcttttgcagcaaccatacatcagatcgttgctggatcgctaccgtggaaggcgtgtccctgtctaa

SEQ ID NO: 78498 - protein, 140 aa, Arabidopsis thaliana
  peptide (1)..(140): Ceres Seq. ID no. 12641969
  misc_feature (30)..(129): Pfam Name: Got1-like family Pfam Description: Got1-like family
  misc_feature (1)..(140): Homolog of NCBI NO: 30678779 NR Description: expressed protein [Arabidopsis thaliana]
  misc_feature (1)..(140): Homolog of NCBI NO: 15229139 NR Description: putative protein; protein id: At3g49420.1, by cDNA: 124223., supported by cDNA: gi_17065529, supported by gi_20258894 [Arabidopsis thaliana] >gi|15240976|ref|NP_195763.1|
  misc_feature (1)..(129): Homolog of NCBI NO: 12324443 NR Description: unknown protein; 50647-51606 [Arabidopsis
  misc_feature (1)..(100): Homolog of NCBI NO: 6714435 NR Description: unknown protein [Arabidopsis thaliana]
  misc_feature (11)..(129): Homolog of NCBI NO: 33146513 NR Description: NFkB activating protein-like [Oryza sativa
  misc_feature (4)..(129): Homolog of NCBI NO: 17945675 NR Description: RE29988p [Drosophila melanogaster]
  misc_feature (4)..(129): Homolog of NCBI NO: 24642432 NR Description: CG32576-PA [Drosophila melanogaster]
  misc_feature (5)..(137): Homolog of NCBI NO: 22329359 NR Description: unknown protein; protein id: At1g05785.1 thaliana] >gi|26452699|dbj|BAC43432.1| unknown protein thaliana] >gi|28973521|gb|AAO64085.1| unknown protein
  misc_feature (4)..(132): Homolog of NCBI NO: 13385354 NR Description: RIKEN cDNA 2310061A22 [Mus musculus]
  misc_feature (4)..(132): Homolog of NCBI NO: 26384022 NR Description: unnamed protein product [Mus musculus]
MASLEMNDLKKIGLGLTGFGVFFTFLGVIFVFDKGLIAMGNILFLAGVTLTIGINPAIQFFTKRQNFKGTISFGLGFLLVVFGWPIFGLLLESYGFLVLFSGFWPTLAVFLQRIPLLGWLLQQPYIRSLLDRYRGRRVPV

SEQ ID NO: 78499 - protein, 135 aa, Arabidopsis thaliana
  peptide (1)..(135): Ceres Seq. ID no. 12641970
  misc_feature (25)..(124): Pfam Name: Got1-like family Pfam Description: Got1-like family
  misc_feature (1)..(135): Homolog of NCBI NO: 30678779 NR Description: expressed protein [Arabidopsis thaliana]
  misc_feature (1)..(135): Homolog of NCBI NO: 15229139 NR Description: putative protein; protein id: At3g49420.1, by cDNA: 124223., supported by cDNA: gi_17065529, supported by gi_20258894 [Arabidopsis thaliana] >gi|15240976|ref|NP_195763.1|
  misc_feature (1)..(124): Homolog of NCBI NO: 12324443 NR Description: unknown protein; 50647-51606 [Arabidopsis
  misc_feature (1)..(95): Homolog of NCBI NO: 6714435 NR Description: unknown protein [Arabidopsis thaliana]
  misc_feature (6)..(124): Homolog of NCBI NO: 33146513 NR Description: NFkB activating protein-like [Oryza sativa
  misc_feature (1)..(124): Homolog of NCBI NO: 17945675 NR Description: RE29988p [Drosophila melanogaster]
  misc_feature (1)..(124): Homolog of NCBI NO: 24642432 NR Description: CG32576-PA [Drosophila melanogaster]
  misc_feature (1)..(132): Homolog of NCBI NO: 22329359 NR Description: unknown protein; protein id: At1g05785.1 thaliana] >gi|26452699|dbj|BAC43432.1| unknown protein thaliana] >gi|28973521|gb|AAO64085.1| unknown protein
  misc_feature (1)..(127): Homolog of NCBI NO: 13385354 NR Description: RIKEN cDNA 2310061A22 [Mus musculus]
  misc_feature (1)..(127): Homolog of NCBI NO: 26384022 NR Description: unnamed protein product [Mus musculus]
MNDLKKIGLGLTGFGVFFTFLGVIFVFDKGLIAMGNILFLAGVTLTIGINPAIQFFTKRQNFKGTISFGLGFLLVVFGWPIFGLLLESYGFLVLFSGFWPTLAVFLQRIPLLGWLLQQPYIRSLLDRYRGRRVPV

SEQ ID NO: 78500 - protein, 102 aa, Arabidopsis thaliana
  peptide (1)..(102): Ceres Seq. ID no. 12641971
  misc_feature (1)..(91): Pfam Name: Got1-like family Pfam Description: Got1-like family
  misc_feature (1)..(102): Homolog of NCBI NO: 30678779 NR Description: expressed protein [Arabidopsis thaliana]
  misc_feature (1)..(102): Homolog of NCBI NO: 15229139 NR Description: putative protein; protein id: At3g49420.1, by cDNA: 124223., supported by cDNA: gi_17065529, supported by gi_20258894 [Arabidopsis thaliana] >gi|15240976|ref|NP_195763.1|
  misc_feature (1)..(91): Homolog of NCBI NO: 12324443 NR Description: unknown protein; 50647-51606 [Arabidopsis
  misc_feature (1)..(62): Homolog of NCBI NO: 6714435 NR Description: unknown protein [Arabidopsis thaliana]
  misc_feature (1)..(91): Homolog of NCBI NO: 33146513 NR Description: NFkB activating protein-like [Oryza sativa
  misc_feature (1)..(91): Homolog of NCBI NO: 17945675 NR Description: RE29988p [Drosophila melanogaster]
  misc_feature (1)..(91): Homolog of NCBI NO: 24642432 NR Description: CG32576-PA [Drosophila melanogaster]
  misc_feature (1)..(99): Homolog of NCBI NO: 22329359 NR Description: unknown protein; protein id: At1g05785.1 thaliana] >gi|26452699|dbj|BAC43432.1| unknown protein thaliana] >gi|28973521|gb|AAO64085.1| unknown protein
  misc_feature (1)..(94): Homolog of NCBI NO: 13385354 NR Description: RIKEN cDNA 2310061A22 [Mus musculus]
  misc_feature (1)..(94): Homolog of NCBI NO: 26384022 NR Description: unnamed protein product [Mus musculus]
MGNILFLAGVTLTIGINPAIQFFTKRQNFKGTISFGLGFLLVVFGWPIFGLLLESYGFLVLFSGFWPTLAVFLQRIPLLGWLLQQPYIRSLLDRYRGRRVPV

SEQ ID NO: 78501 - DNA, 969 bp, Arabidopsis thaliana
  misc_feature (1)..(969): Ceres Seq. ID no. 12641980
  misc_feature: MA Experiment ID: 20000352 Result: Up-regulated in Transcription
  misc_feature: MA Experiment 20000352 PARAMETER Experiment Name: At_Drought_Sub_P Parameter: Age (day) Value: 7
  misc_feature: MA Experiment 20000352 PARAMETER Experiment Name: At_Drought_Sub_P Parameter: Organism Value: A. thaliana
  misc_feature: MA Experiment 20000352 PARAMETER Experiment Name: At_Drought_Sub_P Parameter: Plant Line Value: WS
  misc_feature: MA Experiment 20000352 PARAMETER Experiment Name: At_Drought_Sub_P Parameter: Timepoint (hr) Value: 6
  misc_feature: MA Experiment 20000352 PARAMETER Experiment Name: At_Drought_Sub_P Parameter: Tissue Value: Whole Plant
  misc_feature: MA Experiment 20000352 PARAMETER Experiment Name: At_Drought_Sub_P Parameter: Treatment Value: Drought vs. No Drought
atggtgcttctacttgtgattgtgggattaataagctattatgtctacaagtccataacaccgccgccaccgattccactgccggaaaatgtttccgagatatctccaagaatcaagctcaatgatggaaggcatttagcgtacaaggaattagggtttccaaaggacaaagccaaaaacaaaataataatcgtccacggaaatggaaattccaaagacgtcgatttatacatcacacaggaaatgattgatgaattcaagatatactttttgttcttcgatagagctggttatggagaaagcgatcctaatccaacacgaacgctgaaaacagatacatacgatatcgaagaacttgctgacaaattgcaagtcggtccaaagttccacgttataggcatgtcacttggagcttaccctgtttacggttgcctcaaatacattcctaataggctcagtggagcttcgttggttgttccgttagtgaatttttggtggagccgtgtgcctcaaaacttattgaatgcagcgatgaagaaattgccaattggatttcaattgacacttcgagtcgcacactactctccatggttgttatattggtggatgactcagaaatggttcccgaatagtcgaaatcccaaagatactatgaccgagcgcgacctagaactcgagtctgctttacgacaaggtggatatgtgaccacacaacaagacatcatagcgggttacgggaattgggaatttgatccaaccgaattgaagaatccgttttcggatagtaacaaagggtcggttcatatgtggtgtgcactcgaagacaaacaaatttcacgcgatgttttactctatatatgcgataaactgccatggataaagctccatgaggtccctgatggtggacattatattatccatgagaagcggcattttgaagccattatcaaagccgcttgtagtgactag

SEQ ID NO: 78502 - protein, 322 aa, Arabidopsis thaliana
  peptide (1)..(322): Ceres Seq. ID no. 12641981
  misc_feature (88)..(318): Pfam Name: alpha/beta hydrolase fold Pfam Description: alpha/beta hydrolase fold
  misc_feature (1)..(322): Homolog of NCBI NO: 15228496 NR Description: hypothetical protein; protein id: At3g03230.1 thaliana] >gi|6714415|gb|AAF26103.1|AC012328_6 hypothetical
  misc_feature (1)..(321): Homolog of NCBI NO: 30678800 NR Description: esterase/lipase/thioesterase family [Arabidopsis
  misc_feature (1)..(321): Homolog of NCBI NO: 6714434 NR Description: hypothetical protein [Arabidopsis thaliana]
  misc_feature (2)..(318): Homolog of NCBI NO: 15242253 NR Description: putative protein; protein id: At5g22460.1, by cDNA: gi_15292740, supported by cDNA: gi_20465594 [Arabidopsis
  misc_feature (4)..(319): Homolog of NCBI NO: 21592662 NR Description: unknown [Arabidopsis thaliana]
  misc_feature (4)..(319): Homolog of NCBI NO: 18410582 NR Description: expressed protein; protein id: At1g74300.1, by cDNA: 31039. [Arabidopsis thaliana] >gi|25406334|pir||E96771
  misc_feature (2)..(303): Homolog of NCBI NO: 34908462 NR Description: P0683F02.22 [Oryza sativa (japonica
  misc_feature (2)..(318): Homolog of NCBI NO: 15228377 NR Description: putative protein; protein id: At3g48410.1, by cDNA: gi_17529095 [Arabidopsis thaliana]
  misc_feature (3)..(318): Homolog of NCBI NO: 21537089 NR Description: unknown [Arabidopsis thaliana]
  misc_feature (3)..(318): Homolog of NCBI NO: 18410575 NR Description: expressed protein; protein id: At1g74280.1, by cDNA: 119889. [Arabidopsis thaliana] >gi|25406331|pir||C96771
MVLLLVIVGLISYYVYKSITPPPPIPLPENVSEISPRIKLNDGRHLAYKELGFPKDKAKNKIIIVHGNGNSKDVDLYITQEMIDEFKIYFLFFDRAGYGESDPNPTRTLKTDTYDIEELADKLQVGPKFHVIGMSLGAYPVYGCLKYIPNRLSGASLVVPLVNFWWSRVPQNLLNAAMKKLPIGFQLTLRVAHYSPWLLYWWMTQKWFPNSRNPKDTMTERDLELESALRQGGYVTTQQDIIAGYGNWEFDPTELKNPFSDSNKGSVHMWCALEDKQISRDVLLYICDKLPWIKLHEVPDGGHYIIHEKRHFEAIIKAACSD

SEQ ID NO: 78503 - protein, 241 aa, Arabidopsis thaliana
  peptide (1)..(241): Ceres Seq. ID no. 12641982
  misc_feature (7)..(237): Pfam Name: alpha/beta hydrolase fold Pfam Description: alpha/beta hydrolase fold
  misc_feature (1)..(241): Homolog of NCBI NO: 15228496 NR Description: hypothetical protein; protein id: At3g03230.1 thaliana] >gi|6714415|gb|AAF26103.1|AC012328_6 hypothetical
  misc_feature (1)..(240): Homolog of NCBI NO: 30678800 NR Description: esterase/lipase/thioesterase family [Arabidopsis
  misc_feature (1)..(240): Homolog of NCBI NO: 6714434 NR Description: hypothetical protein [Arabidopsis thaliana]
  misc_feature (1)..(237): Homolog of NCBI NO: 15242253 NR Description: putative protein; protein id: At5g22460.1, by cDNA: gi_15292740, supported by cDNA: gi_20465594 [Arabidopsis
  misc_feature (1)..(238): Homolog of NCBI NO: 21592662 NR Description: unknown [Arabidopsis thaliana]
  misc_feature (1)..(238): Homolog of NCBI NO: 18410582 NR Description: expressed protein; protein id: At1g74300.1, by cDNA: 31039. [Arabidopsis thaliana] >gi|25406334|pir||E96771
  misc_feature (1)..(222): Homolog of NCBI NO: 34908462 NR Description: P0683F02.22 [Oryza sativa (japonica
  misc_feature (1)..(237): Homolog of NCBI NO: 15228377 NR Description: putative protein; protein id: At3g48410.1, by cDNA: gi_17529095 [Arabidopsis thaliana]
  misc_feature (1)..(237): Homolog of NCBI NO: 21537089 NR Description: unknown [Arabidopsis thaliana]
  misc_feature (1)..(237): Homolog of NCBI NO: 18410575 NR Description: expressed protein; protein id: At1g74280.1, by cDNA: 119889. [Arabidopsis thaliana] >gi|25406331|pir||C96771
MIDEFKIYFLFFDRAGYGESDPNPTRTLKTDTYDIEELADKLQVGPKFHVIGMSLGAYPVYGCLKYIPNRLSGASLVVPLVNFWWSRVPQNLLNAAMKKLPIGFQLTLRVAHYSPWLLYWWMTQKWFPNSRNPKDTMTERDLELESALRQGGYVTTQQDIIAGYGNWEFDPTELKNPFSDSNKGSVHMWCALEDKQISRDVLLYICDKLPWIKLHEVPDGGHYIIHEKRHFEAIIKAACSD

SEQ ID NO: 78504 - protein, 189 aa, Arabidopsis thaliana
  peptide (1)..(189): Ceres Seq. ID no. 12641983
  misc_feature (1)..(185): Pfam Name: alpha/beta hydrolase fold Pfam Description: alpha/beta hydrolase fold
  misc_feature (1)..(189): Homolog of NCBI NO: 15228496 NR Description: hypothetical protein; protein id: At3g03230.1 thaliana] >gi|6714415|gb|AAF26103.1|AC012328_6 hypothetical
  misc_feature (1)..(188): Homolog of NCBI NO: 30678800 NR Description: esterase/lipase/thioesterase family [Arabidopsis
  misc_feature (1)..(188): Homolog of NCBI NO: 6714434 NR Description: hypothetical protein [Arabidopsis thaliana]
  misc_feature (1)..(185): Homolog of NCBI NO: 15242253 NR Description: putative protein; protein id: At5g22460.1, by cDNA: gi_15292740, supported by cDNA: gi_20465594 [Arabidopsis
  misc_feature (1)..(186): Homolog of NCBI NO: 21592662 NR Description: unknown [Arabidopsis thaliana]
  misc_feature (1)..(186): Homolog of NCBI NO: 18410582 NR Description: expressed protein; protein id: At1g74300.1, by cDNA: 31039. [Arabidopsis thaliana] >gi|25406334|pir||E96771
  misc_feature (1)..(170): Homolog of NCBI NO: 34908462 NR Description: P0683F02.22 [Oryza sativa (japonica
  misc_feature (1)..(185): Homolog of NCBI NO: 15228377 NR Description: putative protein; protein id: At3g48410.1, by cDNA: gi_17529095 [Arabidopsis thaliana]
  misc_feature (1)..(185): Homolog of NCBI NO: 21537089 NR Description: unknown [Arabidopsis thaliana]
  misc_feature (1)..(185): Homolog of NCBI NO: 18410575 NR Description: expressed protein; protein id: At1g74280.1, by cDNA: 119889. [Arabidopsis thaliana] >gi|25406331|pir||C96771
MSLGAYPVYGCLKYIPNRLSGASLVVPLVNFWWSRVPQNLLNAAMKKLPIGFQLTLRVAHYSPWLLYWWMTQKWFPNSRNPKDTMTERDLELESALRQGGYVTTQQDIIAGYGNWEFDPTELKNPFSDSNKGSVHMWCALEDKQISRDVLLYICDKLPWIKLHEVPDGGHYIIHEKRHFEAIIKAACSD

SEQ ID NO: 78505 - DNA, 969 bp, Arabidopsis thaliana
  misc_feature (1)..(969): Ceres Seq. ID no. 12641984
  misc_feature: MA Experiment ID: 20000355 Result: Up-regulated in Transcription
  misc_feature: MA Experiment 20000355 PARAMETER Experiment Name: At_Siliques_Sub_P Parameter: Age (day) Value: 21
  misc_feature: MA Experiment 20000355 PARAMETER Experiment Name: At_Siliques_Sub_P Parameter: Organism Value: A. thaliana
  misc_feature: MA Experiment 20000355 PARAMETER Experiment Name: At_Siliques_Sub_P Parameter: Plant Line Value: WS
  misc_feature: MA Experiment 20000355 PARAMETER Experiment Name: At_Siliques_Sub_P Parameter: Tissue Value: Less Than 5mm Siliques vs. Whole Plant
  misc_feature: MA Experiment ID: 20000440 Result: Down-regulated in Transcription
  misc_feature: MA Experiment 20000440 PARAMETER Experiment Name: At_Closed-Flower__Sub_P Parameter: Tissue Value: Closed Flower vs. Whole Plant
atgttgtttctaaccgcggctgtctgtttaatatgcttttacgtctacaagtccgtgaaaccgccgccgccaattccattgccggagaatgtttctgagatatctccaagaatcaagctcaacgatggcagatatttagcttacaaagaattagggtttcctaaagacaaagccaaaaataagattatcattctccatggattcgggagttccaagttagtggatttaaaaatcacacaggaaatgatcgacgaattcgagatatacttcttgttgttcgatagagctggttatggagaaagcgatcctcatccatcacgaacactaaaaacggatacatatgacatcgaagaacttgctgacaaattgcaaatcggtccaaagttccatgtcctaggaatgtcactcggggcttatccagtttacggctgtctcaagtacattcctcatagactaagtggagcaacgttggtggttccgatactgaatttttggtggagttgtctgcctctaaacttgtcgatttcagcgttcaagaaattgccaattcaaaatcagtggacacttggagtcgcacactactttccatggttattatattggtggatgactcagaaatggttttccccatttagtcagaatcctagagaaactatgaccgagcgcgatatagagctcgaatccgcactacgacaaggtgaatatgtgagcatgcaacgagacatcattgcgggttacgagaattgggagtttgatccaaccgaactgagcaatccattttcagatgataacaaagggtcagttcacatttggtgtgcactcgaagacaaacaaatttcgcatgaggttttactctacttatgtgataagcttccatggataaagcttcatgaagtccctgatgctggacatcttattatccatgagaagcagcattttgaagacattattaaagccgcttgtagttga

SEQ ID NO: 78506 - protein, 322 aa, Arabidopsis thaliana
  peptide (1)..(322): Ceres Seq. ID no. 12641985
  misc_feature (88)..(319): Pfam Name: alpha/beta hydrolase fold Pfam Description: alpha/beta hydrolase fold
  misc_feature (1)..(322): Homolog of NCBI NO: 30678800 NR Description: esterase/lipase/thioesterase family [Arabidopsis
  misc_feature (1)..(322): Homolog of NCBI NO: 6714434 NR Description: hypothetical protein [Arabidopsis thaliana]
  misc_feature (1)..(322): Homolog of NCBI NO: 15228496 NR Description: hypothetical protein; protein id: At3g03230.1 thaliana] >gi|6714415|gb|AAF26103.1|AC012328_6 hypothetical
  misc_feature (1)..(319): Homolog of NCBI NO: 15242253 NR Description: putative protein; protein id: At5g22460.1, by cDNA: gi_15292740, supported by cDNA: gi_20465594 [Arabidopsis
  misc_feature (2)..(307): Homolog of NCBI NO: 34908462 NR Description: P0683F02.22 [Oryza sativa (japonica
  misc_feature (8)..(319): Homolog of NCBI NO: 21537089 NR Description: unknown [Arabidopsis thaliana]
  misc_feature (8)..(320): Homolog of NCBI NO: 18410582 NR Description: expressed protein; protein id: At1g74300.1, by cDNA: 31039. [Arabidopsis thaliana] >gi|25406334|pir||E96771
  misc_feature (8)..(320): Homolog of NCBI NO: 21592662 NR Description: unknown [Arabidopsis thaliana]
  misc_feature (8)..(319): Homolog of NCBI NO: 18410575 NR Description: expressed protein; protein id: At1g74280.1, by cDNA: 119889. [Arabidopsis thaliana] >gi|25406331|pir||C96771
  misc_feature (2)..(319): Homolog of NCBI NO: 15228377 NR Description: putative protein; protein id: At3g48410.1, by cDNA: gi_17529095 [Arabidopsis thaliana]
MLFLTAAVCLICFYVYKSVKPPPPIPLPENVSEISPRIKLNDGRYLAYKELGFPKDKAKNKIIILHGFGSSKLVDLKITQEMIDEFEIYFLLFDRAGYGESDPHPSRTLKTDTYDIEELADKLQIGPKFHVLGMSLGAYPVYGCLKYIPHRLSGATLVVPILNFWWSCLPLNLSISAFKKLPIQNQWTLGVAHYFPWLLYWWMTQKWFSPFSQNPRETMTERDIELESALRQGEYVSMQRDIIAGYENWEFDPTELSNPFSDDNKGSVHIWCALEDKQISHEVLLYLCDKLPWIKLHEVPDAGHLIIHEKQHFEDIIKAACS

SEQ ID NO: 78507 - protein, 241 aa, Arabidopsis thaliana
  peptide (1)..(241): Ceres Seq. ID no. 12641986
  misc_feature (7)..(238): Pfam Name: alpha/beta hydrolase fold Pfam Description: alpha/beta hydrolase fold
  misc_feature (1)..(241): Homolog of NCBI NO: 30678800 NR Description: esterase/lipase/thioesterase family [Arabidopsis
  misc_feature (1)..(241): Homolog of NCBI NO: 6714434 NR Description: hypothetical protein [Arabidopsis thaliana]
  misc_feature (1)..(241): Homolog of NCBI NO: 15228496 NR Description: hypothetical protein; protein id: At3g03230.1 thaliana] >gi|6714415|gb|AAF26103.1|AC012328_6 hypothetical
  misc_feature (1)..(238): Homolog of NCBI NO: 15242253 NR Description: putative protein; protein id: At5g22460.1, by cDNA: gi_15292740, supported by cDNA: gi_20465594 [Arabidopsis
  misc_feature (1)..(226): Homolog of NCBI NO: 34908462 NR Description: P0683F02.22 [Oryza sativa (japonica
  misc_feature (1)..(238): Homolog of NCBI NO: 21537089 NR Description: unknown [Arabidopsis thaliana]
  misc_feature (1)..(239): Homolog of NCBI NO: 18410582 NR Description: expressed protein; protein id: At1g74300.1, by cDNA: 31039. [Arabidopsis thaliana] >gi|25406334|pir||E96771
  misc_feature (1)..(239): Homolog of NCBI NO: 21592662 NR Description: unknown [Arabidopsis thaliana]
  misc_feature (1)..(238): Homolog of NCBI NO: 18410575 NR Description: expressed protein; protein id: At1g74280.1, by cDNA: 119889. [Arabidopsis thaliana] >gi|25406331|pir||C96771
  misc_feature (1)..(238): Homolog of NCBI NO: 15228377 NR Description: putative protein; protein id: At3g48410.1, by cDNA: gi_17529095 [Arabidopsis thaliana]
MIDEFEIYFLLFDRAGYGESDPHPSRTLKTDTYDIEELADKLQIGPKFHVLGMSLGAYPVYGCLKYIPHRLSGATLVVPILNFWWSCLPLNLSISAFKKLPIQNQWTLGVAHYFPWLLYWWMTQKWFSPFSQNPRETMTERDIELESALRQGEYVSMQRDIIAGYENWEFDPTELSNPFSDDNKGSVHIWCALEDKQISHEVLLYLCDKLPWIKLHEVPDAGHLIIHEKQHFEDIIKAACS

SEQ ID NO: 78508 - protein, 189 aa, Arabidopsis thaliana
  peptide (1)..(189): Ceres Seq. ID no. 12641987
  misc_feature (1)..(186): Pfam Name: alpha/beta hydrolase fold Pfam Description: alpha/beta hydrolase fold
  misc_feature (1)..(189): Homolog of NCBI NO: 30678800 NR Description: esterase/lipase/thioesterase family [Arabidopsis
  misc_feature (1)..(189): Homolog of NCBI NO: 6714434 NR Description: hypothetical protein [Arabidopsis thaliana]
  misc_feature (1)..(189): Homolog of NCBI NO: 15228496 NR Description: hypothetical protein; protein id: At3g03230.1 thaliana] >gi|6714415|gb|AAF26103.1|AC012328_6 hypothetical
  misc_feature (1)..(186): Homolog of NCBI NO: 15242253 NR Description: putative protein; protein id: At5g22460.1, by cDNA: gi_15292740, supported by cDNA: gi_20465594 [Arabidopsis
  misc_feature (1)..(174): Homolog of NCBI NO: 34908462 NR Description: P0683F02.22 [Oryza sativa (japonica
  misc_feature (1)..(186): Homolog of NCBI NO: 21537089 NR Description: unknown [Arabidopsis thaliana]
  misc_feature (1)..(187): Homolog of NCBI NO: 18410582 NR Description: expressed protein; protein id: At1g74300.1, by cDNA: 31039. [Arabidopsis thaliana] >gi|25406334|pir||E96771
  misc_feature (1)..(187): Homolog of NCBI NO: 21592662 NR Description: unknown [Arabidopsis thaliana]
  misc_feature (1)..(186): Homolog of NCBI NO: 18410575 NR Description: expressed protein; protein id: At1g74280.1, by cDNA: 119889. [Arabidopsis thaliana] >gi|25406331|pir||C96771
  misc_feature (1)..(186): Homolog of NCBI NO: 15228377 NR Description: putative protein; protein id: At3g48410.1, by cDNA: gi_17529095 [Arabidopsis thaliana]
MSLGAYPVYGCLKYIPHRLSGATLVVPILNFWWSCLPLNLSISAFKKLPIQNQWTLGVAHYFPWLLYWWMTQKWFSPFSQNPRETMTERDIELESALRQGEYVSMQRDIIAGYENWEFDPTELSNPFSDDNKGSVHIWCALEDKQISHEVLLYLCDKLPWIKLHEVPDAGHLIIHEKQHFEDIIKAACS

SEQ ID NO: 78509 - DNA, 1070 bp, Arabidopsis thaliana
  misc_feature (1)..(1070): Ceres Seq. ID no. 12642101
  misc_feature: MA Experiment ID: 108434 Result: Down-regulated in Transcription
  misc_feature: MA Experiment 108434 PARAMETER Experiment Name: At_Root_Tips_cDNA_P Parameter: Tissue Value: Root Tips
  misc_feature: MA Experiment ID: 108461 Result: Up-regulated in Transcription
  misc_feature: MA Experiment 108461 PARAMETER Experiment Name: At_Germinating_Seeds_cDNA_P Parameter: Age (day) Value: 1 vs. 0
  misc_feature: MA Experiment 108461 PARAMETER Experiment Name: At_Germinating_Seeds_cDNA_P Parameter: Tissue Value: Germinating Seeds
  misc_feature: MA Experiment ID: 108462 Result: Up-regulated in Transcription
  misc_feature: MA Experiment 108462 PARAMETER Experiment Name: At_Germinating_Seeds_cDNA_P Parameter: Age (day) Value: 2 vs. 0
  misc_feature: MA Experiment 108462 PARAMETER Experiment Name: At_Germinating_Seeds_cDNA_P Parameter: Tissue Value: Germinating Seeds
  misc_feature: MA Experiment ID: 108463 Result: Up-regulated in Transcription
  misc_feature: MA Experiment 108463 PARAMETER Experiment Name: At_Germinating_Seeds_cDNA_P Parameter: Age (day) Value: 3 vs. 0
  misc_feature: MA Experiment 108463 PARAMETER Experiment Name: At_Germinating_Seeds_cDNA_P Parameter: Tissue Value: Germinating Seeds
  misc_feature: MA Experiment ID: 108464 Result: Up-regulated in Transcription
  misc_feature: MA Experiment 108464 PARAMETER Experiment Name: At_Germinating_Seeds_cDNA_P Parameter: Age (day) Value: 4 vs. 0
  misc_feature: MA Experiment 108464 PARAMETER Experiment Name: At_Germinating_Seeds_cDNA_P Parameter: Tissue Value: Germinating Seeds
  misc_feature: MA Experiment ID: 108573 Result: Up-regulated in Transcription
  misc_feature: MA Experiment 108573 PARAMETER Experiment Name: At_Drought_cDNA_P Parameter: Timepoint (hr) Value: 6
  misc_feature: MA Experiment 108573 PARAMETER Experiment Name: At_Drought_cDNA_P Parameter: Tissue Value: Aerial
  misc_feature: MA Experiment 108573 PARAMETER Experiment Name: At_Drought_cDNA_P Parameter: Treatment Value: Drought vs. No Drought
  misc_feature: MA Experiment ID: 108574 Result: Up-regulated in Transcription
  misc_feature: MA Experiment 108574 PARAMETER Experiment Name: At_Wounding__cDNA_P Parameter: Timepoint (hr) Value: 1
  misc_feature: MA Experiment 108574 PARAMETER Experiment Name: At_Wounding__cDNA_P Parameter: Tissue Value: Aerial
  misc_feature: MA Experiment 108574 PARAMETER Experiment Name: At_Wounding__cDNA_P Parameter: Treatment Value: Wounding vs. No Wounding
  misc_feature: MA Experiment ID: 20000069 Result: Down-regulated in Transcription
  misc_feature: MA Experiment 20000069 PARAMETER Experiment Name: At_100uM_ABA_Mutants_cDNA_P Parameter: Plant Line Value: CS23
  misc_feature: MA Experiment 20000069 PARAMETER Experiment Name: At_100uM_ABA_Mutants_cDNA_P Parameter: Timepoint (hr) Value: 6
  misc_feature: MA Experiment 20000069 PARAMETER Experiment Name: At_100uM_ABA_Mutants_cDNA_P Parameter: Tissue Value: Aerial
  misc_feature: MA Experiment 20000069 PARAMETER Experiment Name: At_100uM_ABA_Mutants_cDNA_P Parameter: Treatment Value: 100uM ABA vs. No Treatment
  misc_feature: MA Experiment ID: 20000180 Result: Up-regulated in Transcription
  misc_feature: MA Experiment 20000180 PARAMETER Experiment Name: At_Germinating_Seeds_P Parameter: Age (hr) Value: 24 vs. 0
  misc_feature: MA Experiment 20000180 PARAMETER Experiment Name: At_Germinating_Seeds_P Parameter: Tissue Value: Germinating Seeds
  misc_feature: MA Experiment ID: 20000211 Result: Up-regulated in Transcription
  misc_feature: MA Experiment 20000211 PARAMETER Experiment Name: At_0.001percent_MeJA__P Parameter: Age (day) Value: 14
  misc_feature: MA Experiment 20000211 PARAMETER Experiment Name: At_0.001percent_MeJA__P Parameter: Organism Value: A. thaliana
  misc_feature: MA Experiment 20000211 PARAMETER Experiment Name: At_0.001percent_MeJA__P Parameter: Plant Line Value: WS
  misc_feature: MA Experiment 20000211 PARAMETER Experiment Name: At_0.001percent_MeJA__P Parameter: Timepoint (hr) Value: 1
  misc_feature: MA Experiment 20000211 PARAMETER Experiment Name: At_0.001percent_MeJA__P Parameter: Tissue Value: Aerial
  misc_feature: MA Experiment 20000211 PARAMETER Experiment Name: At_0.001percent_MeJA__P Parameter: Treatment Value: 0.001percent MeJA vs. No Treatment
  misc_feature: MA Experiment ID: 20000227 Result: Down-regulated in Transcription
  misc_feature: MA Experiment 20000227 PARAMETER Experiment Name: At_Root-Tips-vs-Tops_P Parameter: Tissue Value: Root Tips vs. Root Tops
  misc_feature: MA Experiment ID: 20000269 Result: Down-regulated in Transcription
  misc_feature: MA Experiment 20000269 PARAMETER Experiment Name: At_1mM_KNO3_L-vs-H_Roots_P Parameter: Age (day) Value: 7,10,12
  misc_feature: MA Experiment 20000269 PARAMETER Experiment Name: At_1mM_KNO3_L-vs-H_Roots_P Parameter: Organism Value: A. thaliana
  misc_feature: MA Experiment 20000269 PARAMETER Experiment Name: At_1mM_KNO3_L-vs-H_Roots_P Parameter: Plant Line Value: WS
  misc_feature: MA Experiment 20000269 PARAMETER Experiment Name: At_1mM_KNO3_L-vs-H_Roots_P Parameter: Timepoint (day) Value: 7,10,12
  misc_feature: MA Experiment 20000269 PARAMETER Experiment Name: At_1mM_KNO3_L-vs-H_Roots_P Parameter: Tissue Value: Roots
  misc_feature: MA Experiment 20000269 PARAMETER Experiment Name: At_1mM_KNO3_L-vs-H_Roots_P Parameter: Treatment Value: 1mM KNO3 vs. 50mM KNO3
  misc_feature: MA Experiment ID: 20001555 Result: Down-regulated in Transcription
  misc_feature: MA Experiment 20001555 PARAMETER Experiment Name: At_Drought_Soil_Dry_P Parameter: Age (day) Value: 24
  misc_feature: MA Experiment 20001555 PARAMETER Experiment Name: At_Drought_Soil_Dry_P Parameter: Organism Value: A. thaliana
  misc_feature: MA Experiment 20001555 PARAMETER Experiment Name: At_Drought_Soil_Dry_P Parameter: Plant Line Value: WS
  misc_feature: MA Experiment 20001555 PARAMETER Experiment Name: At_Drought_Soil_Dry_P Parameter: Post Timepoint (hr) Value: None
  misc_feature: MA Experiment 20001555 PARAMETER Experiment Name: At_Drought_Soil_Dry_P Parameter: Post-Treatment Value: None
  misc_feature: MA Experiment 20001555 PARAMETER Experiment Name: At_Drought_Soil_Dry_P Parameter: Timepoint (day) Value: 10
  misc_feature: MA Experiment 20001555 PARAMETER Experiment Name: At_Drought_Soil_Dry_P Parameter: Treatment Value: Drought vs. No Drought
  misc_feature: MA Experiment ID: 20001556 Result: Down-regulated in Transcription
  misc_feature: MA Experiment 20001556 PARAMETER Experiment Name: At_Drought_Soil_Dry_P Parameter: Age (day) Value: 26
  misc_feature: MA Experiment 20001556 PARAMETER Experiment Name: At_Drought_Soil_Dry_P Parameter: Organism Value: A. thaliana
  misc_feature: MA Experiment 20001556 PARAMETER Experiment Name: At_Drought_Soil_Dry_P Parameter: Plant Line Value: WS
  misc_feature: MA Experiment 20001556 PARAMETER Experiment Name: At_Drought_Soil_Dry_P Parameter: Post Timepoint (hr) Value: None
  misc_feature: MA Experiment 20001556 PARAMETER Experiment Name: At_Drought_Soil_Dry_P Parameter: Post-Treatment Value: None
  misc_feature: MA Experiment 20001556 PARAMETER Experiment Name: At_Drought_Soil_Dry_P Parameter: Timepoint (day) Value: 12
  misc_feature: MA Experiment 20001556 PARAMETER Experiment Name: At_Drought_Soil_Dry_P Parameter: Treatment Value: Drought vs. No Drought
  misc_feature: MA Experiment ID: 20001559 Result: Down-regulated in Transcription
  misc_feature: MA Experiment 20001559 PARAMETER Experiment Name: At_Drought_Soil_Dry_P Parameter: Age (day) Value: 28
  misc_feature: MA Experiment 20001559 PARAMETER Experiment Name: At_Drought_Soil_Dry_P Parameter: Organism Value: A. thaliana
  misc_feature: MA Experiment 20001559 PARAMETER Experiment Name: At_Drought_Soil_Dry_P Parameter: Plant Line Value: WS
  misc_feature: MA Experiment 20001559 PARAMETER Experiment Name: At_Drought_Soil_Dry_P Parameter: Post Timepoint (hr) Value: 29
  misc_feature: MA Experiment 20001559 PARAMETER Experiment Name: At_Drought_Soil_Dry_P Parameter: Post-Treatment Value: Re-Water vs. No Drought
  misc_feature: MA Experiment 20001559 PARAMETER Experiment Name: At_Drought_Soil_Dry_P Parameter: Timepoint (day) Value: 14
  misc_feature: MA Experiment 20001559 PARAMETER Experiment Name: At_Drought_Soil_Dry_P Parameter: Treatment Value: Drought vs. No Drought
  misc_feature: MA Experiment ID: 20001757 Result: Up-regulated in Transcription
  misc_feature: MA Experiment 20001757 PARAMETER Experiment Name: At_50mM_NH4NO3_L-to-H_P Parameter: Timepoint (hr) Value: 6
  misc_feature: MA Experiment 20001757 PARAMETER Experiment Name: At_50mM_NH4NO3_L-to-H_P Parameter: Tissue Value: Leaf
  misc_feature: MA Experiment 20001757 PARAMETER Experiment Name: At_50mM_NH4NO3_L-to-H_P Parameter: Treatment Value: 50mM NH4NO3 vs 100mM Mannitol
  misc_feature: MA Experiment ID: 20001904 Result: Down-regulated in Transcription
  misc_feature: MA Experiment 20001904 PARAMETER Experiment Name: At_Drought_Reproduction_P Parameter: Age (day) Value: 37
  misc_feature: MA Experiment 20001904 PARAMETER Experiment Name: At_Drought_Reproduction_P Parameter: Organism Value: A. thaliana
  misc_feature: MA Experiment 20001904 PARAMETER Experiment Name: At_Drought_Reproduction_P Parameter: Plant Line Value: WS
  misc_feature: MA Experiment 20001904 PARAMETER Experiment Name: At_Drought_Reproduction_P Parameter: Timepoint (day) Value: 7
  misc_feature: MA Experiment 20001904 PARAMETER Experiment Name: At_Drought_Reproduction_P Parameter: Tissue Value: Rosettes
  misc_feature: MA Experiment 20001904 PARAMETER Experiment Name: At_Drought_Reproduction_P Parameter: Treatment Value: Drought vs. No Drought
  misc_feature: MA Experiment ID: 20001905 Result: Down-regulated in Transcription
  misc_feature: MA Experiment 20001905 PARAMETER Experiment Name: At_Drought_Reproduction_P Parameter: Age (day) Value: 40
  misc_feature: MA Experiment 20001905 PARAMETER Experiment Name: At_Drought_Reproduction_P Parameter: Organism Value: A. thaliana
  misc_feature: MA Experiment 20001905 PARAMETER Experiment Name: At_Drought_Reproduction_P Parameter: Plant Line Value: WS
  misc_feature: MA Experiment 20001905 PARAMETER Experiment Name: At_Drought_Reproduction_P Parameter: Timepoint (day) Value: 10
  misc_feature: MA Experiment 20001905 PARAMETER Experiment Name: At_Drought_Reproduction_P Parameter: Tissue Value: Rosettes
  misc_feature: MA Experiment 20001905 PARAMETER Experiment Name: At_Drought_Reproduction_P Parameter: Treatment Value: Drought vs. No Drought
aaacccaaacacataaaaaaatgagtcaacacaacatcttagaagctctaaatgtccgggtcgtgggtacgggtgatcggatcctgtttttggcccatggattcggtactgaccaatcagcttggcacttgatccttccttacttcactcaaaactacagagtcgtcctctatgacctagtttgcgccggcagtgtcaaccccgattacttcgatttcaatcgttacacaactctcgatccttacgtcgatgatcttctcaacatcgttgattcactcggaatccaaaactgtgcttacgttggtcactctgtttccgctatgatcggaatcatcgcttcgattcgtcggccggagcttttctccaagcttatcttgatcggattttcgcctaggtttctcaacgacgaggattatcatggaggattcgaagaaggtgagattgagaaagttttctcagctatggaagctaattacgaagcttgggttcatggatttgctccgcttgctgttggagctgatgttccggcggcggttagagaatttagccggactttgtttaatatgcgtccggatatatctctgtttgtttcgaggacggttttcaacagcgatctgagaggtgtgcttgggttagttagagttccgacgtgtgtgattcagacggcgaaggatgtttctgtgccggcttcggtggcggagtatcttaggtctcatctcggtggagatactactgtggagactcttaaaactgaaggacatttgccgcagcttagtgctccggcgcagcttgctcagtttctccggcgagctcttcctcggtgacttttttttatagatataaaaagagaacaataaaatataattggtggaatatgggtttagtggggtccacgtatcgaagaaaagaagggcctctatttgtggaggacagtttggcattgtcacaaatctagtaagataagattgttcacttgacacgtgactttcgcttttttatcactttttttcttgctctcttcattagtttataatcacaagtttatttcataaaataattggagaataacc

SEQ ID NO: 78510 - protein, 273 aa, Arabidopsis thaliana
  peptide (1)..(273): Ceres Seq. ID no. 12642102
  misc_feature (52)..(269): Pfam Name: alpha/beta hydrolase fold Pfam Description: alpha/beta hydrolase fold
  misc_feature (7)..(273): Homolog of NCBI NO: 18396732 NR Description: expressed protein; protein id: At3g03990.1, by cDNA: 6052., supported by cDNA: gi_17381266, supported by gi_20453358 [Arabidopsis thaliana]
  misc_feature (7)..(273): Homolog of NCBI NO: 21593927 NR Description: unknown [Arabidopsis thaliana]
  misc_feature (132)..(260): Homolog of NCBI NO: 40736991 NR Description: putative hydrolases [Oryza sativa (japonica
  misc_feature (14)..(133): Homolog of NCBI NO: 40736991 NR Description: putative hydrolases [Oryza sativa (japonica
  misc_feature (14)..(269): Homolog of NCBI NO: 15235567 NR Description: putative protein; protein id: At4g37470.1, by cDNA: gi_15810302, supported by cDNA: gi_20259140 [Arabidopsis
  misc_feature (17)..(268): Homolog of NCBI NO: 24216360 NR Description: Predicted hydrolases or acyltransferases, hydrolase superfamily [Leptospira interrogans serovar lai str. >gi|24197640|gb|AAN50859.1|AE011521_5 Predicted hydrolases or
  misc_feature (4)..(271): Homolog of NCBI NO: 15230110 NR Description: unknown protein; protein id: At3g24420.1
  misc_feature (11)..(269): Homolog of NCBI NO: 23136603 NR Description: hypothetical protein [Cytophaga hutchinsonii]
  misc_feature (18)..(269): Homolog of NCBI NO: 22298700 NR Description: ORF_ID:tlr1157~hypothetical protein
  misc_feature (16)..(271): Homolog of NCBI NO: 34912326 NR Description: P0451D05.26 [Oryza sativa (japonica
TQTHKKMSQHNILEALNVRVVGTGDRILFLAHGFGTDQSAWHLILPYFTQNYRVVLYDLVCAGSVNPDYFDFNRYTTLDPYVDDLLNIVDSLGIQNCAYVGHSVSAMIGIIASIRRPELFSKLILIGFSPRFLNDEDYHGGFEEGEIEKVFSAMEANYEAWVHGFAPLAVGADVPAAVREFSRTLFNMRPDISLFVSRTVFNSDLRGVLGLVRVPTCVIQTAKDVSVPASVAEYLRSHLGGDTTVETLKTEGHLPQLSAPAQLAQFLRRALPR

SEQ ID NO: 78511 - protein, 267 aa, Arabidopsis thaliana; identical to SEQ ID NO: 27265
  peptide (1)..(267): Ceres Seq. ID no. 12642103
  misc_feature (46)..(263): Pfam Name: alpha/beta hydrolase fold Pfam Description: alpha/beta hydrolase fold
  misc_feature (1)..(267): Homolog of NCBI NO: 18396732 NR Description: expressed protein; protein id: At3g03990.1, by cDNA: 6052., supported by cDNA: gi_17381266, supported by gi_20453358 [Arabidopsis thaliana]
  misc_feature (1)..(267): Homolog of NCBI NO: 21593927 NR Description: unknown [Arabidopsis thaliana]
  misc_feature (126)..(254): Homolog of NCBI NO: 40736991 NR Description: putative hydrolases [Oryza sativa (japonica
  misc_feature (8)..(127): Homolog of NCBI NO: 40736991 NR Description: putative hydrolases [Oryza sativa (japonica
  misc_feature (8)..(263): Homolog of NCBI NO: 15235567 NR Description: putative protein; protein id: At4g37470.1, by cDNA: gi_15810302, supported by cDNA: gi_20259140 [Arabidopsis
  misc_feature (11)..(262): Homolog of NCBI NO: 24216360 NR Description: Predicted hydrolases or acyltransferases, hydrolase superfamily [Leptospira interrogans serovar lai str. >gi|24197640|gb|AAN50859.1|AE011521_5 Predicted hydrolases or
  misc_feature (1)..(265): Homolog of NCBI NO: 15230110 NR Description: unknown protein; protein id: At3g24420.1
  misc_feature (5)..(263): Homolog of NCBI NO: 23136603 NR Description: hypothetical protein [Cytophaga hutchinsonii]
  misc_feature (12)..(263): Homolog of NCBI NO: 22298700 NR Description: ORF_ID:tlr1157~hypothetical protein
  misc_feature (10)..(265): Homolog of NCBI NO: 34912326 NR Description: P0451D05.26 [Oryza sativa (japonica

SEQ ID NO: 78512 - protein, 167 aa, Arabidopsis thaliana; identical to SEQ ID NO: 27266
  peptide (1)..(167): Ceres Seq. ID no. 12642104
  misc_feature (1)..(163): Pfam Name: alpha/beta hydrolase fold Pfam Description: alpha/beta hydrolase fold
  misc_feature (1)..(167): Homolog of NCBI NO: 18396732 NR Description: expressed protein; protein id: At3g03990.1, by cDNA: 6052., supported by cDNA: gi_17381266, supported by gi_20453358 [Arabidopsis thaliana]
  misc_feature (1)..(167): Homolog of NCBI NO: 21593927 NR Description: unknown [Arabidopsis thaliana]
  misc_feature (26)..(154): Homolog of NCBI NO: 40736991 NR Description: putative hydrolases [Oryza sativa (japonica
  misc_feature (1)..(27): Homolog of NCBI NO: 40736991 NR Description: putative hydrolases [Oryza sativa (japonica
  misc_feature (1)..(163): Homolog of NCBI NO: 15235567 NR Description: putative protein; protein id: At4g37470.1, by cDNA: gi_15810302, supported by cDNA: gi_20259140 [Arabidopsis
  misc_feature (1)..(162): Homolog of NCBI NO: 24216360 NR Description: Predicted hydrolases or acyltransferases, hydrolase superfamily [Leptospira interrogans serovar lai str. >gi|24197640|gb|AAN50859.1|AE011521_5 Predicted hydrolases or
  misc_feature (1)..(165): Homolog of NCBI NO: 15230110 NR Description: unknown protein; protein id: At3g24420.1
  misc_feature (1)..(163): Homolog of NCBI NO: 23136603 NR Description: hypothetical protein [Cytophaga hutchinsonii]
  misc_feature (1)..(163): Homolog of NCBI NO: 22298700 NR Description: ORF_ID:tlr1157~hypothetical protein
  misc_feature (1)..(165): Homolog of NCBI NO: 34912326 NR Description: P0451D05.26 [Oryza sativa (japonica

SEQ ID NO: 78513 - DNA, 1487 bp, Arabidopsis thaliana
  misc_feature (1)..(1487): Ceres Seq. ID no. 12642105
  misc_feature: MA Experiment ID: 108434 Result: Down-regulated in Transcription
  misc_feature: MA Experiment 108434 PARAMETER Experiment Name: At_Root_Tips_cDNA_P Parameter: Tissue Value: Root Tips
  misc_feature: MA Experiment ID: 108461 Result: Up-regulated in Transcription
  misc_feature: MA Experiment 108461 PARAMETER Experiment Name: At_Germinating_Seeds_cDNA_P Parameter: Age (day) Value: 1 vs. 0
  misc_feature: MA Experiment 108461 PARAMETER Experiment Name: At_Germinating_Seeds_cDNA_P Parameter: Tissue Value: Germinating Seeds
  misc_feature: MA Experiment ID: 108488 Result: Down-regulated in Transcription
  misc_feature: MA Experiment ID: 108561 Result: Up-regulated in Transcription
  misc_feature: MA Experiment 108561 PARAMETER Experiment Name: At_100uM_ABA_cDNA_P Parameter: Timepoint (hr) Value: 6
  misc_feature: MA Experiment 108561 PARAMETER Experiment Name: At_100uM_ABA_cDNA_P Parameter: Tissue Value: Aerial
  misc_feature: MA Experiment 108561 PARAMETER Experiment Name: At_100uM_ABA_cDNA_P Parameter: Treatment Value: 100uM ABA vs. No Treatment
  misc_feature: MA Experiment ID: 108572 Result: Up-regulated in Transcription
  misc_feature: MA Experiment 108572 PARAMETER Experiment Name: At_Drought_cDNA_P Parameter: Timepoint (hr) Value: 1
  misc_feature: MA Experiment 108572 PARAMETER Experiment Name: At_Drought_cDNA_P Parameter: Tissue Value: Aerial
  misc_feature: MA Experiment 108572 PARAMETER Experiment Name: At_Drought_cDNA_P Parameter: Treatment Value: Drought vs. No Drought
  misc_feature: MA Experiment ID: 108585 Result: Up-regulated in Transcription
  misc_feature: MA Experiment 108585 PARAMETER Experiment Name: At_5mM_NaNP_cDNA_P Parameter: Timepoint (hr) Value: 6
  misc_feature: MA Experiment 108585 PARAMETER Experiment Name: At_5mM_NaNP_cDNA_P Parameter: Tissue Value: Aerial
  misc_feature: MA Experiment 108585 PARAMETER Experiment Name: At_5mM_NaNP_cDNA_P Parameter: Treatment Value: null
  misc_feature: MA Experiment ID: 20000069 Result: Up-regulated in Transcription
  misc_feature: MA Experiment 20000069 PARAMETER Experiment Name: At_100uM_ABA_Mutants_cDNA_P Parameter: Plant Line Value: CS23
  misc_feature: MA Experiment 20000069 PARAMETER Experiment Name: At_100uM_ABA_Mutants_cDNA_P Parameter: Timepoint (hr) Value: 6
  misc_feature: MA Experiment 20000069 PARAMETER Experiment Name: At_100uM_ABA_Mutants_cDNA_P Parameter: Tissue Value: Aerial
  misc_feature: MA Experiment 20000069 PARAMETER Experiment Name: At_100uM_ABA_Mutants_cDNA_P Parameter: Treatment Value: 100uM ABA vs. No Treatment
  misc_feature: MA Experiment ID: 20000070 Result: Up-regulated in Transcription
  misc_feature: MA Experiment 20000070 PARAMETER Experiment Name: At_100uM_ABA_Mutants_cDNA_P Parameter: Plant Line Value: CS24
  misc_feature: MA Experiment 20000070 PARAMETER Experiment Name: At_100uM_ABA_Mutants_cDNA_P Parameter: Timepoint (hr) Value: 6
  misc_feature: MA Experiment 20000070 PARAMETER Experiment Name: At_100uM_ABA_Mutants_cDNA_P Parameter: Tissue Value: Aerial
  misc_feature: MA Experiment 20000070 PARAMETER Experiment Name: At_100uM_ABA_Mutants_cDNA_P Parameter: Treatment Value: 100uM ABA vs. No Treatment
  misc_feature: MA Experiment ID: 20000071 Result: Up-regulated in Transcription
  misc_feature: MA Experiment 20000071 PARAMETER Experiment Name: At_100uM_ABA_Mutants_cDNA_P Parameter: Plant Line Value: CS8104
  misc_feature: MA Experiment 20000071 PARAMETER Experiment Name: At_100uM_ABA_Mutants_cDNA_P Parameter: Timepoint (hr) Value: 6
  misc_feature: MA Experiment 20000071 PARAMETER Experiment Name: At_100uM_ABA_Mutants_cDNA_P Parameter: Tissue Value: Aerial
  misc_feature: MA Experiment 20000071 PARAMETER Experiment Name: At_100uM_ABA_Mutants_cDNA_P Parameter: Treatment Value: 100uM ABA vs. No Treatment
  misc_feature: MA Experiment ID: 20000086 Result: Up-regulated in Transcription
  misc_feature: MA Experiment 20000086 PARAMETER Experiment Name: At_100uM_ABA_Mutants_cDNA_P Parameter: Plant Line Value: CS22
  misc_feature: MA Experiment 20000086 PARAMETER Experiment Name: At_100uM_ABA_Mutants_cDNA_P Parameter: Timepoint (hr) Value: 6
  misc_feature: MA Experiment 20000086 PARAMETER Experiment Name: At_100uM_ABA_Mutants_cDNA_P Parameter: Tissue Value: Aerial
  misc_feature: MA Experiment 20000086 PARAMETER Experiment Name: At_100uM_ABA_Mutants_cDNA_P Parameter: Treatment Value: 100uM ABA vs. No Treatment
  misc_feature: MA Experiment ID: 20000087 Result: Up-regulated in Transcription
  misc_feature: MA Experiment 20000087 PARAMETER Experiment Name: At_100uM_ABA_Mutants_cDNA_P Parameter: Plant Line Value: WS
  misc_feature: MA Experiment 20000087 PARAMETER Experiment Name: At_100uM_ABA_Mutants_cDNA_P Parameter: Timepoint (hr) Value: 6
  misc_feature: MA Experiment 20000087 PARAMETER Experiment Name: At_100uM_ABA_Mutants_cDNA_P Parameter: Tissue Value: Aerial
  misc_feature: MA Experiment 20000087 PARAMETER Experiment Name: At_100uM_ABA_Mutants_cDNA_P Parameter: Treatment Value: 100uM ABA vs. No Treatment
  misc_feature: MA Experiment ID: 20000117 Result: Up-regulated in Transcription
  misc_feature: MA Experiment 20000117 PARAMETER Experiment Name: At_100uM_ABA_Mutants_cDNA_P Parameter: Plant Line Value: Columbia
  misc_feature: MA Experiment 20000117 PARAMETER Experiment Name: At_100uM_ABA_Mutants_cDNA_P Parameter: Timepoint (hr) Value: 6
  misc_feature: MA Experiment 20000117 PARAMETER Experiment Name: At_100uM_ABA_Mutants_cDNA_P Parameter: Tissue Value: Aerial
  misc_feature: MA Experiment 20000117 PARAMETER Experiment Name: At_100uM_ABA_Mutants_cDNA_P Parameter: Treatment Value: 100uM ABA vs. No Treatment
  misc_feature: MA Experiment ID: 20000180 Result: Up-regulated in Transcription
  misc_feature: MA Experiment 20000180 PARAMETER Experiment Name: At_Germinating_Seeds_P Parameter: Age (hr) Value: 24 vs. 0
  misc_feature: MA Experiment 20000180 PARAMETER Experiment Name: At_Germinating_Seeds_P Parameter: Tissue Value: Germinating Seeds
  misc_feature: MA Experiment ID: 20000182 Result: Up-regulated in Transcription
  misc_feature: MA Experiment 20000182 PARAMETER Experiment Name: At_2mM_SA_P Parameter: Age (day) Value: 14
  misc_feature: MA Experiment 20000182 PARAMETER Experiment Name: At_2mM_SA_P Parameter: Organism Value: A. thaliana
  misc_feature: MA Experiment 20000182 PARAMETER Experiment Name: At_2mM_SA_P Parameter: Plant Line Value: WS
  misc_feature: MA Experiment 20000182 PARAMETER Experiment Name: At_2mM_SA_P Parameter: Timepoint (hr) Value: 6
  misc_feature: MA Experiment 20000182 PARAMETER Experiment Name: At_2mM_SA_P Parameter: Tissue Value: Aerial
  misc_feature: MA Experiment 20000182 PARAMETER Experiment Name: At_2mM_SA_P Parameter: Treatment Value: 2mM SA vs. No Treatment
  misc_feature: MA Experiment ID: 20000185 Result: Up-regulated in Transcription
  misc_feature: MA Experiment 20000185 PARAMETER Experiment Name: At_Roots__P Parameter: Age (day) Value: 7 vs. 21
  misc_feature: MA Experiment 20000185 PARAMETER Experiment Name: At_Roots__P Parameter: Organism Value: A. thaliana
  misc_feature: MA Experiment 20000185 PARAMETER Experiment Name: At_Roots__P Parameter: Tissue Value: Roots vs. Whole Plant
  misc_feature: MA Experiment ID: 20000224 Result: Down-regulated in Transcription
  misc_feature: MA Experiment ID: 20000234 Result: Down-regulated in Transcription
  misc_feature: MA Experiment 20000234 PARAMETER Experiment Name: At_Siliques_P Parameter: Age (day) Value: 21
  misc_feature: MA Experiment 20000234 PARAMETER Experiment Name: At_Siliques_P Parameter: Organism Value: A. thaliana
  misc_feature: MA Experiment 20000234 PARAMETER Experiment Name: At_Siliques_P Parameter: Plant Line Value: WS
  misc_feature: MA Experiment 20000234 PARAMETER Experiment Name: At_Siliques_P Parameter: Tissue Value: Less Than 5mm Siliques vs. Whole Plant
  misc_feature: MA Experiment ID: 20000235 Result: Down-regulated in Transcription
  misc_feature: MA Experiment 20000235 PARAMETER Experiment Name: At_Siliques_P Parameter: Age (day) Value: 21
  misc_feature: MA Experiment 20000235 PARAMETER Experiment Name: At_Siliques_P Parameter: Organism Value: A. thaliana
  misc_feature: MA Experiment 20000235 PARAMETER Experiment Name: At_Siliques_P Parameter: Plant Line Value: WS
  misc_feature: MA Experiment 20000235 PARAMETER Experiment Name: At_Siliques_P Parameter: Tissue Value: 5-10mm Siliques vs. Whole Plant
  misc_feature: MA Experiment ID: 20000265 Result: Down-regulated in Transcription
  misc_feature: MA Experiment 20000265 PARAMETER Experiment Name: At_Open_Flower_P Parameter: Age (day) Value: 21
  misc_feature: MA Experiment 20000265 PARAMETER Experiment Name: At_Open_Flower_P Parameter: Plant Line Value: WS
  misc_feature: MA Experiment 20000265 PARAMETER Experiment Name: At_Open_Flower_P Parameter: Tissue Value: Closed Flower vs. Whole Plant
  misc_feature: MA Experiment ID: 20000286 Result: Down-regulated in Transcription
  misc_feature: MA Experiment 20000286 PARAMETER Experiment Name: At_Open_Flower_P Parameter: Age (day) Value: 21
  misc_feature: MA Experiment 20000286 PARAMETER Experiment Name: At_Open_Flower_P Parameter: Plant Line Value: WS
  misc_feature: MA Experiment 20000286 PARAMETER Experiment Name: At_Open_Flower_P Parameter: Tissue Value: Half Open vs. Whole Plant
  misc_feature: MA Experiment ID: 20000438 Result: Down-regulated in Transcription
  misc_feature: MA Experiment 20000438 PARAMETER Experiment Name: At_Shoots__P Parameter: Age (day) Value: 14
  misc_feature: MA Experiment 20000438 PARAMETER Experiment Name: At_Shoots__P Parameter: Tissue Value: Shoots vs. Whole Plant
  misc_feature: MA Experiment ID: 20000439 Result: Up-regulated in Transcription
  misc_feature: MA Experiment 20000439 PARAMETER Experiment Name: At_Roots__P Parameter: Age (day) Value: 14 vs. 21
  misc_feature: MA Experiment 20000439 PARAMETER Experiment Name: At_Roots__P Parameter: Organism Value: A. thaliana
  misc_feature: MA Experiment 20000439 PARAMETER Experiment Name: At_Roots__P Parameter: Tissue Value: Roots vs. Whole Plant
  misc_feature: MA Experiment ID: 20000495 Result: Down-regulated in Transcription
  misc_feature: MA Experiment 20000495 PARAMETER Experiment Name: At_Guard_Cells_P Parameter: Harvest Date Value: 8/2/2002
  misc_feature: MA Experiment 20000495 PARAMETER Experiment Name: At_Guard_Cells_P Parameter: Organism Value: A. thaliana
  misc_feature: MA Experiment 20000495 PARAMETER Experiment Name: At_Guard_Cells_P Parameter: Tissue Value: Guard Cells vs. Leaves
  misc_feature: MA Experiment ID: 20001558 Result: Down-regulated in Transcription
  misc_feature: MA Experiment 20001558 PARAMETER Experiment Name: At_Drought_Soil_Dry_P Parameter: Age (day) Value: 27
  misc_feature: MA Experiment 20001558 PARAMETER Experiment Name: At_Drought_Soil_Dry_P Parameter: Organism Value: A. thaliana
  misc_feature: MA Experiment 20001558 PARAMETER Experiment Name: At_Drought_Soil_Dry_P Parameter: Plant Line Value: WS
  misc_feature: MA Experiment 20001558 PARAMETER Experiment Name: At_Drought_Soil_Dry_P Parameter: Post Timepoint (hr) Value: 6
  misc_feature: MA Experiment 20001558 PARAMETER Experiment Name: At_Drought_Soil_Dry_P Parameter: Post-Treatment Value: Re-Water vs. No Drought
  misc_feature: MA Experiment 20001558 PARAMETER Experiment Name: At_Drought_Soil_Dry_P Parameter: Timepoint (day) Value: 13
  misc_feature: MA Experiment 20001558 PARAMETER Experiment Name: At_Drought_Soil_Dry_P Parameter: Treatment Value: Drought vs. No Drought
  misc_feature: MA Experiment ID: 20001560 Result: Down-regulated in Transcription
  misc_feature: MA Experiment 20001560 PARAMETER Experiment Name: At_Drought_Soil_Dry_P Parameter: Age (day) Value: 28
  misc_feature: MA Experiment 20001560 PARAMETER Experiment Name: At_Drought_Soil_Dry_P Parameter: Organism Value: A. thaliana
  misc_feature: MA Experiment 20001560 PARAMETER Experiment Name: At_Drought_Soil_Dry_P Parameter: Plant Line Value: WS
  misc_feature: MA Experiment 20001560 PARAMETER Experiment Name: At_Drought_Soil_Dry_P Parameter: Post Timepoint (hr) Value: None
  misc_feature: MA Experiment 20001560 PARAMETER Experiment Name: At_Drought_Soil_Dry_P Parameter: Post-Treatment Value: None
  misc_feature: MA Experiment 20001560 PARAMETER Experiment Name: At_Drought_Soil_Dry_P Parameter: Timepoint (day) Value: 14
  misc_feature: MA Experiment 20001560 PARAMETER Experiment Name: At_Drought_Soil_Dry_P Parameter: Treatment Value: Drought vs. No Drought
  misc_feature: MA Experiment ID: 20001905 Result: Up-regulated in Transcription
  misc_feature: MA Experiment 20001905 PARAMETER Experiment Name: At_Drought_Reproduction_P Parameter: Age (day) Value: 40
  misc_feature: MA Experiment 20001905 PARAMETER Experiment Name: At_Drought_Reproduction_P Parameter: Organism Value: A. thaliana
  misc_feature: MA Experiment 20001905 PARAMETER Experiment Name: At_Drought_Reproduction_P Parameter: Plant Line Value: WS
  misc_feature: MA Experiment 20001905 PARAMETER Experiment Name: At_Drought_Reproduction_P Parameter: Timepoint (day) Value: 10
  misc_feature: MA Experiment 20001905 PARAMETER Experiment Name: At_Drought_Reproduction_P Parameter: Tissue Value: Rosettes
  misc_feature: MA Experiment 20001905 PARAMETER Experiment Name: At_Drought_Reproduction_P Parameter: Treatment Value: Drought vs. No Drought
  misc_feature: MA Experiment ID: 20001906 Result: Up-regulated in Transcription
  misc_feature: MA Experiment 20001906 PARAMETER Experiment Name: At_Drought_Reproduction_P Parameter: Age (day) Value: 35
  misc_feature: MA Experiment 20001906 PARAMETER Experiment Name: At_Drought_Reproduction_P Parameter: Organism Value: A. thaliana
  misc_feature: MA Experiment 20001906 PARAMETER Experiment Name: At_Drought_Reproduction_P Parameter: Plant Line Value: WS
  misc_feature: MA Experiment 20001906 PARAMETER Experiment Name: At_Drought_Reproduction_P Parameter: Timepoint (day) Value: 5
  misc_feature: MA Experiment 20001906 PARAMETER Experiment Name: At_Drought_Reproduction_P Parameter: Tissue Value: Siliques
  misc_feature: MA Experiment 20001906 PARAMETER Experiment Name: At_Drought_Reproduction_P Parameter: Treatment Value: Drought vs. No Drought
atacttttattttcatttcctttaactgcatagttcttcctcaaattgctcatacctttgcttctctttctttctttattcaacctcttatttcttcttcagcaccaacgtgtatctgcagtaaacacatatccatcgatcgatctcctcaaaaagttattgttttcttgaaggatttttcttgttcttgatcaagcatacatatatatagatggtggaagaaggcggcgtagttgtgaatcaaggaggagatcaggaggtggtggatttgcctccggggtttcggtttcaccctactgatgaagagataataactcactacctcaaagagaaggtcttcaacatccgatttaccgcggcagcgattggtcaagccgacctcaacaagaacgagccatgggatctaccaaagattgcaaagatgggggagaaggagttttactttttctgccagagggatcggaagtatccgaccgggatgaggacgaaccgtgcgaccgtgtctggttattggaaggcgaccgggaaggacaaggagatctttagaggcaaaggttgtcttgttgggatgaagaaaacacttgttttctatacaggaagagctcctaaaggtgaaaagaccaattgggttatgcatgaatatcgtcttgatggaaaatattcttatcataacctccccaaaaccgcaagggatgaatgggtggtgtgtagggtttttcacaagaacgctcctagtactacaatcactactacaaaacaactctcaaggattgattctcttgataacattgatcatctcttagacttctcatctctccctcctctcatagatccgggtttcttgggtcaacccggcccaagcttctccggtgcccgtcaacaacacgatctcaaacctgttctccaccatcctacaaccgcaccagtcgacaacacttaccttcctacccaagctctcaatttcccttaccactcggtccataattccggatctgatttcggctacggggcaggttcaggcaataataacaaaggtatgatcaagttggagcattctcttgtgagtgtgtctcaagaaaccggtttgagttccgatgtgaacacaaccgcaacgccagagatatcttcttatccaatgatgatgaatccggcaatgatggatggtagcaagtcagcgtgtgatggtcttgatgacttgatcttctgggaagatttatatactagctaaatttgggaaaaggttatttgttaattgtgattgaagagtggcatattgattactcgtctagtgtttttaatcgtgtaattagttcgtatataatatacatgtacataagatcattaggtttattaggcattggactttagttcggtgattgcttacctagtttttagcttgagaaaaaaggctgtcattggggttatgtttctttgtgattaacttgtacatatatacatttaaattattcgtatggtttatttcgttt

SEQ ID NO: 78514 - protein, 338 aa, Arabidopsis thaliana; identical to SEQ ID NO: 41234
  peptide (1)..(338): Ceres Seq. ID no. 12642106
  misc_feature (20)..(147): Pfam Name: No apical meristem (NAM) protein Pfam Description: No apical meristem (NAM) protein
  misc_feature (1)..(338): Homolog of NCBI NO: 15229219 NR Description: NAM-like protein (no apical meristem); protein At3g04060.1, supported by cDNA: 119460., supported by cDNA:
  misc_feature (1)..(333): Homolog of NCBI NO: 9758909 NR Description: NAM (no apical meristem)-like protein thaliana] >gi|28973617|gb|AAO64133.1| putative NAM (no apical protein [Arabidopsis thaliana] >gi|29824189|gb|AAP04055.1|
  misc_feature (1)..(333): Homolog of NCBI NO: 30686737 NR Description: NAM (no apical meristem)-related protein
  misc_feature (14)..(299): Homolog of NCBI NO: 30682048 NR Description: NAM (no apical meristem)-related protein
  misc_feature (14)..(298): Homolog of NCBI NO: 15240252 NR Description: NAM, no apical meristem, - like protein; protein At5g61430.1, supported by cDNA: 12970., supported by cDNA:

SEQ ID NO: 78515 - protein, 268 aa, Arabidopsis thaliana; identical to SEQ ID NO: 41235
  peptide (1)..(268): Ceres Seq. ID no. 12642107
  misc_feature (1)..(77): Pfam Name: No apical meristem (NAM) protein Pfam Description: No apical meristem (NAM) protein
  misc_feature (1)..(268): Homolog of NCBI NO: 15229219 NR Description: NAM-like protein (no apical meristem); protein At3g04060.1, supported by cDNA: 119460., supported by cDNA:
  misc_feature (1)..(263): Homolog of NCBI NO: 9758909 NR Description: NAM (no apical meristem)-like protein thaliana] >gi|28973617|gb|AAO64133.1| putative NAM (no apical protein [Arabidopsis thaliana] >gi|29824189|gb|AAP04055.1|
  misc_feature (1)..(263): Homolog of NCBI NO: 30686737 NR Description: NAM (no apical meristem)-related protein
  misc_feature (1)..(229): Homolog of NCBI NO: 30682048 NR Description: NAM (no apical meristem)-related protein
  misc_feature (1)..(228): Homolog of NCBI NO: 15240252 NR Description: NAM, no apical meristem, - like protein; protein At5g61430.1, supported by cDNA: 12970., supported by cDNA:

SEQ ID NO: 78516 - protein, 249 aa, Arabidopsis thaliana; identical to SEQ ID NO: 41236
  peptide (1)..(249): Ceres Seq. ID no. 12642108
  misc_feature (1)..(58): Pfam Name: No apical meristem (NAM) protein Pfam Description: No apical meristem (NAM) protein
  misc_feature (1)..(249): Homolog of NCBI NO: 15229219 NR Description: NAM-like protein (no apical meristem); protein At3g04060.1, supported by cDNA: 119460., supported by cDNA:
  misc_feature (1)..(244): Homolog of NCBI NO: 9758909 NR Description: NAM (no apical meristem)-like protein thaliana] >gi|28973617|gb|AAO64133.1| putative NAM (no apical protein [Arabidopsis thaliana] >gi|29824189|gb|AAP04055.1|
  misc_feature (1)..(244): Homolog of NCBI NO: 30686737 NR Description: NAM (no apical meristem)-related protein
  misc_feature (1)..(210): Homolog of NCBI NO: 30682048 NR Description: NAM (no apical meristem)-related protein
  misc_feature (1)..(209): Homolog of NCBI NO: 15240252 NR Description: NAM, no apical meristem, - like protein; protein At5g61430.1, supported by cDNA: 12970., supported by cDNA:

SEQ ID NO: 78517 - DNA, 978 bp, Arabidopsis thaliana
  misc_feature (1)..(978): Ceres Seq. ID no. 12642128
atggcctatgaggaagctcgcaagctccgtcttcaagagaatcacaagcgatttcaagttacccttcatcgttaccgcgtttcttcttctcctccttctctgattcgtttatcaattttgattattgaatctcaggatttaggaatttcccagatttctaagactctgactcagattacaaagaaaacgcctcagcttcttcagcagcgtaatcacaaacccatcgataaagccctcttagctactgctgaaccaagacgctcttcccgtgttcgtaccgtaatttcttcctatcgcgatgatgtcgtcgtagacactggtcgtacttcgaatctgaggagatcgcgacatagctctacatgggcgacctacatttctcgacctctccatgagtgcaagtttgcatcttatgaagaaaaggttggagcattcaaggctgcagagaagttccagaggagccttaaatctccacatccttactttgtgaaatctatggttcgctcccatgtttacagttgcttttggctggatttcgtgttagtaccttacttgacctacatgggtttgcttgcaaatttcaaggggcttccttcaagattctgtgcagacaattttcctgaggaaactatggaaatagaactagaggatgaagaaggcgaagtgtatgaagcagtgtacattggtagaagagctggactcagtggtggttggaaaaggtttgctcttgatcataaattggatgatggtgatgctctactctttgaattggttgaaccaaagaagttcaagatctatgtgtttaaaggaaatgagaacgctaatcttacaagcgccagaaagagaggcagagcaacgacgccaagtgaagaagaagaagaagaagaagataaggatgttgaagaatcaggtgatgaggaacacagctcaagagccactaagagatcatccgtaaggttactaaggaagaggaaagcataa

SEQ ID NO: 78518 - protein, 325 aa, Arabidopsis thaliana
  peptide (1)..(325): Ceres Seq. ID no. 12642129
  misc_feature (195)..(272): Pfam Name: B3 DNA binding domain Pfam Description: B3 DNA binding domain
  misc_feature (195)..(325): Homolog of NCBI NO: 15237157 NR Description: unknown protein; protein id: At5g58280.1 thaliana] >gi|10176791|dbj|BAA96919.2| gene_id:MCK7.15~unknown
  misc_feature (65)..(176): Homolog of NCBI NO: 15237157 NR Description: unknown protein; protein id: At5g58280.1 thaliana] >gi|10176791|dbj|BAA96919.2| gene_id:MCK7.15~unknown
  misc_feature (1)..(19): Homolog of NCBI NO: 15237157 NR Description: unknown protein; protein id: At5g58280.1 thaliana] >gi|10176791|dbj|BAA96919.2| gene_id:MCK7.15~unknown
  misc_feature (19)..(183): Homolog of NCBI NO: 9294620 NR Description: gene_id:MVI11.9~unknown protein [Arabidopsis
  misc_feature (195)..(324): Homolog of NCBI NO: 9294620 NR Description: gene_id:MVI11.9~unknown protein [Arabidopsis
  misc_feature (47)..(176): Homolog of NCBI NO: 15217278 NR Description: Unknown protein [Oryza sativa]
  misc_feature (195)..(268): Homolog of NCBI NO: 15217278 NR Description: Unknown protein [Oryza sativa]
  misc_feature (195)..(266): Homolog of NCBI NO: 30694114 NR Description: expressed protein [Arabidopsis thaliana]
  misc_feature (181)..(257): Homolog of NCBI NO: 34904376 NR Description: unnamed protein product [Oryza sativa (japonica group)] >gi|8467994|dbj|BAA96595.1| unnamed protein product
MAYEEARKLRLQENHKRFQVTLHRYRVSSSPPSLIRLSILIIESQDLGISQISKTLTQITKKTPQLLQQRNHKPIDKALLATAEPRRSSRVRTVISSYRDDVVVDTGRTSNLRRSRHSSTWATYISRPLHECKFASYEEKVGAFKAAEKFQRSLKSPHPYFVKSMVRSHVYSCFWLDFVLVPYLTYMGLLANFKGLPSRFCADNFPEETMEIELEDEEGEVYEAVYIGRRAGLSGGWKRFALDHKLDDGDALLFELVEPKKFKIYVFKGNENANLTSARKRGRATTPSEEEEEEEDKDVEESGDEEHSSRATKRSSVRLLRKRKA

SEQ ID NO: 78519 - DNA, 1386 bp, Arabidopsis thaliana
  misc_feature (1)..(1386): Ceres Seq. ID no. 12642144
  misc_feature: MA Experiment ID: 108576 Result: Up-regulated in Transcription
  misc_feature: MA Experiment 108576 PARAMETER Experiment Name: At_42deg_Heat_cDNA_P Parameter: Temperature (deg C) Value: 42 vs. 22
  misc_feature: MA Experiment 108576 PARAMETER Experiment Name: At_42deg_Heat_cDNA_P Parameter: Timepoint (hr) Value: 1
  misc_feature: MA Experiment 108576 PARAMETER Experiment Name: At_42deg_Heat_cDNA_P Parameter: Tissue Value: Aerial
  misc_feature: MA Experiment ID: 20000111 Result: Up-regulated in Transcription
  misc_feature: MA Experiment 20000111 PARAMETER Experiment Name: At_42deg_Heat_cDNA_P Parameter: Temperature (deg C) Value: 42 vs. 22
  misc_feature: MA Experiment 20000111 PARAMETER Experiment Name: At_42deg_Heat_cDNA_P Parameter: Timepoint (hr) Value: 6
  misc_feature: MA Experiment 20000111 PARAMETER Experiment Name: At_42deg_Heat_cDNA_P Parameter: Tissue Value: Aerial
  misc_feature: MA Experiment ID: 20000113 Result: Up-regulated in Transcription
  misc_feature: MA Experiment 20000113 PARAMETER Experiment Name: At_42deg_Heat_cDNA_P Parameter: Temperature (deg C) Value: 42 vs. 22
  misc_feature: MA Experiment 20000113 PARAMETER Experiment Name: At_42deg_Heat_cDNA_P Parameter: Timepoint (hr) Value: 8
  misc_feature: MA Experiment 20000113 PARAMETER Experiment Name: At_42deg_Heat_cDNA_P Parameter: Tissue Value: Aerial
  misc_feature: MA Experiment ID: 20000173 Result: Up-regulated in Transcription
  misc_feature: MA Experiment 20000173 PARAMETER Experiment Name: At_42deg_Heat_P Parameter: Age (day) Value: 14
  misc_feature: MA Experiment 20000173 PARAMETER Experiment Name: At_42deg_Heat_P Parameter: Organism Value: A. thaliana
  misc_feature: MA Experiment 20000173 PARAMETER Experiment Name: At_42deg_Heat_P Parameter: Plant Line Value: WS
  misc_feature: MA Experiment 20000173 PARAMETER Experiment Name: At_42deg_Heat_P Parameter: Temperature (deg C) Value: 42 vs. 22
  misc_feature: MA Experiment 20000173 PARAMETER Experiment Name: At_42deg_Heat_P Parameter: Timepoint (hr) Value: 6
  misc_feature: MA Experiment 20000173 PARAMETER Experiment Name: At_42deg_Heat_P Parameter: Tissue Value: Aerial
  misc_feature: MA Experiment ID: 20000224 Result: Down-regulated in Transcription
  misc_feature: MA Experiment ID: 20001247 Result: Up-regulated in Transcription
  misc_feature: MA Experiment 20001247 PARAMETER Experiment Name: At_Far-red-induction_P Parameter: Age (day) Value: 7
  misc_feature: MA Experiment 20001247 PARAMETER Experiment Name: At_Far-red-induction_P Parameter: Light Value: Far-red vs. White
  misc_feature: MA Experiment 20001247 PARAMETER Experiment Name: At_Far-red-induction_P Parameter: Organism Value: A. thaliana
  misc_feature: MA Experiment 20001247 PARAMETER Experiment Name: At_Far-red-induction_P Parameter: Plant Line Value: Columbia
  misc_feature: MA Experiment 20001247 PARAMETER Experiment Name: At_Far-red-induction_P Parameter: Timepoint (hr) Value: 1
  misc_feature: MA Experiment 20001247 PARAMETER Experiment Name: At_Far-red-induction_P Parameter: Tissue Value: Whole Plant
  misc_feature: MA Experiment ID: 20001248 Result: Up-regulated in Transcription
  misc_feature: MA Experiment 20001248 PARAMETER Experiment Name: At_Far-red-induction_P Parameter: Age (day) Value: 7
  misc_feature: MA Experiment 20001248 PARAMETER Experiment Name: At_Far-red-induction_P Parameter: Light Value: Far-red vs. White
  misc_feature: MA Experiment 20001248 PARAMETER Experiment Name: At_Far-red-induction_P Parameter: Organism Value: A. thaliana
  misc_feature: MA Experiment 20001248 PARAMETER Experiment Name: At_Far-red-induction_P Parameter: Plant Line Value: Columbia
  misc_feature: MA Experiment 20001248 PARAMETER Experiment Name: At_Far-red-induction_P Parameter: Timepoint (hr) Value: 4
  misc_feature: MA Experiment 20001248 PARAMETER Experiment Name: At_Far-red-induction_P Parameter: Tissue Value: Whole Plant
  misc_feature: MA Experiment ID: 20001450 Result: Up-regulated in Transcription
  misc_feature: MA Experiment 20001450 PARAMETER Experiment Name: At_Far-red-induction_P Parameter: Age (day) Value: 7
  misc_feature: MA Experiment 20001450 PARAMETER Experiment Name: At_Far-red-induction_P Parameter: Light Value: Far-red vs. White
  misc_feature: MA Experiment 20001450 PARAMETER Experiment Name: At_Far-red-induction_P Parameter: Organism Value: A. thaliana
  misc_feature: MA Experiment 20001450 PARAMETER Experiment Name: At_Far-red-induction_P Parameter: Plant Line Value: Columbia
  misc_feature: MA Experiment 20001450 PARAMETER Experiment Name: At_Far-red-induction_P Parameter: Timepoint (hr) Value: 8
  misc_feature: MA Experiment 20001450 PARAMETER Experiment Name: At_Far-red-induction_P Parameter: Tissue Value: Whole Plant
attattctcttccccacttgattgcgatttgagagagataaaggtcgagaaagtcttttcatctccttcaccctcatcgtttcgcgtctcttctcttctctctcagaaaatgctcatcagaaattgtctcctttttgtttccttgatgtgttttctcttctaatctccggtgaaacaaagaacaaaggattcataagacacaaagcagagaaggagagagagatacgaggcttttcttcatctttatggcttctatgaccgagaaggaagctatggtggatccttttctggtcgaggctcttcaaaatcctcgtcatcgtctcaccattttgcgaatggagcttgatatacagaagttctttcaaaaccctgagcagcttcagttcgaattcccgccttttccaacatcgtacctgcgtcttgctgcacatcgagttgctcagcattatggactagtaaccatggctttggacaatggtactggtgcaggagatggatccgataacagaatcctcgtgacgaagacagcggaaagtagatttccttatgtctgcttatccgaaatccctgtgaaacaacctgagaatggtagacccgagggtttcaaaatcgctatcaagcctagacccaagagaggatctggttgtgggggtagcggatcaggagtacagcagaatcttttgagaagtgttgaggagagaaaggaagagtatgataaagctcgcgctcggatctttaatagtcctagcagttccgactctgaagattcttcatcactacgacctccctctcttgaagtgagaaacacatgtataaaccggaatgagactgaagtggcggttaataatagtcctgtcgatgctgttactcgagactctggacggacttctcgagtagccattatcagagatagagagaaagatcgatatgacccggattatgacaggagctatgacaggtatgtcgtggatccggcctacaggtacgttagggttatgccgtctggccaaagcttcagtccaatgccaatccatattccgtttcacgatgggtttttcccgcatatgccaagaggtcatcaagccaacctaaactatgggcatccgcttaaccctgctttgagtccctttactcataacgtggcttcatatacaccgtggccaaactcacccgttatgaactatgcacagccgttgaacggctcagacacaaatctttacaggtatccttctgcaagtaatccctgacagcaagagtagtgtttgagtacttcaatgtctgtaatgaaaagcagattctatagatattagcctttaggagctccctgttctgttccgaacaatggctacttctttcttatataacaaacaagacatctactttttt

SEQ ID NO: 78520 - protein, 333 aa, Arabidopsis thaliana
  peptide (1)..(333): Ceres Seq. ID no. 12642145
  misc_feature (1)..(333): Homolog of NCBI NO: 18398995 NR Description: expressed protein; protein id: At3g10770.1, by cDNA: 320. [Arabidopsis thaliana]
  misc_feature (1)..(333): Homolog of NCBI NO: 21592735 NR Description: unknown [Arabidopsis thaliana]
  misc_feature (1)..(333): Homolog of NCBI NO: 30681485 NR Description: expressed protein [Arabidopsis thaliana]
  misc_feature (1)..(329): Homolog of NCBI NO: 18414788 NR Description: putative protein; protein id: At5g05100.1, by cDNA: gi_16649096 [Arabidopsis thaliana] Unknown protein [Arabidopsis thaliana]
  misc_feature (1)..(329): Homolog of NCBI NO: 10178049 NR Description: gb|AAF19572.1~gene_id:MUG13.4~strong similarity
  misc_feature (11)..(316): Homolog of NCBI NO: 15228989 NR Description: putative protein; protein id: At3g56680.1, by cDNA: 27753., supported by cDNA: gi_18377850 [Arabidopsis
  misc_feature (2)..(313): Homolog of NCBI NO: 21592404 NR Description: unknown [Arabidopsis thaliana]
  misc_feature (2)..(313): Homolog of NCBI NO: 18405560 NR Description: expressed protein; protein id: At2g40960.1, by cDNA: 2337. [Arabidopsis thaliana] >gi|20196933|gb|AAB86456.2| protein [Arabidopsis thaliana] >gi|20197117|gb|AAM14924.1|
  misc_feature (2)..(240): Homolog of NCBI NO: 7487238 NR Description: hypothetical protein At2g40960 [imported] -
  misc_feature (11)..(313): Homolog of NCBI NO: 29367411 NR Description: unknown [Oryza sativa (japonica cultivar-group)]
MASMTEKEAMVDPFLVEALQNPRHRLTILRMELDIQKFFQNPEQLQFEFPPFPTSYLRLAAHRVAQHYGLVTMALDNGTGAGDGSDNRILVTKTAESRFPYVCLSEIPVKQPENGRPEGFKIAIKPRPKRGSGCGGSGSGVQQNLLRSVEERKEEYDKARARIFNSPSSSDSEDSSSLRPPSLEVRNTCINRNETEVAVNNSPVDAVTRDSGRTSRVAIIRDREKDRYDPDYDRSYDRYVVDPAYRYVRVMPSGQSFSPMPIHIPFHDGFFPHMPRGHQANLNYGHPLNPALSPFTHNVASYTPWPNSPVMNYAQPLNGSDTNLYRYPSASNP

SEQ ID NO: 78521 - protein, 330 aa, Arabidopsis thaliana
  peptide (1)..(330): Ceres Seq. ID no. 12642146
  misc_feature (1)..(330): Homolog of NCBI NO: 18398995 NR Description: expressed protein; protein id: At3g10770.1, by cDNA: 320. [Arabidopsis thaliana]
  misc_feature (1)..(330): Homolog of NCBI NO: 21592735 NR Description: unknown [Arabidopsis thaliana]
  misc_feature (1)..(330): Homolog of NCBI NO: 30681485 NR Description: expressed protein [Arabidopsis thaliana]
  misc_feature (1)..(326): Homolog of NCBI NO: 18414788 NR Description: putative protein; protein id: At5g05100.1, by cDNA: gi_16649096 [Arabidopsis thaliana] Unknown protein [Arabidopsis thaliana]
  misc_feature (1)..(326): Homolog of NCBI NO: 10178049 NR Description: gb|AAF19572.1~gene_id:MUG13.4~strong similarity
  misc_feature (8)..(313): Homolog of NCBI NO: 15228989 NR Description: putative protein; protein id: At3g56680.1, by cDNA: 27753., supported by cDNA: gi_18377850 [Arabidopsis
  misc_feature (1)..(310): Homolog of NCBI NO: 21592404 NR Description: unknown [Arabidopsis thaliana]
  misc_feature (1)..(310): Homolog of NCBI NO: 18405560 NR Description: expressed protein; protein id: At2g40960.1, by cDNA: 2337. [Arabidopsis thaliana] >gi|20196933|gb|AAB86456.2| protein [Arabidopsis thaliana] >gi|20197117|gb|AAM14924.1|
  misc_feature (1)..(237): Homolog of NCBI NO: 7487238 NR Description: hypothetical protein At2g40960 [imported] -
  misc_feature (8)..(310): Homolog of NCBI NO: 29367411 NR Description: unknown [Oryza sativa (japonica cultivar-group)]
MTEKEAMVDPFLVEALQNPRHRLTILRMELDIQKFFQNPEQLQFEFPPFPTSYLRLAAHRVAQHYGLVTMALDNGTGAGDGSDNRILVTKTAESRFPYVCLSEIPVKQPENGRPEGFKIAIKPRPKRGSGCGGSGSGVQQNLLRSVEERKEEYDKARARIFNSPSSSDSEDSSSLRPPSLEVRNTCINRNETEVAVNNSPVDAVTRDSGRTSRVAIIRDREKDRYDPDYDRSYDRYVVDPAYRYVRVMPSGQSFSPMPIHIPFHDGFFPHMPRGHQANLNYGHPLNPALSPFTHNVASYTPWPNSPVMNYAQPLNGSDTNLYRYPSASNP

SEQ ID NO: 78522 - protein, 324 aa, Arabidopsis thaliana
  peptide (1)..(324): Ceres Seq. ID no. 12642147
  misc_feature (1)..(324): Homolog of NCBI NO: 18398995 NR Description: expressed protein; protein id: At3g10770.1, by cDNA: 320. [Arabidopsis thaliana]
  misc_feature (1)..(324): Homolog of NCBI NO: 21592735 NR Description: unknown [Arabidopsis thaliana]
  misc_feature (1)..(324): Homolog of NCBI NO: 30681485 NR Description: expressed protein [Arabidopsis thaliana]
  misc_feature (1)..(320): Homolog of NCBI NO: 18414788 NR Description: putative protein; protein id: At5g05100.1, by cDNA: gi_16649096 [Arabidopsis thaliana] Unknown protein [Arabidopsis thaliana]
  misc_feature (1)..(320): Homolog of NCBI NO: 10178049 NR Description: gb|AAF19572.1~gene_id:MUG13.4~strong similarity
  misc_feature (2)..(307): Homolog of NCBI NO: 15228989 NR Description: putative protein; protein id: At3g56680.1, by cDNA: 27753., supported by cDNA: gi_18377850 [Arabidopsis
  misc_feature (1)..(304): Homolog of NCBI NO: 21592404 NR Description: unknown [Arabidopsis thaliana]
  misc_feature (1)..(304): Homolog of NCBI NO: 18405560 NR Description: expressed protein; protein id: At2g40960.1, by cDNA: 2337. [Arabidopsis thaliana] >gi|20196933|gb|AAB86456.2| protein [Arabidopsis thaliana] >gi|20197117|gb|AAM14924.1|
  misc_feature (1)..(231): Homolog of NCBI NO: 7487238 NR Description: hypothetical protein At2g40960 [imported] -
  misc_feature (2)..(304): Homolog of NCBI NO: 29367411 NR Description: unknown [Oryza sativa (japonica cultivar-group)]
MVDPFLVEALQNPRHRLTILRMELDIQKFFQNPEQLQFEFPPFPTSYLRLAAHRVAQHYGLVTMALDNGTGAGDGSDNRILVTKTAESRFPYVCLSEIPVKQPENGRPEGFKIAIKPRPKRGSGCGGSGSGVQQNLLRSVEERKEEYDKARARIFNSPSSSDSEDSSSLRPPSLEVRNTCINRNETEVAVNNSPVDAVTRDSGRTSRVAIIRDREKDRYDPDYDRSYDRYVVDPAYRYVRVMPSGQSFSPMPIHIPFHDGFFPHMPRGHQANLNYGHPLNPALSPFTHNVASYTPWPNSPVMNYAQPLNGSDTNLYRYPSASNP

SEQ ID NO: 78523 - DNA, 908 bp, Arabidopsis thaliana
  misc_feature (1)..(908): Ceres Seq. ID no. 12642178
  misc_feature: MA Experiment ID: 108608 Result: Up-regulated in Transcription
  misc_feature: MA Experiment 108608 PARAMETER Experiment Name: At_100uM_ABA_cDNA_P Parameter: Timepoint (hr) Value: 1
  misc_feature: MA Experiment 108608 PARAMETER Experiment Name: At_100uM_ABA_cDNA_P Parameter: Tissue Value: Aerial
  misc_feature: MA Experiment 108608 PARAMETER Experiment Name: At_100uM_ABA_cDNA_P Parameter: Treatment Value: 100uM ABA vs. No Treatment
  misc_feature: MA Experiment ID: 20000166 Result: Up-regulated in Transcription
  misc_feature: MA Experiment 20000166 PARAMETER Experiment Name: At_100uM_ABA_P Parameter: Age (day) Value: 14
  misc_feature: MA Experiment 20000166 PARAMETER Experiment Name: At_100uM_ABA_P Parameter: Organism Value: A. thaliana
  misc_feature: MA Experiment 20000166 PARAMETER Experiment Name: At_100uM_ABA_P Parameter: Plant Line Value: WS
  misc_feature: MA Experiment 20000166 PARAMETER Experiment Name: At_100uM_ABA_P Parameter: Timepoint (hr) Value: 1
  misc_feature: MA Experiment 20000166 PARAMETER Experiment Name: At_100uM_ABA_P Parameter: Tissue Value: Aerial
  misc_feature: MA Experiment 20000166 PARAMETER Experiment Name: At_100uM_ABA_P Parameter: Treatment Value: 100uM ABA vs. No Treatment
  misc_feature: MA Experiment ID: 20000179 Result: Up-regulated in Transcription
  misc_feature: MA Experiment 20000179 PARAMETER Experiment Name: At_Germinating_Seeds_P Parameter: Age (hr) Value: 6 vs. 0
  misc_feature: MA Experiment 20000179 PARAMETER Experiment Name: At_Germinating_Seeds_P Parameter: Tissue Value: Germinating Seeds
  misc_feature: MA Experiment ID: 20000180 Result: Up-regulated in Transcription
  misc_feature: MA Experiment 20000180 PARAMETER Experiment Name: At_Germinating_Seeds_P Parameter: Age (hr) Value: 24 vs. 0
  misc_feature: MA Experiment 20000180 PARAMETER Experiment Name: At_Germinating_Seeds_P Parameter: Tissue Value: Germinating Seeds
  misc_feature: MA Experiment ID: 20000182 Result: Up-regulated in Transcription
  misc_feature: MA Experiment 20000182 PARAMETER Experiment Name: At_2mM_SA_P Parameter: Age (day) Value: 14
  misc_feature: MA Experiment 20000182 PARAMETER Experiment Name: At_2mM_SA_P Parameter: Organism Value: A. thaliana
  misc_feature: MA Experiment 20000182 PARAMETER Experiment Name: At_2mM_SA_P Parameter: Plant Line Value: WS
  misc_feature: MA Experiment 20000182 PARAMETER Experiment Name: At_2mM_SA_P Parameter: Timepoint (hr) Value: 6
  misc_feature: MA Experiment 20000182 PARAMETER Experiment Name: At_2mM_SA_P Parameter: Tissue Value: Aerial
  misc_feature: MA Experiment 20000182 PARAMETER Experiment Name: At_2mM_SA_P Parameter: Treatment Value: 2mM SA vs. No Treatment
  misc_feature: MA Experiment ID: 20000227 Result: Down-regulated in Transcription
  misc_feature: MA Experiment 20000227 PARAMETER Experiment Name: At_Root-Tips-vs-Tops_P Parameter: Tissue Value: Root Tips vs. Root Tops
  misc_feature: MA Experiment ID: 20000234 Result: Down-regulated in Transcription
  misc_feature: MA Experiment 20000234 PARAMETER Experiment Name: At_Siliques_P Parameter: Age (day) Value: 21
  misc_feature: MA Experiment 20000234 PARAMETER Experiment Name: At_Siliques_P Parameter: Organism Value: A. thaliana
  misc_feature: MA Experiment 20000234 PARAMETER Experiment Name: At_Siliques_P Parameter: Plant Line Value: WS
  misc_feature: MA Experiment 20000234 PARAMETER Experiment Name: At_Siliques_P Parameter: Tissue Value: Less Than 5mm Siliques vs. Whole Plant
  misc_feature: MA Experiment ID: 20000235 Result: Down-regulated in Transcription
  misc_feature: MA Experiment 20000235 PARAMETER Experiment Name: At_Siliques_P Parameter: Age (day) Value: 21
  misc_feature: MA Experiment 20000235 PARAMETER Experiment Name: At_Siliques_P Parameter: Organism Value: A. thaliana
  misc_feature: MA Experiment 20000235 PARAMETER Experiment Name: At_Siliques_P Parameter: Plant Line Value: WS
  misc_feature: MA Experiment 20000235 PARAMETER Experiment Name: At_Siliques_P Parameter: Tissue Value: 5-10mm Siliques vs. Whole Plant
  misc_feature: MA Experiment ID: 20000264 Result: Down-regulated in Transcription
  misc_feature: MA Experiment 20000264 PARAMETER Experiment Name: At_Open_Flower_P Parameter: Age (day) Value: 21
  misc_feature: MA Experiment 20000264 PARAMETER Experiment Name: At_Open_Flower_P Parameter: Plant Line Value: WS
  misc_feature: MA Experiment 20000264 PARAMETER Experiment Name: At_Open_Flower_P Parameter: Tissue Value: Open Flower vs. Whole Plant
  misc_feature: MA Experiment ID: 20000265 Result: Down-regulated in Transcription
  misc_feature: MA Experiment 20000265 PARAMETER Experiment Name: At_Open_Flower_P Parameter: Age (day) Value: 21
  misc_feature: MA Experiment 20000265 PARAMETER Experiment Name: At_Open_Flower_P Parameter: Plant Line Value: WS
  misc_feature: MA Experiment 20000265 PARAMETER Experiment Name: At_Open_Flower_P Parameter: Tissue Value: Closed Flower vs. Whole Plant
  misc_feature: MA Experiment ID: 20000268 Result: Down-regulated in Transcription
  misc_feature: MA Experiment 20000268 PARAMETER Experiment Name: At_100mM_NaCl__P Parameter: Age (day) Value: 14
  misc_feature: MA Experiment 20000268 PARAMETER Experiment Name: At_100mM_NaCl__P Parameter: Organism Value: A. thaliana
  misc_feature: MA Experiment 20000268 PARAMETER Experiment Name: At_100mM_NaCl__P Parameter: Plant Line Value: WS
  misc_feature: MA Experiment 20000268 PARAMETER Experiment Name: At_100mM_NaCl__P Parameter: Timepoint (hr) Value: 6
  misc_feature: MA Experiment 20000268 PARAMETER Experiment Name: At_100mM_NaCl__P Parameter: Tissue Value: Whole Plant
  misc_feature: MA Experiment 20000268 PARAMETER Experiment Name: At_100mM_NaCl__P Parameter: Treatment Value: 100mM NaCl vs. No Treatment
  misc_feature: MA Experiment ID: 20000286 Result: Down-regulated in Transcription
  misc_feature: MA Experiment 20000286 PARAMETER Experiment Name: At_Open_Flower_P Parameter: Age (day) Value: 21
  misc_feature: MA Experiment 20000286 PARAMETER Experiment Name: At_Open_Flower_P Parameter: Plant Line Value: WS
  misc_feature: MA Experiment 20000286 PARAMETER Experiment Name: At_Open_Flower_P Parameter: Tissue Value: Half Open vs. Whole Plant
  misc_feature: MA Experiment ID: 20000438 Result: Down-regulated in Transcription
  misc_feature: MA Experiment 20000438 PARAMETER Experiment Name: At_Shoots__P Parameter: Age (day) Value: 14
  misc_feature: MA Experiment 20000438 PARAMETER Experiment Name: At_Shoots__P Parameter: Tissue Value: Shoots vs. Whole Plant
  misc_feature: MA Experiment ID: 20000439 Result: Down-regulated in Transcription
  misc_feature: MA Experiment 20000439 PARAMETER Experiment Name: At_Roots__P Parameter: Age (day) Value: 14 vs. 21
  misc_feature: MA Experiment 20000439 PARAMETER Experiment Name: At_Roots__P Parameter: Organism Value: A. thaliana
  misc_feature: MA Experiment 20000439 PARAMETER Experiment Name: At_Roots__P Parameter: Tissue Value: Roots vs. Whole Plant
  misc_feature: MA Experiment ID: 20000441 Result: Up-regulated in Transcription
  misc_feature: MA Experiment 20000441 PARAMETER Experiment Name: At_1uM_BR-BRZ__P Parameter: Tissue Value: Shoot Apices
  misc_feature: MA Experiment 20000441 PARAMETER Experiment Name: At_1uM_BR-BRZ__P Parameter: Treatment Value: 1uM BR vs. No Treatment
  misc_feature: MA Experiment ID: 20000443 Result: Up-regulated in Transcription
  misc_feature: MA Experiment 20000443 PARAMETER Experiment Name: At_1uM_BR-BRZ__P Parameter: Tissue Value: Shoot Apices
  misc_feature: MA Experiment 20000443 PARAMETER Experiment Name: At_1uM_BR-BRZ__P Parameter: Treatment Value: 1uM BRZ vs. No Treatment
  misc_feature: MA Experiment ID: 20000496 Result: Up-regulated in Transcription
  misc_feature: MA Experiment 20000496 PARAMETER Experiment Name: At_Guard_Cells_P Parameter: Harvest Date Value: 7/19/2002
  misc_feature: MA Experiment 20000496 PARAMETER Experiment Name: At_Guard_Cells_P Parameter: Organism Value: Canola
  misc_feature: MA Experiment 20000496 PARAMETER Experiment Name: At_Guard_Cells_P Parameter: Tissue Value: Guard Cells vs. Leaves
  misc_feature: MA Experiment ID: 20000794 Result: Down-regulated in Transcription
  misc_feature: MA Experiment 20000794 PARAMETER Experiment Name: At_Petals_P Parameter: Age (day) Value: 23-25 days
  misc_feature: MA Experiment 20000794 PARAMETER Experiment Name: At_Petals_P Parameter: Plant Line Value: WS
  misc_feature: MA Experiment 20000794 PARAMETER Experiment Name: At_Petals_P Parameter: Tissue Value: Petals vs. Whole plant
  misc_feature: MA Experiment ID: 20001247 Result: Up-regulated in Transcription
  misc_feature: MA Experiment 20001247 PARAMETER Experiment Name: At_Far-red-induction_P Parameter: Age (day) Value: 7
  misc_feature: MA Experiment 20001247 PARAMETER Experiment Name: At_Far-red-induction_P Parameter: Light Value: Far-red vs. White
  misc_feature: MA Experiment 20001247 PARAMETER Experiment Name: At_Far-red-induction_P Parameter: Organism Value: A. thaliana
  misc_feature: MA Experiment 20001247 PARAMETER Experiment Name: At_Far-red-induction_P Parameter: Plant Line Value: Columbia
  misc_feature: MA Experiment 20001247 PARAMETER Experiment Name: At_Far-red-induction_P Parameter: Timepoint (hr) Value: 1
  misc_feature: MA Experiment 20001247 PARAMETER Experiment Name: At_Far-red-induction_P Parameter: Tissue Value: Whole Plant
  misc_feature: MA Experiment ID: 20001248 Result: Up-regulated in Transcription
  misc_feature: MA Experiment 20001248 PARAMETER Experiment Name: At_Far-red-induction_P Parameter: Age (day) Value: 7
  misc_feature: MA Experiment 20001248 PARAMETER Experiment Name: At_Far-red-induction_P Parameter: Light Value: Far-red vs. White
  misc_feature: MA Experiment 20001248 PARAMETER Experiment Name: At_Far-red-induction_P Parameter: Organism Value: A. thaliana
  misc_feature: MA Experiment 20001248 PARAMETER Experiment Name: At_Far-red-induction_P Parameter: Plant Line Value: Columbia
  misc_feature: MA Experiment 20001248 PARAMETER Experiment Name: At_Far-red-induction_P Parameter: Timepoint (hr) Value: 4
  misc_feature: MA Experiment 20001248 PARAMETER Experiment Name: At_Far-red-induction_P Parameter: Tissue Value: Whole Plant
  misc_feature: MA Experiment ID: 20001450 Result: Up-regulated in Transcription
  misc_feature: MA Experiment 20001450 PARAMETER Experiment Name: At_Far-red-induction_P Parameter: Age (day) Value: 7
  misc_feature: MA Experiment 20001450 PARAMETER Experiment Name: At_Far-red-induction_P Parameter: Light Value: Far-red vs. White
  misc_feature: MA Experiment 20001450 PARAMETER Experiment Name: At_Far-red-induction_P Parameter: Organism Value: A. thaliana
  misc_feature: MA Experiment 20001450 PARAMETER Experiment Name: At_Far-red-induction_P Parameter: Plant Line Value: Columbia
  misc_feature: MA Experiment 20001450 PARAMETER Experiment Name: At_Far-red-induction_P Parameter: Timepoint (hr) Value: 8
  misc_feature: MA Experiment 20001450 PARAMETER Experiment Name: At_Far-red-induction_P Parameter: Tissue Value: Whole Plant
  misc_feature: MA Experiment ID: 20001451 Result: Up-regulated in Transcription
  misc_feature: MA Experiment 20001451 PARAMETER Experiment Name: At_Far-red-induction_P Parameter: Age (day) Value: 7
  misc_feature: MA Experiment 20001451 PARAMETER Experiment Name: At_Far-red-induction_P Parameter: Light Value: Far-red vs. White
  misc_feature: MA Experiment 20001451 PARAMETER Experiment Name: At_Far-red-induction_P Parameter: Organism Value: A. thaliana
  misc_feature: MA Experiment 20001451 PARAMETER Experiment Name: At_Far-red-induction_P Parameter: Plant Line Value: Columbia
  misc_feature: MA Experiment 20001451 PARAMETER Experiment Name: At_Far-red-induction_P Parameter: Timepoint (hr) Value: 24
  misc_feature: MA Experiment 20001451 PARAMETER Experiment Name: At_Far-red-induction_P Parameter: Tissue Value: Whole Plant
  misc_feature: MA Experiment ID: 20001905 Result: Up-regulated in Transcription
  misc_feature: MA Experiment 20001905 PARAMETER Experiment Name: At_Drought_Reproduction_P Parameter: Age (day) Value: 40
  misc_feature: MA Experiment 20001905 PARAMETER Experiment Name: At_Drought_Reproduction_P Parameter: Organism Value: A. thaliana
  misc_feature: MA Experiment 20001905 PARAMETER Experiment Name: At_Drought_Reproduction_P Parameter: Plant Line Value: WS
  misc_feature: MA Experiment 20001905 PARAMETER Experiment Name: At_Drought_Reproduction_P Parameter: Timepoint (day) Value: 10
  misc_feature: MA Experiment 20001905 PARAMETER Experiment Name: At_Drought_Reproduction_P Parameter: Tissue Value: Rosettes
  misc_feature: MA Experiment 20001905 PARAMETER Experiment Name: At_Drought_Reproduction_P Parameter: Treatment Value: Drought vs. No Drought
aaaatccttcaagaatcgcttcatcttcttcttcttcaacaaatcgagtcctttttctgataactcatttcgatttcagaaactcgccaagaactggatactctggcggaatcagagattaagaaccgagacgtggttctgaaactgtatgaagccctgagatctcgcgacgtcaaatctgtgcaccagatcttaaccccagatctggagtattggttccacggtcctccgccgcaccagtttttgatgcgcgtactcaccggaggtgtctctccgtcttcttcctccttcgaattcgtacctctctccgtcgtttccttcggatctaccgtaatcgcggaaggctgcgacgccgcgacatcgatttcttggatccacgcttggactgtagcgaatgggataatcacacaggtgagggagtactctaacacttctctcaccgtcacacggatcggtaacgttgttgctggacgacgctccgctgagattgcgcctccgtcgcattgttcctccgtgtgggaaagccaattctcgggtcgggctggtaaacccgtacccggtttggttctggcgatttgaaagagtttggtaaagtaagtaacagccacgtcaggagaataactaaataaaggctgcttacgtgtctgtgtgtggttggtttgtttgttgtatgggttaaaaaggattttgttgctgttttaaacgcggtgtgggcttctggggctacggtcgcgtttggctgtcgctagtttttttttttttttaagttgtttgtctgaaaattcgtgtgggtttgtgttttttagtgggagcaagtatggggaaacccaaatcgacttgttgtcccgttgcgtttgatgtaacgtttgcttatgttataattgaaataaaaaagtgcttttgggatc

SEQ ID NO: 78524 - protein, 110 aa, Arabidopsis thaliana; identical to SEQ ID NO: 26872
  peptide (1)..(110): Ceres Seq. ID no. 12642179
  misc_feature (1)..(110): Homolog of NCBI NO: 15228414 NR Description: unknown protein; protein id: At3g10980.1 thaliana] >gi|6016696|gb|AAF01523.1|AC009991_19 unknown protein
  misc_feature (1)..(110): Homolog of NCBI NO: 15028339 NR Description: unknown protein [Arabidopsis thaliana]
  misc_feature (1)..(110): Homolog of NCBI NO: 4574320 NR Description: wound-induced protein WI12 [Mesembryanthemum
  misc_feature (1)..(110): Homolog of NCBI NO: 34898184 NR Description: P0034A04.2 [Oryza sativa (japonica
  misc_feature (1)..(110): Homolog of NCBI NO: 10241935 NR Description: elicitor inducible protein [Nicotiana tabacum]
  misc_feature (1)..(110): Homolog of NCBI NO: 139780 NR Description: WOUND-INDUCED PROTEIN 1 >gi|82293|pir||JQ0398
  misc_feature (1)..(110): Homolog of NCBI NO: 15241041 NR Description: putative protein; protein id: At5g01740.1, by cDNA: 248967., supported by cDNA: gi_19715592 [Arabidopsis
  misc_feature (1)..(110): Homolog of NCBI NO: 33146884 NR Description: unknown protein [Oryza sativa (japonica

SEQ ID NO: 78525 - DNA, 1110 bp, Arabidopsis thaliana
  misc_feature (1)..(1110): Ceres Seq. ID no. 12642198
  misc_feature: MA Experiment ID: 108461 Result: Up-regulated in Transcription
  misc_feature: MA Experiment 108461 PARAMETER Experiment Name: At_Germinating_Seeds_cDNA_P Parameter: Age (day) Value: 1 vs. 0
  misc_feature: MA Experiment 108461 PARAMETER Experiment Name: At_Germinating_Seeds_cDNA_P Parameter: Tissue Value: Germinating Seeds
  misc_feature: MA Experiment ID: 108462 Result: Up-regulated in Transcription
  misc_feature: MA Experiment 108462 PARAMETER Experiment Name: At_Germinating_Seeds_cDNA_P Parameter: Age (day) Value: 2 vs. 0
  misc_feature: MA Experiment 108462 PARAMETER Experiment Name: At_Germinating_Seeds_cDNA_P Parameter: Tissue Value: Germinating Seeds
  misc_feature: MA Experiment ID: 108463 Result: Up-regulated in Transcription
  misc_feature: MA Experiment 108463 PARAMETER Experiment Name: At_Germinating_Seeds_cDNA_P Parameter: Age (day) Value: 3 vs. 0
  misc_feature: MA Experiment 108463 PARAMETER Experiment Name: At_Germinating_Seeds_cDNA_P Parameter: Tissue Value: Germinating Seeds
  misc_feature: MA Experiment ID: 108595 Result: Down-regulated in Transcription
  misc_feature: MA Experiment 108595 PARAMETER Experiment Name: At_Ler-pi_Ovule_cDNA_P Parameter: Plant Line Value: null
  misc_feature: MA Experiment ID: 108607 Result: Up-regulated in Transcription
  misc_feature: MA Experiment 108607 PARAMETER Experiment Name: At_100uM_ABA_cDNA_P Parameter: Timepoint (hr) Value: 4
  misc_feature: MA Experiment 108607 PARAMETER Experiment Name: At_100uM_ABA_cDNA_P Parameter: Tissue Value: Aerial
  misc_feature: MA Experiment 108607 PARAMETER Experiment Name: At_100uM_ABA_cDNA_P Parameter: Treatment Value: 100uM ABA vs. No Treatment
  misc_feature: MA Experiment ID: 20000111 Result: Down-regulated in Transcription
  misc_feature: MA Experiment 20000111 PARAMETER Experiment Name: At_42deg_Heat_cDNA_P Parameter: Temperature (deg C) Value: 42 vs. 22
  misc_feature: MA Experiment 20000111 PARAMETER Experiment Name: At_42deg_Heat_cDNA_P Parameter: Timepoint (hr) Value: 6
  misc_feature: MA Experiment 20000111 PARAMETER Experiment Name: At_42deg_Heat_cDNA_P Parameter: Tissue Value: Aerial
  misc_feature: MA Experiment ID: 20000180 Result: Up-regulated in Transcription
  misc_feature: MA Experiment 20000180 PARAMETER Experiment Name: At_Germinating_Seeds_P Parameter: Age (hr) Value: 24 vs. 0
  misc_feature: MA Experiment 20000180 PARAMETER Experiment Name: At_Germinating_Seeds_P Parameter: Tissue Value: Germinating Seeds
  misc_feature: MA Experiment ID: 20000264 Result: Up-regulated in Transcription
  misc_feature: MA Experiment 20000264 PARAMETER Experiment Name: At_Open_Flower_P Parameter: Age (day) Value: 21
  misc_feature: MA Experiment 20000264 PARAMETER Experiment Name: At_Open_Flower_P Parameter: Plant Line Value: WS
  misc_feature: MA Experiment 20000264 PARAMETER Experiment Name: At_Open_Flower_P Parameter: Tissue Value: Open Flower vs. Whole Plant
  misc_feature: MA Experiment ID: 20000265 Result: Up-regulated in Transcription
  misc_feature: MA Experiment 20000265 PARAMETER Experiment Name: At_Open_Flower_P Parameter: Age (day) Value: 21
  misc_feature: MA Experiment 20000265 PARAMETER Experiment Name: At_Open_Flower_P Parameter: Plant Line Value: WS
  misc_feature: MA Experiment 20000265 PARAMETER Experiment Name: At_Open_Flower_P Parameter: Tissue Value: Closed Flower vs. Whole Plant
gagacgttcatgcatttaatctcgcaccttacgacaaagagtgagagagaggatcgctcaggtttgttcatcttcaccggacgattagcttttgcggtgggagaaagaacggcctgtcttcagctctgaaacagaggaacagagaggttaggaaggagacaatggttggacccgcgcggcctcagatcgttttgtttggatcttccattgttcagatgagctttggccatggtggttggggcgccattctttccgaggtctacgctcgtaaggccgacatcattctgcgaggatattatggatggaactcttctcgtgctttggaagttgtcgaccaagtgttccccaaggatgctgcagtacaaccttctctggtcattgtctattttggaggaaacgactcaatggcgcctcactcgtctggactaggacctcatgtaccacttactgaatatgttgataacatgaagaagatcgctcttcatcttcagagcctttcagacttcacccgaatcatatttcttagttctcctccagtggatgaggctaaagttcgccagaaccaaagcccatacttgagcgaggtaatccgcacaaacgacctctgcaagacttattcagatgcttgtgtagagctgtgccaagaactcggcctagaagtagttgatctcttctctacttttcagaaagcagatgactggaaaactgtttgcttcacagacgggattcatttgtcagcacaaggaagcaaaatagtagcgggagagatactaagagtggttaaagaagcggaatggcatccatcacttcactggaaatcaatgccaacagaattcgcagatgactctccttatgatcttgtatcagcagatggcaaacagacagtaaattcttcagaatggacttatttctgggaagaacaatgggactaaacatttcaacacacacaacaacaacaacaagaccctatcttcacataattcactgtcttaatgtgataaagctttgctttagattgtttacattacaagtgtctctgctataatctgattcagtttcgctcgaaaaacgttaccattttaaagtttatacttatctaaatcttaaatc

SEQ ID NO: 78526 - protein, 256 aa, Arabidopsis thaliana
  peptide (1)..(256): Ceres Seq. ID no. 12642199
  misc_feature (9)..(203): Pfam Name: GDSL-like Lipase/Acylhydrolase Pfam Description: GDSL-like Lipase/Acylhydrolase
  misc_feature (1)..(256): Homolog of NCBI NO: 18399151 NR Description: expressed protein; protein id: At3g11210.1, by cDNA: 21357. [Arabidopsis thaliana] unknown protein [Arabidopsis thaliana]
  misc_feature (1)..(256): Homolog of NCBI NO: 21554235 NR Description: CPRD49 [Arabidopsis thaliana]
  misc_feature (4)..(256): Homolog of NCBI NO: 32352168 NR Description: hypothetical protein [Oryza sativa (japonica
  misc_feature (1)..(256): Homolog of NCBI NO: 13161403 NR Description: CPRD49 [Vigna unguiculata]
  misc_feature (1)..(244): Homolog of NCBI NO: 16974631 NR Description: At2g38180/F16M14.11 [Arabidopsis thaliana]
  misc_feature (1)..(244): Homolog of NCBI NO: 18404664 NR Description: expressed protein; protein id: At2g38180.1, by cDNA: gi_16974630 [Arabidopsis thaliana]
  misc_feature (6)..(232): Homolog of NCBI NO: 15242002 NR Description: putative protein; protein id: At5g62930.1, by cDNA: gi_18087588 [Arabidopsis thaliana]
  misc_feature (6)..(232): Homolog of NCBI NO: 37535366 NR Description: putative esterase [Oryza sativa (japonica
  misc_feature (6)..(209): Homolog of NCBI NO: 15242539 NR Description: putative protein; protein id: At5g45920.1
  misc_feature (6)..(209): Homolog of NCBI NO: 38454102 NR Description: At5g45920 [Arabidopsis thaliana]
MVGPARPQIVLFGSSIVQMSFGHGGWGAILSEVYARKADIILRGYYGWNSSRALEVVDQVFPKDAAVQPSLVIVYFGGNDSMAPHSSGLGPHVPLTEYVDNMKKIALHLQSLSDFTRIIFLSSPPVDEAKVRQNQSPYLSEVIRTNDLCKTYSDACVELCQELGLEVVDLFSTFQKADDWKTVCFTDGIHLSAQGSKIVAGEILRVVKEAEWHPSLHWKSMPTEFADDSPYDLVSADGKQTVNSSEWTYFWEEQWD

SEQ ID NO: 78527 - protein, 238 aa, Arabidopsis thaliana
  peptide (1)..(238): Ceres Seq. ID no. 12642200
  misc_feature (1)..(185): Pfam Name: GDSL-like Lipase/Acylhydrolase Pfam Description: GDSL-like Lipase/Acylhydrolase
  misc_feature (1)..(238): Homolog of NCBI NO: 18399151 NR Description: expressed protein; protein id: At3g11210.1, by cDNA: 21357. [Arabidopsis thaliana] unknown protein [Arabidopsis thaliana]
  misc_feature (1)..(238): Homolog of NCBI NO: 21554235 NR Description: CPRD49 [Arabidopsis thaliana]
  misc_feature (1)..(238): Homolog of NCBI NO: 32352168 NR Description: hypothetical protein [Oryza sativa (japonica
  misc_feature (1)..(238): Homolog of NCBI NO: 13161403 NR Description: CPRD49 [Vigna unguiculata]
  misc_feature (1)..(226): Homolog of NCBI NO: 16974631 NR Description: At2g38180/F16M14.11 [Arabidopsis thaliana]
  misc_feature (1)..(226): Homolog of NCBI NO: 18404664 NR Description: expressed protein; protein id: At2g38180.1, by cDNA: gi_16974630 [Arabidopsis thaliana]
  misc_feature (1)..(214): Homolog of NCBI NO: 15242002 NR Description: putative protein; protein id: At5g62930.1, by cDNA: gi_18087588 [Arabidopsis thaliana]
  misc_feature (1)..(214): Homolog of NCBI NO: 37535366 NR Description: putative esterase [Oryza sativa (japonica
  misc_feature (1)..(191): Homolog of NCBI NO: 15242539 NR Description: putative protein; protein id: At5g45920.1
  misc_feature (1)..(191): Homolog of NCBI NO: 38454102 NR Description: At5g45920 [Arabidopsis thaliana]
MSFGHGGWGAILSEVYARKADIILRGYYGWNSSRALEVVDQVFPKDAAVQPSLVIVYFGGNDSMAPHSSGLGPHVPLTEYVDNMKKIALHLQSLSDFTRIIFLSSPPVDEAKVRQNQSPYLSEVIRTNDLCKTYSDACVELCQELGLEVVDLFSTFQKADDWKTVCFTDGIHLSAQGSKIVAGEILRVVKEAEWHPSLHWKSMPTEFADDSPYDLVSADGKQTVNSSEWTYFWEEQWD

SEQ ID NO: 78528 - protein, 175 aa, Arabidopsis thaliana
  peptide (1)..(175): Ceres Seq. ID no. 12642201
  misc_feature (1)..(122): Pfam Name: GDSL-like Lipase/Acylhydrolase Pfam Description: GDSL-like Lipase/Acylhydrolase
  misc_feature (1)..(175): Homolog of NCBI NO: 18399151 NR Description: expressed protein; protein id: At3g11210.1, by cDNA: 21357. [Arabidopsis thaliana] unknown protein [Arabidopsis thaliana]
  misc_feature (1)..(175): Homolog of NCBI NO: 21554235 NR Description: CPRD49 [Arabidopsis thaliana]
  misc_feature (1)..(175): Homolog of NCBI NO: 32352168 NR Description: hypothetical protein [Oryza sativa (japonica
  misc_feature (1)..(175): Homolog of NCBI NO: 13161403 NR Description: CPRD49 [Vigna unguiculata]
  misc_feature (1)..(163): Homolog of NCBI NO: 16974631 NR Description: At2g38180/F16M14.11 [Arabidopsis thaliana]
  misc_feature (1)..(163): Homolog of NCBI NO: 18404664 NR Description: expressed protein; protein id: At2g38180.1, by cDNA: gi_16974630 [Arabidopsis thaliana]
  misc_feature (1)..(151): Homolog of NCBI NO: 15242002 NR Description: putative protein; protein id: At5g62930.1, by cDNA: gi_18087588 [Arabidopsis thaliana]
  misc_feature (1)..(151): Homolog of NCBI NO: 37535366 NR Description: putative esterase [Oryza sativa (japonica
  misc_feature (1)..(128): Homolog of NCBI NO: 15242539 NR Description: putative protein; protein id: At5g45920.1
  misc_feature (1)..(128): Homolog of NCBI NO: 38454102 NR Description: At5g45920 [Arabidopsis thaliana]
MAPHSSGLGPHVPLTEYVDNMKKIALHLQSLSDFTRIIFLSSPPVDEAKVRQNQSPYLSEVIRTNDLCKTYSDACVELCQELGLEVVDLFSTFQKADDWKTVCFTDGIHLSAQGSKIVAGEILRVVKEAEWHPSLHWKSMPTEFADDSPYDLVSADGKQTVNSSEWTYFWEEQWD

SEQ ID NO: 78529 - DNA, 1359 bp, Arabidopsis thaliana
  misc_feature (1)..(1359): Ceres Seq. ID no. 12642230
  misc_feature: MA Experiment ID: 20000314 Result: Up-regulated in Transcription
  misc_feature: MA Experiment 20000314 PARAMETER Experiment Name: At_14day_Shoots-Roots_Sub_P Parameter: Age (day) Value: 14
  misc_feature: MA Experiment 20000314 PARAMETER Experiment Name: At_14day_Shoots-Roots_Sub_P Parameter: Organism Value: A. thaliana
  misc_feature: MA Experiment 20000314 PARAMETER Experiment Name: At_14day_Shoots-Roots_Sub_P Parameter: Plant Line Value: WS
  misc_feature: MA Experiment 20000314 PARAMETER Experiment Name: At_14day_Shoots-Roots_Sub_P Parameter: Tissue Value: Roots vs. Whole Plant
  misc_feature: MA Experiment ID: 20000347 Result: Up-regulated in Transcription
  misc_feature: MA Experiment 20000347 PARAMETER Experiment Name: At_2mM_SA_Sub_P Parameter: Age (day) Value: 14
  misc_feature: MA Experiment 20000347 PARAMETER Experiment Name: At_2mM_SA_Sub_P Parameter: Organism Value: A. thaliana
  misc_feature: MA Experiment 20000347 PARAMETER Experiment Name: At_2mM_SA_Sub_P Parameter: Plant Line Value: WS
  misc_feature: MA Experiment 20000347 PARAMETER Experiment Name: At_2mM_SA_Sub_P Parameter: Timepoint (hr) Value: 6
  misc_feature: MA Experiment 20000347 PARAMETER Experiment Name: At_2mM_SA_Sub_P Parameter: Tissue Value: Aerial
  misc_feature: MA Experiment 20000347 PARAMETER Experiment Name: At_2mM_SA_Sub_P Parameter: Treatment Value: 2mM SA vs. No Treatment
atggcggcagaacctaaccctaagaatttccctgtcctctcttatgtcttggctcgtctcccttctttcaccgccaaatccccttcctcctccgttcctcccttcgacatcgaacaaccaccaccatcatcatcatcatcatcgattgagatcgtcactcagatgcctcacttaacacaaccagatgttctcgcttcaatgacaagtgcgatctctgacgtcgccgagactcgatctatccttcgaaccctaggacctagaccagatcacgaatcagtcgataagcttgatgaggttcatgcttcgtatgagaagcttttgaaagaagcagaggagaggcttgttaggatttatgaatctgctgagaagaatgcggcggaggatgaggagaatgttgcggctgtggaggttaatgaggaggttgttgggatattgcagcatgcttctgctaatccggtggatcgtgttgatttgtctgggaggaaactgaggttgctacctgaagcttttgggaggattcaagggttgcttgttcttaatctctccaacaataagcttgagtcgattcctgattcaattgctggattgcatagtcttgttgaactggatgtctccacgaattctctggagacattacctgattccatcggtttactgtccaaactaaaaatcctgaatgtttcgactaacaagctcacatccttgcctgactccatctgccgctgtgggtcgttggttatcttggacgtgagcttcaaccgtctcacctacttaccgaccaacatcggtcctgagctagtgaatctagaaaagctcctggttcagtataacaagatccgatccttcccgaccagtataggcgaaatgagatccctaaaacacctcgacgcccacttcaacgaacttaacggccttcctgattctttcgtgttgctcacaaatctcgagtacttaaacctaagcagcaacttcagtgatctcaaggatctcccattctcattcggcgaactcataagcctccaagaactcgacttgagtaacaaccaaatccatgccctccctgacacttttggcacacttgatagcctgaccaaactgaatgtggatcagaacccgctcgtcgtcccacccgaggaagtggtgaaggaaggtgttgaagctgtgaagacgtacatgggtcagagaaggatcagtatgttggaagaagaagagaagaagaaaatggaggaagagatggagcaggcaaacgccgggtggctcacacgaaccacatcgaagctgaaaacatatgtcgcagatgtttcagagtatctcggatcaaattctcctcgagacccttaccttgaacgacagctatga

SEQ ID NO: 78530 - protein, 452 aa, Arabidopsis thaliana
  peptide (1)..(452): Ceres Seq. ID no. 12642231
  misc_feature (314)..(338): Pfam Name: Leucine Rich Repeat Pfam Description: Leucine Rich Repeat
  misc_feature (91)..(452): Homolog of NCBI NO: 22330985 NR Description: hypothetical protein; protein id: At3g11330.1, by cDNA: gi_18175637 [Arabidopsis thaliana] unknown protein [Arabidopsis thaliana]
  misc_feature (90)..(452): Homolog of NCBI NO: 15239256 NR Description: putative protein; protein id: At5g05850.1 thaliana] >gi|9759110|dbj|BAB09679.1|
  misc_feature (109)..(452): Homolog of NCBI NO: 12321872 NR Description: hypothetical protein; 91861-89496 [Arabidopsis
  misc_feature (43)..(451): Homolog of NCBI NO: 38605760 NR Description: OSJNBa0044K18.1 [Oryza sativa (japonica
  misc_feature (10)..(452): Homolog of NCBI NO: 18391461 NR Description: expressed protein; protein id: At1g12970.1, by cDNA: gi_17063164 [Arabidopsis thaliana] At1g12970/F13K23_18 [Arabidopsis thaliana]
  misc_feature (87)..(421): Homolog of NCBI NO: 7489337 NR Description: leucine-rich protein - common sunflower
  misc_feature (10)..(439): Homolog of NCBI NO: 30688342 NR Description: leucine rich repeat protein family [Arabidopsis
  misc_feature (1)..(371): Homolog of NCBI NO: 22330985 NR Description: hypothetical protein; protein id: At3g11330.1, by cDNA: gi_18175637 [Arabidopsis thaliana] unknown protein [Arabidopsis thaliana]
  misc_feature (1)..(381): Homolog of NCBI NO: 12321872 NR Description: hypothetical protein; 91861-89496 [Arabidopsis
  misc_feature (10)..(452): Homolog of NCBI NO: 25518616 NR Description: hypothetical protein F13K23.23 - Arabidopsis >gi|8698744|gb|AAF78502.1|AC012187_22 Contains similarity to CYR1 Candida albicans gb|AB034965 and contains multiple Leucine Rich
MAAEPNPKNFPVLSYVLARLPSFTAKSPSSSVPPFDIEQPPPSSSSSSIEIVTQMPHLTQPDVLASMTSAISDVAETRSILRTLGPRPDHESVDKLDEVHASYEKLLKEAEERLVRIYESAEKNAAEDEENVAAVEVNEEVVGILQHASANPVDRVDLSGRKLRLLPEAFGRIQGLLVLNLSNNKLESIPDSIAGLHSLVELDVSTNSLETLPDSIGLLSKLKILNVSTNKLTSLPDSICRCGSLVILDVSFNRLTYLPTNIGPELVNLEKLLVQYNKIRSFPTSIGEMRSLKHLDAHFNELNGLPDSFVLLTNLEYLNLSSNFSDLKDLPFSFGELISLQELDLSNNQIHALPDTFGTLDSLTKLNVDQNPLVVPPEEVVKEGVEAVKTYMGQRRISMLEEEEKKKMEEEMEQANAGWLTRTTSKLKTYVADVSEYLGSNSPRDPYLERQL

SEQ ID NO: 78531 - protein, 398 aa, Arabidopsis thaliana
  peptide (1)..(398): Ceres Seq. ID no. 12642232
  misc_feature (260)..(284): Pfam Name: Leucine Rich Repeat Pfam Description: Leucine Rich Repeat
  misc_feature (37)..(398): Homolog of NCBI NO: 22330985 NR Description: hypothetical protein; protein id: At3g11330.1, by cDNA: gi_18175637 [Arabidopsis thaliana] unknown protein [Arabidopsis thaliana]
  misc_feature (36)..(398): Homolog of NCBI NO: 15239256 NR Description: putative protein; protein id: At5g05850.1 thaliana] >gi|9759110|dbj|BAB09679.1|
  misc_feature (55)..(398): Homolog of NCBI NO: 12321872 NR Description: hypothetical protein; 91861-89496 [Arabidopsis
  misc_feature (1)..(397): Homolog of NCBI NO: 38605760 NR Description: OSJNBa0044K18.1 [Oryza sativa (japonica
  misc_feature (1)..(398): Homolog of NCBI NO: 18391461 NR Description: expressed protein; protein id: At1g12970.1, by cDNA: gi_17063164 [Arabidopsis thaliana] At1g12970/F13K23_18 [Arabidopsis thaliana]
  misc_feature (33)..(367): Homolog of NCBI NO: 7489337 NR Description: leucine-rich protein - common sunflower
  misc_feature (1)..(385): Homolog of NCBI NO: 30688342 NR Description: leucine rich repeat protein family [Arabidopsis
  misc_feature (1)..(317): Homolog of NCBI NO: 22330985 NR Description: hypothetical protein; protein id: At3g11330.1, by cDNA: gi_18175637 [Arabidopsis thaliana] unknown protein [Arabidopsis thaliana]
  misc_feature (1)..(327): Homolog of NCBI NO: 12321872 NR Description: hypothetical protein; 91861-89496 [Arabidopsis
  misc_feature (1)..(398): Homolog of NCBI NO: 25518616 NR Description: hypothetical protein F13K23.23 - Arabidopsis >gi|8698744|gb|AAF78502.1|AC012187_22 Contains similarity to CYR1 Candida albicans gb|AB034965 and contains multiple Leucine Rich
MPHLTQPDVLASMTSAISDVAETRSILRTLGPRPDHESVDKLDEVHASYEKLLKEAEERLVRIYESAEKNAAEDEENVAAVEVNEEVVGILQHASANPVDRVDLSGRKLRLLPEAFGRIQGLLVLNLSNNKLESIPDSIAGLHSLVELDVSTNSLETLPDSIGLLSKLKILNVSTNKLTSLPDSICRCGSLVILDVSFNRLTYLPTNIGPELVNLEKLLVQYNKIRSFPTSIGEMRSLKHLDAHFNELNGLPDSFVLLTNLEYLNLSSNFSDLKDLPFSFGELISLQELDLSNNQIHALPDTFGTLDSLTKLNVDQNPLVVPPEEVVKEGVEAVKTYMGQRRISMLEEEEKKKMEEEMEQANAGWLTRTTSKLKTYVADVSEYLGSNSPRDPYLERQL

SEQ ID NO: 78532 - protein, 386 aa, Arabidopsis thaliana
  peptide (1)..(386): Ceres Seq. ID no. 12642233
  misc_feature (248)..(272): Pfam Name: Leucine Rich Repeat Pfam Description: Leucine Rich Repeat
  misc_feature (25)..(386): Homolog of NCBI NO: 22330985 NR Description: hypothetical protein; protein id: At3g11330.1, by cDNA: gi_18175637 [Arabidopsis thaliana] unknown protein [Arabidopsis thaliana]
  misc_feature (24)..(386): Homolog of NCBI NO: 15239256 NR Description: putative protein; protein id: At5g05850.1 thaliana] >gi|9759110|dbj|BAB09679.1|
  misc_feature (43)..(386): Homolog of NCBI NO: 12321872 NR Description: hypothetical protein; 91861-89496 [Arabidopsis
  misc_feature (1)..(385): Homolog of NCBI NO: 38605760 NR Description: OSJNBa0044K18.1 [Oryza sativa (japonica
  misc_feature (1)..(386): Homolog of NCBI NO: 18391461 NR Description: expressed protein; protein id: At1g12970.1, by cDNA: gi_17063164 [Arabidopsis thaliana] At1g12970/F13K23_18 [Arabidopsis thaliana]
  misc_feature (21)..(355): Homolog of NCBI NO: 7489337 NR Description: leucine-rich protein - common sunflower
  misc_feature (1)..(373): Homolog of NCBI NO: 30688342 NR Description: leucine rich repeat protein family [Arabidopsis
  misc_feature (1)..(305): Homolog of NCBI NO: 22330985 NR Description: hypothetical protein; protein id: At3g11330.1, by cDNA: gi_18175637 [Arabidopsis thaliana] unknown protein [Arabidopsis thaliana]
  misc_feature (1)..(315): Homolog of NCBI NO: 12321872 NR Description: hypothetical protein; 91861-89496 [Arabidopsis
  misc_feature (1)..(386): Homolog of NCBI NO: 25518616 NR Description: hypothetical protein F13K23.23 - Arabidopsis >gi|8698744|gb|AAF78502.1|AC012187_22 Contains similarity to CYR1 Candida albicans gb|AB034965 and contains multiple Leucine Rich
MTSAISDVAETRSILRTLGPRPDHESVDKLDEVHASYEKLLKEAEERLVRIYESAEKNAAEDEENVAAVEVNEEVVGILQHASANPVDRVDLSGRKLRLLPEAFGRIQGLLVLNLSNNKLESIPDSIAGLHSLVELDVSTNSLETLPDSIGLLSKLKILNVSTNKLTSLPDSICRCGSLVILDVSFNRLTYLPTNIGPELVNLEKLLVQYNKIRSFPTSIGEMRSLKHLDAHFNELNGLPDSFVLLTNLEYLNLSSNFSDLKDLPFSFGELISLQELDLSNNQIHALPDTFGTLDSLTKLNVDQNPLVVPPEEVVKEGVEAVKTYMGQRRISMLEEEEKKKMEEEMEQANAGWLTRTTSKLKTYVADVSEYLGSNSPRDPYLERQL

SEQ ID NO: 78533 - DNA, 3576 bp, Arabidopsis thaliana
  misc_feature (1)..(3576): Ceres Seq. ID no. 12642317
  misc_feature: MA Experiment ID: 20000315 Result: Down-regulated in Transcription
  misc_feature: MA Experiment 20000315 PARAMETER Experiment Name: At_14day_Shoots-Roots_Sub_P Parameter: Age (day) Value: 14
  misc_feature: MA Experiment 20000315 PARAMETER Experiment Name: At_14day_Shoots-Roots_Sub_P Parameter: Organism Value: A. thaliana
  misc_feature: MA Experiment 20000315 PARAMETER Experiment Name: At_14day_Shoots-Roots_Sub_P Parameter: Plant Line Value: WS
  misc_feature: MA Experiment 20000315 PARAMETER Experiment Name: At_14day_Shoots-Roots_Sub_P Parameter: Tissue Value: Shoots vs. Whole Plant
  misc_feature: MA Experiment ID: 20000327 Result: Down-regulated in Transcription
  misc_feature: MA Experiment 20000327 PARAMETER Experiment Name: At_42deg_Heat_Sub_P Parameter: Age (day) Value: 14
  misc_feature: MA Experiment 20000327 PARAMETER Experiment Name: At_42deg_Heat_Sub_P Parameter: Organism Value: A. thaliana
  misc_feature: MA Experiment 20000327 PARAMETER Experiment Name: At_42deg_Heat_Sub_P Parameter: Plant Line Value: WS
  misc_feature: MA Experiment 20000327 PARAMETER Experiment Name: At_42deg_Heat_Sub_P Parameter: Temperature (deg C) Value: 42 vs. 22
  misc_feature: MA Experiment 20000327 PARAMETER Experiment Name: At_42deg_Heat_Sub_P Parameter: Timepoint (hr) Value: 1
  misc_feature: MA Experiment 20000327 PARAMETER Experiment Name: At_42deg_Heat_Sub_P Parameter: Tissue Value: Aerial
  misc_feature: MA Experiment ID: 20000328 Result: Down-regulated in Transcription
  misc_feature: MA Experiment 20000328 PARAMETER Experiment Name: At_42deg_Heat_Sub_P Parameter: Age (day) Value: 14
  misc_feature: MA Experiment 20000328 PARAMETER Experiment Name: At_42deg_Heat_Sub_P Parameter: Organism Value: A. thaliana
  misc_feature: MA Experiment 20000328 PARAMETER Experiment Name: At_42deg_Heat_Sub_P Parameter: Plant Line Value: WS
  misc_feature: MA Experiment 20000328 PARAMETER Experiment Name: At_42deg_Heat_Sub_P Parameter: Temperature (deg C) Value: 42 vs. 22
  misc_feature: MA Experiment 20000328 PARAMETER Experiment Name: At_42deg_Heat_Sub_P Parameter: Timepoint (hr) Value: 6
  misc_feature: MA Experiment 20000328 PARAMETER Experiment Name: At_42deg_Heat_Sub_P Parameter: Tissue Value: Aerial
  misc_feature: MA Experiment ID: 20000440 Result: Down-regulated in Transcription
  misc_feature: MA Experiment 20000440 PARAMETER Experiment Name: At_Closed-Flower__Sub_P Parameter: Tissue Value: Closed Flower vs. Whole Plant
atggatcaagcaaaaggttatgaacatgttcggtatactgcccctgaccctagagatgagggacttggctccattaatcaaaggttttcccacgactcttcaactaatgttaacacttatgtacgacctccagattatggtgtttcaacccctgctcggccagtgctaaactactcaatacagaccggtgaagaatttgcttttgagtttatgagagatagggttattatgaaaccgcagttcatcccaaatgtgtatggtgagcacagtggtatgcctgtttctgttaacttaagtgctctgggaatggttcatccaatgtcagagagtggccctaacgctacagtgcttaacatagaagaaaaacgtcagagctttgagcacgagaggaaacccccttctagaattgaagataagacctatcatgaactggtccagtcagccccagttatctcttcgaaaaatgatactggtcaaaggcgtcatagtttggtttcttctagagcttctgatagctctttgaaccgtgcgaagttcttgtgtagttttggtggtaaagttataccccgccccagagatcagaaacttaggtatgtaggtggtgaaacgcgtatcatacggattagcaagactatttctttccaagaactcatgcataaaatgaaagaaatatttcctgaagcacgcaccataaaatatcagctgccaggagaggatcttgatgccctagtctctgtatcttctgacgaggatttacaaaacatgatggaagaatgtatcgtgtttggtaatggaggatctgagaagcccaggatgttcttgttttcaagcagtgatatagaggaggctcagtttgttatggaacatgcagagggtgattctgaggttcagtatgttgttgctgtcaatgggatggatctaagttcacggagaagttcccttggattaagtcctcccgggaacaatttggatgaactacttcatgggaattttgataggaagatcgatcgggctgctacagaaccagcagtggcttcgcttactcccttagcaggtaatgaatctttaccagcgagccaaacttctcaacctgtaacaggattttctactggaaatgagccattttcacagccttatctaggacaacaattgcagttccccggacttggtaaccaccaaatttacacgtcaggtcacatggcaagcataggctatatagatgagaagaggtctgctcctttacatgttcaaccacaacctcattatatcccgtattctgtgaatcctgaaacacctcttgaaagcctggtgccccactatccacaaaaacctgagcaaggatttttgcgtgaggagcagatctttcatgtacaagatccagaaacttcatcaaaagaggccaaaatgagaagagatgactcatttcagaaggtaaatgatcatcctatatctactgtcgagagcaatctttcagcaaaggagccaaagatgaggagagaatcctcaaccccaagggtcaatgagtatcctgtttcttctatgcctagtgatttaatagtcccagatgacctcccgaaggaagaagctccaattgtcacacaaacatctagttcaacaccagatccaagttcttcaactctctcagagaaaagtcttaggaaatccgaggaccatgttgagaacaatctgtcagcaaaggagccaaagatgagaaaagaacactccaccacaagggtcaatgaatattccgtttcctctgtatctagtgattctatggtcccagatcaagccctcaaggaagaagctcctatttccatgaagatatccaattcaacaccagatccaaaatccttggtttatccagaaaaaagtcttagaacatcccaggagaaaacgggtgccttcgatacaacaaatgaaggcatgaaaaagaatcaggacaatcaattttgtctgcttggaggattctcagtatctggacatggtacttcaaataatagttcatctaatgtgagcaatttcgaccagcctgtgactcagcaaagagtctttcattctgagcgaactgtacgagatccaacagaaactaaccgtttgtctaaatctgatgattcccttgcttctcaatttgtaatggctcaaacaacatcagatgctttcctgcctatcagcgaatcatctgaaacttctcatgaagcaaatatggagtcccagaatgttcatcctactgcgccagtaataccagctcctgatagcatctggacagccgagggtagtatgtcacagtctgaaaaaaaaaacgtggaaactaacaccccggagcatgtaagtcagacagagacttcagcaaaggctgttccacaaggacacaatgagaagggggatatagttgttgatataaatgataggtttcctcgtgagtttcttgctgatatattaaaaacgaaagagtctctgaacttccctggattagggccattgcatgccgatggagctggtgtgagtttaaatattcagaataatgaccctaaaacttggtcgtattttcgaaatttggcgcaggatgagtttgagaggaaggatctatcccttatggatcaggaccaccctggatttcccacttccatgactaacaccaacggaaatgctggagttcctcttattgactttatggctgcggatagtggcatgaggtctctgcaggtcattaaaaatgacgacttggaagaactgaaggaattaggttctggtacttttggaactgtttatcacggaaaatggaggggtacagatgttgctatcaagcgaataaaaaggagctgttttattggtcgttcatctgaacaagagagattgacctcggagttctggcatgaagcagaaattctttcaaagcttcatcatccaaatgttatggcattttacggcgtagtgaaagatggaccaggaggaactttagctacagtgacagagtacatggtcaatggatcgctcaggcatgttctgctcagcaacaggcaccttgatcgacgtaagcgacttatcattgcaatggacgcagcttttgggatggaatatttgcactcaaagagcatagtgcatttcgatttgaagtgtgataacttgcttgtcaacttaaaggatcccgcccgtcccatatgcaaggttggtgattttggtctgtcaaagataaaaagaaacactttggtcactggcggtgtaaggggaaccctcccttggatggctcccgagctacttagtggaagcagcagcaaagtttctgaaaaggttgatgtgttctctttcggaattgtcttatgggaaattcttaccggtgaggaaccctacgccaatatgcattatggggcaataatcggaggcatagtgaacaatacattgagaccaaccgtgccaaactactgtgacccggagtggagaatgctgatggagcagtgttgggctcctgacccatttgttcgacctgcgttcccggaaatagccagacgtctccgcaccatgtcctcctctgcggtccacacaaaaccacacgctgtcaaccaccaaatccacaagtaa

SEQ ID NO: 78534 - protein, 1191 aa, Arabidopsis thaliana
  peptide (1)..(1191): Ceres Seq. ID no. 12642318
  misc_feature (191)..(277): Pfam Name: PB1 domain Pfam Description: PB1 domain
  misc_feature (1)..(440): Homolog of NCBI NO: 15219417 NR Description: hypothetical protein; protein id: At1g79570.1
  misc_feature (900)..(1191): Homolog of NCBI NO: 15219417 NR Description: hypothetical protein; protein id: At1g79570.1
  misc_feature (793)..(894): Homolog of NCBI NO: 15219417 NR Description: hypothetical protein; protein id: At1g79570.1
  misc_feature (24)..(725): Homolog of NCBI NO: 15219183 NR Description: putative Ser/Thr protein kinase; protein id:
  misc_feature (882)..(1191): Homolog of NCBI NO: 15219183 NR Description: putative Ser/Thr protein kinase; protein id:
  misc_feature (563)..(876): Homolog of NCBI NO: 15219183 NR Description: putative Ser/Thr protein kinase; protein id:
  misc_feature (894)..(1174): Homolog of NCBI NO: 15219796 NR Description: putative Ser/Thr protein kinase; protein id:
  misc_feature (138)..(317): Homolog of NCBI NO: 15219796 NR Description: putative Ser/Thr protein kinase; protein id:
  misc_feature (364)..(1175): Homolog of NCBI NO: 15232679 NR Description: protein kinase - like protein; protein id:
  misc_feature (157)..(322): Homolog of NCBI NO: 15232679 NR Description: protein kinase - like protein; protein id:
MDQAKGYEHVRYTAPDPRDEGLGSINQRFSHDSSTNVNTYVRPPDYGVSTPARPVLNYSIQTGEEFAFEFMRDRVIMKPQFIPNVYGEHSGMPVSVNLSALGMVHPMSESGPNATVLNIEEKRQSFEHERKPPSRIEDKTYHELVQSAPVISSKNDTGQRRHSLVSSRASDSSLNRAKFLCSFGGKVIPRPRDQKLRYVGGETRIIRISKTISFQELMHKMKEIFPEARTIKYQLPGEDLDALVSVSSDEDLQNMMEECIVFGNGGSEKPRMFLFSSSDIEEAQFVMEHAEGDSEVQYVVAVNGMDLSSRRSSLGLSPPGNNLDELLHGNFDRKIDRAATEPAVASLTPLAGNESLPASQTSQPVTGFSTGNEPFSQPYLGQQLQFPGLGNHQIYTSGHMASIGYIDEKRSAPLHVQPQPHYIPYSVNPETPLESLVPHYPQKPEQGFLREEQIFHVQDPETSSKEAKMRRDDSFQKVNDHPISTVESNLSAKEPKMRRESSTPRVNEYPVSSMPSDLIVPDDLPKEEAPIVTQTSSSTPDPSSSTLSEKSLRKSEDHVENNLSAKEPKMRKEHSTTRVNEYSVSSVSSDSMVPDQALKEEAPISMKISNSTPDPKSLVYPEKSLRTSQEKTGAFDTTNEGMKKNQDNQFCLLGGFSVSGHGTSNNSSSNVSNFDQPVTQQRVFHSERTVRDPTETNRLSKSDDSLASQFVMAQTTSDAFLPISESSETSHEANMESQNVHPTAPVIPAPDSIWTAEGSMSQSEKKNVETNTPEHVSQTETSAKAVPQGHNEKGDIVVDINDRFPREFLADILKTKESLNFPGLGPLHADGAGVSLNIQNNDPKTWSYFRNLAQDEFERKDLSLMDQDHPGFPTSMTNTNGNAGVPLIDFMAADSGMRSLQVIKNDDLEELKELGSGTFGTVYHGKWRGTDVAIKRIKRSCFIGRSSEQERLTSEFWHEAEILSKLHHPNVMAFYGVVKDGPGGTLATVTEYMVNGSLRHVLLSNRHLDRRKRLIIAMDAAFGMEYLHSKSIVHFDLKCDNLLVNLKDPARPICKVGDFGLSKIKRNTLVTGGVRGTLPWMAPELLSGSSSKVSEKVDVFSFGIVLWEILTGEEPYANMHYGAIIGGIVNNTLRPTVPNYCDPEWRMLMEQCWAPDPFVRPAFPEIARRLRTMSSSAVHTKPHAVNHQIHK

SEQ ID NO: 78535 - protein, 1121 aa, Arabidopsis thaliana
  peptide (1)..(1121): Ceres Seq. ID no. 12642319
  misc_feature (121)..(207): Pfam Name: PB1 domain Pfam Description: PB1 domain
  misc_feature (1)..(370): Homolog of NCBI NO: 15219417 NR Description: hypothetical protein; protein id: At1g79570.1
  misc_feature (830)..(1121): Homolog of NCBI NO: 15219417 NR Description: hypothetical protein; protein id: At1g79570.1
  misc_feature (723)..(824): Homolog of NCBI NO: 15219417 NR Description: hypothetical protein; protein id: At1g79570.1
  misc_feature (1)..(655): Homolog of NCBI NO: 15219183 NR Description: putative Ser/Thr protein kinase; protein id:
  misc_feature (812)..(1121): Homolog of NCBI NO: 15219183 NR Description: putative Ser/Thr protein kinase; protein id:
  misc_feature (493)..(806): Homolog of NCBI NO: 15219183 NR Description: putative Ser/Thr protein kinase; protein id:
  misc_feature (824)..(1104): Homolog of NCBI NO: 15219796 NR Description: putative Ser/Thr protein kinase; protein id:
  misc_feature (68)..(247): Homolog of NCBI NO: 15219796 NR Description: putative Ser/Thr protein kinase; protein id:
  misc_feature (294)..(1105): Homolog of NCBI NO: 15232679 NR Description: protein kinase - like protein; protein id:
  misc_feature (87)..(252): Homolog of NCBI NO: 15232679 NR Description: protein kinase - like protein; protein id:
MRDRVIMKPQFIPNVYGEHSGMPVSVNLSALGMVHPMSESGPNATVLNIEEKRQSFEHERKPPSRIEDKTYHELVQSAPVISSKNDTGQRRHSLVSSRASDSSLNRAKFLCSFGGKVIPRPRDQKLRYVGGETRIIRISKTISFQELMHKMKEIFPEARTIKYQLPGEDLDALVSVSSDEDLQNMMEECIVFGNGGSEKPRMFLFSSSDIEEAQFVMEHAEGDSEVQYVVAVNGMDLSSRRSSLGLSPPGNNLDELLHGNFDRKIDRAATEPAVASLTPLAGNESLPASQTSQPVTGFSTGNEPFSQPYLGQQLQFPGLGNHQIYTSGHMASIGYIDEKRSAPLHVQPQPHYIPYSVNPETPLESLVPHYPQKPEQGFLREEQIFHVQDPETSSKEAKMRRDDSFQKVNDHPISTVESNLSAKEPKMRRESSTPRVNEYPVSSMPSDLIVPDDLPKEEAPIVTQTSSSTPDPSSSTLSEKSLRKSEDHVENNLSAKEPKMRKEHSTTRVNEYSVSSVSSDSMVPDQALKEEAPISMKISNSTPDPKSLVYPEKSLRTSQEKTGAFDTTNEGMKKNQDNQFCLLGGFSVSGHGTSNNSSSNVSNFDQPVTQQRVFHSERTVRDPTETNRLSKSDDSLASQFVMAQTTSDAFLPISESSETSHEANMESQNVHPTAPVIPAPDSIWTAEGSMSQSEKKNVETNTPEHVSQTETSAKAVPQGHNEKGDIVVDINDRFPREFLADILKTKESLNFPGLGPLHADGAGVSLNIQNNDPKTWSYFRNLAQDEFERKDLSLMDQDHPGFPTSMTNTNGNAGVPLIDFMAADSGMRSLQVIKNDDLEELKELGSGTFGTVYHGKWRGTDVAIKRIKRSCFIGRSSEQERLTSEFWHEAEILSKLHHPNVMAFYGVVKDGPGGTLATVTEYMVNGSLRHVLLSNRHLDRRKRLIIAMDAAFGMEYLHSKSIVHFDLKCDNLLVNLKDPARPICKVGDFGLSKIKRNTLVTGGVRGTLPWMAPELLSGSSSKVSEKVDVFSFGIVLWEILTGEEPYANMHYGAIIGGIVNNTLRPTVPNYCDPEWRMLMEQCWAPDPFVRPAFPEIARRLRTMSSSAVHTKPHAVNHQIHK

SEQ ID NO: 78536 - protein, 1115 aa, Arabidopsis thaliana
  peptide (1)..(1115): Ceres Seq. ID no. 12642320
  misc_feature (115)..(201): Pfam Name: PB1 domain Pfam Description: PB1 domain
  misc_feature (1)..(364): Homolog of NCBI NO: 15219417 NR Description: hypothetical protein; protein id: At1g79570.1
  misc_feature (824)..(1115): Homolog of NCBI NO: 15219417 NR Description: hypothetical protein; protein id: At1g79570.1
  misc_feature (717)..(818): Homolog of NCBI NO: 15219417 NR Description: hypothetical protein; protein id: At1g79570.1
  misc_feature (1)..(649): Homolog of NCBI NO: 15219183 NR Description: putative Ser/Thr protein kinase; protein id:
  misc_feature (806)..(1115): Homolog of NCBI NO: 15219183 NR Description: putative Ser/Thr protein kinase; protein id:
  misc_feature (487)..(800): Homolog of NCBI NO: 15219183 NR Description: putative Ser/Thr protein kinase; protein id:
  misc_feature (818)..(1098): Homolog of NCBI NO: 15219796 NR Description: putative Ser/Thr protein kinase; protein id:
  misc_feature (62)..(241): Homolog of NCBI NO: 15219796 NR Description: putative Ser/Thr protein kinase; protein id:
  misc_feature (288)..(1099): Homolog of NCBI NO: 15232679 NR Description: protein kinase - like protein; protein id:
  misc_feature (81)..(246): Homolog of NCBI NO: 15232679 NR Description: protein kinase - like protein; protein id:
MKPQFIPNVYGEHSGMPVSVNLSALGMVHPMSESGPNATVLNIEEKRQSFEHERKPPSRIEDKTYHELVQSAPVISSKNDTGQRRHSLVSSRASDSSLNRAKFLCSFGGKVIPRPRDQKLRYVGGETRIIRISKTISFQELMHKMKEIFPEARTIKYQLPGEDLDALVSVSSDEDLQNMMEECIVFGNGGSEKPRMFLFSSSDIEEAQFVMEHAEGDSEVQYVVAVNGMDLSSRRSSLGLSPPGNNLDELLHGNFDRKIDRAATEPAVASLTPLAGNESLPASQTSQPVTGFSTGNEPFSQPYLGQQLQFPGLGNHQIYTSGHMASIGYIDEKRSAPLHVQPQPHYIPYSVNPETPLESLVPHYPQKPEQGFLREEQIFHVQDPETSSKEAKMRRDDSFQKVNDHPISTVESNLSAKEPKMRRESSTPRVNEYPVSSMPSDLIVPDDLPKEEAPIVTQTSSSTPDPSSSTLSEKSLRKSEDHVENNLSAKEPKMRKEHSTTRVNEYSVSSVSSDSMVPDQALKEEAPISMKISNSTPDPKSLVYPEKSLRTSQEKTGAFDTTNEGMKKNQDNQFCLLGGFSVSGHGTSNNSSSNVSNFDQPVTQQRVFHSERTVRDPTETNRLSKSDDSLASQFVMAQTTSDAFLPISESSETSHEANMESQNVHPTAPVIPAPDSIWTAEGSMSQSEKKNVETNTPEHVSQTETSAKAVPQGHNEKGDIVVDINDRFPREFLADILKTKESLNFPGLGPLHADGAGVSLNIQNNDPKTWSYFRNLAQDEFERKDLSLMDQDHPGFPTSMTNTNGNAGVPLIDFMAADSGMRSLQVIKNDDLEELKELGSGTFGTVYHGKWRGTDVAIKRIKRSCFIGRSSEQERLTSEFWHEAEILSKLHHPNVMAFYGVVKDGPGGTLATVTEYMVNGSLRHVLLSNRHLDRRKRLIIAMDAAFGMEYLHSKSIVHFDLKCDNLLVNLKDPARPICKVGDFGLSKIKRNTLVTGGVRGTLPWMAPELLSGSSSKVSEKVDVFSFGIVLWEILTGEEPYANMHYGAIIGGIVNNTLRPTVPNYCDPEWRMLMEQCWAPDPFVRPAFPEIARRLRTMSSSAVHTKPHAVNHQIHK

SEQ ID NO: 78537 - DNA, 893 bp, Arabidopsis thaliana
  misc_feature (1)..(893): Ceres Seq. ID no. 12642345
  misc_feature: MA Experiment ID: 108434 Result: Up-regulated in Transcription
  misc_feature: MA Experiment 108434 PARAMETER Experiment Name: At_Root_Tips_cDNA_P Parameter: Tissue Value: Root Tips
  misc_feature: MA Experiment ID: 108462 Result: Down-regulated in Transcription
  misc_feature: MA Experiment 108462 PARAMETER Experiment Name: At_Germinating_Seeds_cDNA_P Parameter: Age (day) Value: 2 vs. 0
  misc_feature: MA Experiment 108462 PARAMETER Experiment Name: At_Germinating_Seeds_cDNA_P Parameter: Tissue Value: Germinating Seeds
  misc_feature: MA Experiment ID: 108463 Result: Down-regulated in Transcription
  misc_feature: MA Experiment 108463 PARAMETER Experiment Name: At_Germinating_Seeds_cDNA_P Parameter: Age (day) Value: 3 vs. 0
  misc_feature: MA Experiment 108463 PARAMETER Experiment Name: At_Germinating_Seeds_cDNA_P Parameter: Tissue Value: Germinating Seeds
  misc_feature: MA Experiment ID: 20000111 Result: Up-regulated in Transcription
  misc_feature: MA Experiment 20000111 PARAMETER Experiment Name: At_42deg_Heat_cDNA_P Parameter: Temperature (deg C) Value: 42 vs. 22
  misc_feature: MA Experiment 20000111 PARAMETER Experiment Name: At_42deg_Heat_cDNA_P Parameter: Timepoint (hr) Value: 6
  misc_feature: MA Experiment 20000111 PARAMETER Experiment Name: At_42deg_Heat_cDNA_P Parameter: Tissue Value: Aerial
  misc_feature: MA Experiment ID: 20000113 Result: Up-regulated in Transcription
  misc_feature: MA Experiment 20000113 PARAMETER Experiment Name: At_42deg_Heat_cDNA_P Parameter: Temperature (deg C) Value: 42 vs. 22
  misc_feature: MA Experiment 20000113 PARAMETER Experiment Name: At_42deg_Heat_cDNA_P Parameter: Timepoint (hr) Value: 8
  misc_feature: MA Experiment 20000113 PARAMETER Experiment Name: At_42deg_Heat_cDNA_P Parameter: Tissue Value: Aerial
  misc_feature: MA Experiment ID: 20000173 Result: Up-regulated in Transcription
  misc_feature: MA Experiment 20000173 PARAMETER Experiment Name: At_42deg_Heat_P Parameter: Age (day) Value: 14
  misc_feature: MA Experiment 20000173 PARAMETER Experiment Name: At_42deg_Heat_P Parameter: Organism Value: A. thaliana
  misc_feature: MA Experiment 20000173 PARAMETER Experiment Name: At_42deg_Heat_P Parameter: Plant Line Value: WS
  misc_feature: MA Experiment 20000173 PARAMETER Experiment Name: At_42deg_Heat_P Parameter: Temperature (deg C) Value: 42 vs. 22
  misc_feature: MA Experiment 20000173 PARAMETER Experiment Name: At_42deg_Heat_P Parameter: Timepoint (hr) Value: 6
  misc_feature: MA Experiment 20000173 PARAMETER Experiment Name: At_42deg_Heat_P Parameter: Tissue Value: Aerial
  misc_feature: MA Experiment ID: 20000794 Result: Down-regulated in Transcription
  misc_feature: MA Experiment 20000794 PARAMETER Experiment Name: At_Petals_P Parameter: Age (day) Value: 23-25 days
  misc_feature: MA Experiment 20000794 PARAMETER Experiment Name: At_Petals_P Parameter: Plant Line Value: WS
  misc_feature: MA Experiment 20000794 PARAMETER Experiment Name: At_Petals_P Parameter: Tissue Value: Petals vs. Whole plant
  misc_feature: MA Experiment ID: 20001560 Result: Up-regulated in Transcription
  misc_feature: MA Experiment 20001560 PARAMETER Experiment Name: At_Drought_Soil_Dry_P Parameter: Age (day) Value: 28
  misc_feature: MA Experiment 20001560 PARAMETER Experiment Name: At_Drought_Soil_Dry_P Parameter: Organism Value: A. thaliana
  misc_feature: MA Experiment 20001560 PARAMETER Experiment Name: At_Drought_Soil_Dry_P Parameter: Plant Line Value: WS
  misc_feature: MA Experiment 20001560 PARAMETER Experiment Name: At_Drought_Soil_Dry_P Parameter: Post Timepoint (hr) Value: None
  misc_feature: MA Experiment 20001560 PARAMETER Experiment Name: At_Drought_Soil_Dry_P Parameter: Post-Treatment Value: None
  misc_feature: MA Experiment 20001560 PARAMETER Experiment Name: At_Drought_Soil_Dry_P Parameter: Timepoint (day) Value: 14
  misc_feature: MA Experiment 20001560 PARAMETER Experiment Name: At_Drought_Soil_Dry_P Parameter: Treatment Value: Drought vs. No Drought
gtcgtcttcgtcgatcatcgccgggaaaccacaccagtctcaatggcgaaaactctatcccgatccaccgcctcatgcgtcgctaagcgtttcttttccacctccaatgccgtcgcctctccttctccgcttccttctcatctcatctctcgtcgattctcaccgacgatcttccacgccgtcggatacatcccagctttgacccgcttcacaacgatccggacccggatggataggtctggcggctcatattcgccgcttaaatccggatcaaacttcagcgatcgaccacccactgaaatggcacctctatttcctggttgcgattacgagcattggcttatcgtcatggagaagcccggaggtgaaaatgctcagaaacagcaaatgatcgattgctatgttcaaaccctagctaaaattgttggcagtgaggaagaggctagaaagaagatctataatgtttcgtgtgagaggtattttgggtttggctgtgagattgatgaggagacatcaaacaaactcgaaggacttcctggtgttctgttcgtgcttccggactcttatgttgatccagagttcaaagattacggagctgaactgtttgtgaatggagaagtagttcctcgtccaccagagagacagaggaggatggtggagttaacgaatcaaagagggtcggataaaccaaagtaccatgaccgaatcagaaatgtccgacggagggagaacatgcgttgactcttattattctcagactttacgctagagcaatcatttcgatttgatctccgatgcttttttttgttggtttgttcttttaatttgctagactcttaatgaataatgtatatgatggtgttttggtgatatcgaatgtatcaattgtttct

SEQ ID NO: 78538 - protein, 246 aa, Arabidopsis thaliana; identical to SEQ ID NO: 30091
  peptide (1)..(246): Ceres Seq. ID no. 12642346
  misc_feature (15)..(246): Homolog of NCBI NO: 15226934 NR Description: unknown protein; protein id: At2g35240.1, by cDNA: gi_18253008 [Arabidopsis thaliana]
  misc_feature (15)..(246): Homolog of NCBI NO: 15223247 NR Description: plastid protein, putative; protein id: supported by cDNA: gi_17381077, supported by cDNA: gi_20465720
  misc_feature (55)..(246): Homolog of NCBI NO: 15226108 NR Description: plastid protein; protein id: At2g33430.1, by cDNA: 8717., supported by cDNA: gi_17933284, supported by
  misc_feature (55)..(246): Homolog of NCBI NO: 25370552 NR Description: DAG protein homolog [imported] - Arabidopsis >gi|2246378|emb|CAB06698.1| plastid protein [Arabidopsis
  misc_feature (55)..(246): Homolog of NCBI NO: 21617909 NR Description: plastid protein [Arabidopsis thaliana]
  misc_feature (55)..(246): Homolog of NCBI NO: 2440029 NR Description: DAL1 protein [Arabidopsis thaliana]
  misc_feature (64)..(246): Homolog of NCBI NO: 34897972 NR Description: putative plastid protein [Oryza sativa (japonica group)] >gi|24413962|dbj|BAC22214.1| putative plastid protein
  misc_feature (72)..(244): Homolog of NCBI NO: 38344141 NR Description: OSJNBa0041A02.8 [Oryza sativa (japonica
  misc_feature (15)..(243): Homolog of NCBI NO: 27754695 NR Description: putative DAG protein [Arabidopsis thaliana]
  misc_feature (15)..(243): Homolog of NCBI NO: 15230785 NR Description: DAG protein, putative; protein id: At3g06790.1 thaliana] >gi|7549634|gb|AAF63819.1| DAG protein, putative

SEQ ID NO: 78539 - protein, 232 aa, Arabidopsis thaliana; identical to SEQ ID NO: 30092
  peptide (1)..(232): Ceres Seq. ID no. 12642347
  misc_feature (1)..(232): Homolog of NCBI NO: 15226934 NR Description: unknown protein; protein id: At2g35240.1, by cDNA: gi_18253008 [Arabidopsis thaliana]
  misc_feature (1)..(232): Homolog of NCBI NO: 15223247 NR Description: plastid protein, putative; protein id: supported by cDNA: gi_17381077, supported by cDNA: gi_20465720
  misc_feature (41)..(232): Homolog of NCBI NO: 15226108 NR Description: plastid protein; protein id: At2g33430.1, by cDNA: 8717., supported by cDNA: gi_17933284, supported by
  misc_feature (41)..(232): Homolog of NCBI NO: 25370552 NR Description: DAG protein homolog [imported] - Arabidopsis >gi|2246378|emb|CAB06698.1| plastid protein [Arabidopsis
  misc_feature (41)..(232): Homolog of NCBI NO: 21617909 NR Description: plastid protein [Arabidopsis thaliana]
  misc_feature (41)..(232): Homolog of NCBI NO: 2440029 NR Description: DAL1 protein [Arabidopsis thaliana]
  misc_feature (50)..(232): Homolog of NCBI NO: 34897972 NR Description: putative plastid protein [Oryza sativa (japonica group)] >gi|24413962|dbj|BAC22214.1| putative plastid protein
  misc_feature (58)..(230): Homolog of NCBI NO: 38344141 NR Description: OSJNBa0041A02.8 [Oryza sativa (japonica
  misc_feature (1)..(229): Homolog of NCBI NO: 27754695 NR Description: putative DAG protein [Arabidopsis thaliana]
  misc_feature (1)..(229): Homolog of NCBI NO: 15230785 NR Description: DAG protein, putative; protein id: At3g06790.1 thaliana] >gi|7549634|gb|AAF63819.1| DAG protein, putative

SEQ ID NO: 78540 - protein, 170 aa, Arabidopsis thaliana; identical to SEQ ID NO: 30093
  peptide (1)..(170): Ceres Seq. ID no. 12642348
  misc_feature (1)..(170): Homolog of NCBI NO: 15226934 NR Description: unknown protein; protein id: At2g35240.1, by cDNA: gi_18253008 [Arabidopsis thaliana]
  misc_feature (1)..(170): Homolog of NCBI NO: 15223247 NR Description: plastid protein, putative; protein id: supported by cDNA: gi_17381077, supported by cDNA: gi_20465720
  misc_feature (1)..(170): Homolog of NCBI NO: 15226108 NR Description: plastid protein; protein id: At2g33430.1, by cDNA: 8717., supported by cDNA: gi_17933284, supported by
  misc_feature (1)..(170): Homolog of NCBI NO: 25370552 NR Description: DAG protein homolog [imported] - Arabidopsis >gi|2246378|emb|CAB06698.1| plastid protein [Arabidopsis
  misc_feature (1)..(170): Homolog of NCBI NO: 21617909 NR Description: plastid protein [Arabidopsis thaliana]
  misc_feature (1)..(170): Homolog of NCBI NO: 2440029 NR Description: DAL1 protein [Arabidopsis thaliana]
  misc_feature (1)..(170): Homolog of NCBI NO: 34897972 NR Description: putative plastid protein [Oryza sativa (japonica group)] >gi|24413962|dbj|BAC22214.1| putative plastid protein
  misc_feature (1)..(168): Homolog of NCBI NO: 38344141 NR Description: OSJNBa0041A02.8 [Oryza sativa (japonica
  misc_feature (1)..(167): Homolog of NCBI NO: 27754695 NR Description: putative DAG protein [Arabidopsis thaliana]
  misc_feature (1)..(167): Homolog of NCBI NO: 15230785 NR Description: DAG protein, putative; protein id: At3g06790.1 thaliana] >gi|7549634|gb|AAF63819.1| DAG protein, putative

SEQ ID NO: 78541 - DNA, 1230 bp, Arabidopsis thaliana
  misc_feature (1)..(1230): Ceres Seq. ID no. 12642375
  misc_feature: MA Experiment ID: 20000496 Result: Up-regulated in Transcription
  misc_feature: MA Experiment 20000496 PARAMETER Experiment Name: At_Guard_Cells_P Parameter: Harvest Date Value: 7/19/2002
  misc_feature: MA Experiment 20000496 PARAMETER Experiment Name: At_Guard_Cells_P Parameter: Organism Value: Canola
  misc_feature: MA Experiment 20000496 PARAMETER Experiment Name: At_Guard_Cells_P Parameter: Tissue Value: Guard Cells vs. Leaves
atggctagcaatgagatggaaaaatcgagtaaagagaaggaacctaaaacacctcctccttcttctactgcccctccctcttcacaggaaccttcatcggctgtgagtgctggcatggctactccagattggtctggttttcaggcatattctcctatgccgccgcctcatggttatgtggcatctagtccccaacctcacccttatatgtggggagttcagcatatgatgcctccttatggaactccgcctcatccttatgttgcaatgtatcccccaggtggcatgtacgcacatccttcaatgcctccgggttcttatccctatagcccttatgctatgccttctccaaatggaatgactgaagtttctggcaatactacaggcggcactgatggtgatgctaaacaatctgaagtgaaggaaaaattgcccatcaaaagatcaagaggaagcttgggaagtttgaacatgattacaggaaagaacaatgaacctgggaaaaactcaggagcatcagctaatggagcttactccaaaagtggggagagtgcttctgatggttcaagtgaaggaagtgatgggaactctcaaaatgattcgggatctggactagatggaaaggatgctgaagcagcatcagagaatggtggttctgccaatggtccgcaaaatggaagtgctggtacacctattctaccggtgagccagaccgtaccaatcatgccaatgacagctgcaggtgttcctggcccaccaacaaatttaaatattgggatggattactggggtgctccaacttcagctggtatccctggaatgcatgggaaagtatctacaccagttcctggagttgttgctccaggctcgcgagatggtggccattcacaaccctggttacaggacgatagagaacttaagcgacagagacggaagcagtccaatagggagtctgctcgaagatcaaggttgcgtaaacaggccgaatgtgatgagctggcccaacgcgctgaggtgttgaacgaagaaaacacaaatctcagagcagaaatcaacaagctcaaaagccaatgcgaagagcttaccaccgagaacacctctctcaaggaccaactttcattattccctccacttgaaggcataagcatggacaatgaccaccaagaaccagacaccaatcaaacaggtgccgcagagagaaaggttgattcatacaaagactcaacgtga

SEQ ID NO: 78542 - protein, 409 aa, Arabidopsis thaliana
  peptide (1)..(409): Ceres Seq. ID no. 12642376
  misc_feature (303)..(367): Pfam Name: bZIP transcription factor Pfam Description: bZIP transcription factor
  misc_feature (1)..(409): Homolog of NCBI NO: 30686443 NR Description: G-box binding bZIP transcription factor -related
  misc_feature (1)..(369): Homolog of NCBI NO: 25344493 NR Description: hypothetical protein At2g35530 [imported] -
  misc_feature (1)..(390): Homolog of NCBI NO: 15222576 NR Description: G-Box binding protein, putative; protein id:
  misc_feature (1)..(390): Homolog of NCBI NO: 28393494 NR Description: putative G-Box binding protein [Arabidopsis
  misc_feature (1)..(399): Homolog of NCBI NO: 13775109 NR Description: bZIP transcription factor 3 [Phaseolus vulgaris]
  misc_feature (1)..(376): Homolog of NCBI NO: 13775107 NR Description: bZIP transcription factor 2 [Phaseolus vulgaris]
  misc_feature (1)..(399): Homolog of NCBI NO: 7488942 NR Description: bZIP DNA-binding protein - parsley
  misc_feature (1)..(372): Homolog of NCBI NO: 5381313 NR Description: G-Box binding protein 2 [Catharanthus roseus]
  misc_feature (1)..(372): Homolog of NCBI NO: 7488943 NR Description: bZIP DNA-binding protein - parsley
  misc_feature (10)..(396): Homolog of NCBI NO: 7489475 NR Description: G-box binding factor 1A - rice
MASNEMEKSSKEKEPKTPPPSSTAPPSSQEPSSAVSAGMATPDWSGFQAYSPMPPPHGYVASSPQPHPYMWGVQHMMPPYGTPPHPYVAMYPPGGMYAHPSMPPGSYPYSPYAMPSPNGMTEVSGNTTGGTDGDAKQSEVKEKLPIKRSRGSLGSLNMITGKNNEPGKNSGASANGAYSKSGESASDGSSEGSDGNSQNDSGSGLDGKDAEAASENGGSANGPQNGSAGTPILPVSQTVPIMPMTAAGVPGPPTNLNIGMDYWGAPTSAGIPGMHGKVSTPVPGVVAPGSRDGGHSQPWLQDDRELKRQRRKQSNRESARRSRLRKQAECDELAQRAEVLNEENTNLRAEINKLKSQCEELTTENTSLKDQLSLFPPLEGISMDNDHQEPDTNQTGAAERKVDSYKDST

SEQ ID NO: 78543 - protein, 404 aa, Arabidopsis thaliana
  peptide (1)..(404): Ceres Seq. ID no. 12642377
  misc_feature (298)..(362): Pfam Name: bZIP transcription factor Pfam Description: bZIP transcription factor
  misc_feature (1)..(404): Homolog of NCBI NO: 30686443 NR Description: G-box binding bZIP transcription factor -related
  misc_feature (1)..(364): Homolog of NCBI NO: 25344493 NR Description: hypothetical protein At2g35530 [imported] -
  misc_feature (1)..(385): Homolog of NCBI NO: 15222576 NR Description: G-Box binding protein, putative; protein id:
  misc_feature (1)..(385): Homolog of NCBI NO: 28393494 NR Description: putative G-Box binding protein [Arabidopsis
  misc_feature (1)..(394): Homolog of NCBI NO: 13775109 NR Description: bZIP transcription factor 3 [Phaseolus vulgaris]
  misc_feature (1)..(371): Homolog of NCBI NO: 13775107 NR Description: bZIP transcription factor 2 [Phaseolus vulgaris]
  misc_feature (1)..(394): Homolog of NCBI NO: 7488942 NR Description: bZIP DNA-binding protein - parsley
  misc_feature (1)..(367): Homolog of NCBI NO: 5381313 NR Description: G-Box binding protein 2 [Catharanthus roseus]
  misc_feature (1)..(367): Homolog of NCBI NO: 7488943 NR Description: bZIP DNA-binding protein - parsley
  misc_feature (5)..(391): Homolog of NCBI NO: 7489475 NR Description: G-box binding factor 1A - rice
MEKSSKEKEPKTPPPSSTAPPSSQEPSSAVSAGMATPDWSGFQAYSPMPPPHGYVASSPQPHPYMWGVQHMMPPYGTPPHPYVAMYPPGGMYAHPSMPPGSYPYSPYAMPSPNGMTEVSGNTTGGTDGDAKQSEVKEKLPIKRSRGSLGSLNMITGKNNEPGKNSGASANGAYSKSGESASDGSSEGSDGNSQNDSGSGLDGKDAEAASENGGSANGPQNGSAGTPILPVSQTVPIMPMTAAGVPGPPTNLNIGMDYWGAPTSAGIPGMHGKVSTPVPGVVAPGSRDGGHSQPWLQDDRELKRQRRKQSNRESARRSRLRKQAECDELAQRAEVLNEENTNLRAEINKLKSQCEELTTENTSLKDQLSLFPPLEGISMDNDHQEPDTNQTGAAERKVDSYKDST

SEQ ID NO: 78544 - protein, 371 aa, Arabidopsis thaliana
  peptide (1)..(371): Ceres Seq. ID no. 12642378
  misc_feature (265)..(329): Pfam Name: bZIP transcription factor Pfam Description: bZIP transcription factor
  misc_feature (1)..(371): Homolog of NCBI NO: 30686443 NR Description: G-box binding bZIP transcription factor -related
  misc_feature (1)..(331): Homolog of NCBI NO: 25344493 NR Description: hypothetical protein At2g35530 [imported] -
  misc_feature (1)..(352): Homolog of NCBI NO: 15222576 NR Description: G-Box binding protein, putative; protein id:
  misc_feature (1)..(352): Homolog of NCBI NO: 28393494 NR Description: putative G-Box binding protein [Arabidopsis
  misc_feature (1)..(361): Homolog of NCBI NO: 13775109 NR Description: bZIP transcription factor 3 [Phaseolus vulgaris]
  misc_feature (1)..(338): Homolog of NCBI NO: 13775107 NR Description: bZIP transcription factor 2 [Phaseolus vulgaris]
  misc_feature (1)..(361): Homolog of NCBI NO: 7488942 NR Description: bZIP DNA-binding protein - parsley
  misc_feature (1)..(334): Homolog of NCBI NO: 5381313 NR Description: G-Box binding protein 2 [Catharanthus roseus]
  misc_feature (1)..(334): Homolog of NCBI NO: 7488943 NR Description: bZIP DNA-binding protein - parsley
  misc_feature (1)..(358): Homolog of NCBI NO: 7489475 NR Description: G-box binding factor 1A - rice
MATPDWSGFQAYSPMPPPHGYVASSPQPHPYMWGVQHMMPPYGTPPHPYVAMYPPGGMYAHPSMPPGSYPYSPYAMPSPNGMTEVSGNTTGGTDGDAKQSEVKEKLPIKRSRGSLGSLNMITGKNNEPGKNSGASANGAYSKSGESASDGSSEGSDGNSQNDSGSGLDGKDAEAASENGGSANGPQNGSAGTPILPVSQTVPIMPMTAAGVPGPPTNLNIGMDYWGAPTSAGIPGMHGKVSTPVPGVVAPGSRDGGHSQPWLQDDRELKRQRRKQSNRESARRSRLRKQAECDELAQRAEVLNEENTNLRAEINKLKSQCEELTTENTSLKDQLSLFPPLEGISMDNDHQEPDTNQTGAAERKVDSYKDST

SEQ ID NO: 78545 - DNA, 441 bp, Arabidopsis thaliana
  misc_feature (1)..(441): Ceres Seq. ID no. 12642430
  misc_feature: MA Experiment ID: 20001807 Result: Up-regulated in Transcription
  misc_feature: MA Experiment 20001807 PARAMETER Experiment Name: At_50mM_NH4NO3_L-to-H_Sub_P Parameter: Timepoint (hr) Value: 6
  misc_feature: MA Experiment 20001807 PARAMETER Experiment Name: At_50mM_NH4NO3_L-to-H_Sub_P Parameter: Tissue Value: Leaf
  misc_feature: MA Experiment 20001807 PARAMETER Experiment Name: At_50mM_NH4NO3_L-to-H_Sub_P Parameter: Treatment Value: 50mM NH4NO3 vs 100mM Mannitol
atggcgacccaaccggcgaaagagtctgttcaatgtttcggaaggaagaagacggcaacagcagtcacctactgcaaacggggctcgggcatgattaagctcaacggttcgccgatcgagctttatcagccagagatcctccgattcaagatcttcgagccagtccttctcctcgggaaacaccgtttcgccggagttgacatgaggatccgtgccacgggcggtggtaacacatctcgggtctacgcaatccgtcagagtatcgctaaggccctcgttgcttactaccagaagtacgttgatgagcagtcgaagaaggagatcaaggacatcttgatgaggtacgataggactcttcttgttgcggatccgagaaggtgcgagtcgaagaagtttggtggtcctggtgctcgtgctcgtttccagaagagttaccgttag

SEQ ID NO: 78546 - protein, 146 aa, Arabidopsis thaliana; identical to SEQ ID NO: 30715
  peptide (1)..(146): Ceres Seq. ID no. 12642431
  misc_feature (14)..(146): Pfam Name: Ribosomal protein S9/S16 Pfam Description: Ribosomal protein S9/S16
  misc_feature (1)..(146): Homolog of NCBI NO: 15229252 NR Description: putative 40S ribosomal protein S16; protein id: [Arabidopsis thaliana] >gi|6721162|gb|AAF26790.1|AC016829_14
  misc_feature (1)..(146): Homolog of NCBI NO: 15238809 NR Description: 40S RIBOSOMAL PROTEIN S16; protein id: supported by cDNA: gi_13877830, supported by cDNA: gi_16323499
  misc_feature (1)..(146): Homolog of NCBI NO: 15226676 NR Description: 40S ribosomal protein S16; protein id: supported by cDNA: 29241., supported by cDNA: gi_13926207 thaliana] >gi|25294609|pir||E84489 40S ribosomal protein S16
  misc_feature (1)..(146): Homolog of NCBI NO: 3122800 NR Description: 40S RIBOSOMAL PROTEIN S16
  misc_feature (2)..(146): Homolog of NCBI NO: 6984222 NR Description: 40S ribosomal protein S16 [Euphorbia esula]
  misc_feature (4)..(146): Homolog of NCBI NO: 1173209 NR Description: 40S RIBOSOMAL PROTEIN S16 >gi|541835|pir||S41193
  misc_feature (6)..(146): Homolog of NCBI NO: 17369864 NR Description: 40S ribosomal protein S16
  misc_feature (1)..(146): Homolog of NCBI NO: 39850096 NR Description: Unknown (protein for IMAGE:6887619) [Rattus
  misc_feature (1)..(146): Homolog of NCBI NO: 4506691 NR Description: ribosomal protein S16; 40S ribosomal protein S16 sapiens] >gi|27676542|ref|XP_214829.1| similar to ribosomal
  misc_feature (5)..(146): Homolog of NCBI NO: 15294045 NR Description: 40S ribosomal protein S16 [Ictalurus punctatus]

SEQ ID NO: 78547 - protein, 116 aa, Arabidopsis thaliana; identical to SEQ ID NO: 30716
  peptide (1)..(116): Ceres Seq. ID no. 12642432
  misc_feature (1)..(116): Pfam Name: Ribosomal protein S9/S16 Pfam Description: Ribosomal protein S9/S16
  misc_feature (1)..(116): Homolog of NCBI NO: 15229252 NR Description: putative 40S ribosomal protein S16; protein id: [Arabidopsis thaliana] >gi|6721162|gb|AAF26790.1|AC016829_14
  misc_feature (1)..(116): Homolog of NCBI NO: 15238809 NR Description: 40S RIBOSOMAL PROTEIN S16; protein id: supported by cDNA: gi_13877830, supported by cDNA: gi_16323499
  misc_feature (1)..(116): Homolog of NCBI NO: 15226676 NR Description: 40S ribosomal protein S16; protein id: supported by cDNA: 29241., supported by cDNA: gi_13926207 thaliana] >gi|25294609|pir||E84489 40S ribosomal protein S16
  misc_feature (1)..(116): Homolog of NCBI NO: 3122800 NR Description: 40S RIBOSOMAL PROTEIN S16
  misc_feature (1)..(116): Homolog of NCBI NO: 6984222 NR Description: 40S ribosomal protein S16 [Euphorbia esula]
  misc_feature (1)..(116): Homolog of NCBI NO: 1173209 NR Description: 40S RIBOSOMAL PROTEIN S16 >gi|541835|pir||S41193
  misc_feature (1)..(116): Homolog of NCBI NO: 17369864 NR Description: 40S ribosomal protein S16
  misc_feature (1)..(116): Homolog of NCBI NO: 39850096 NR Description: Unknown (protein for IMAGE:6887619) [Rattus
  misc_feature (1)..(116): Homolog of NCBI NO: 4506691 NR Description: ribosomal protein S16; 40S ribosomal protein S16 sapiens] >gi|27676542|ref|XP_214829.1| similar to ribosomal
  misc_feature (1)..(116): Homolog of NCBI NO: 15294045 NR Description: 40S ribosomal protein S16 [Ictalurus punctatus]

SEQ ID NO: 78548 - protein, 79 aa, Arabidopsis thaliana; identical to SEQ ID NO: 30717
  peptide (1)..(79): Ceres Seq. ID no. 12642433
  misc_feature (1)..(79): Pfam Name: Ribosomal protein S9/S16 Pfam Description: Ribosomal protein S9/S16
  misc_feature (1)..(79): Homolog of NCBI NO: 15229252 NR Description: putative 40S ribosomal protein S16; protein id: [Arabidopsis thaliana] >gi|6721162|gb|AAF26790.1|AC016829_14
  misc_feature (1)..(79): Homolog of NCBI NO: 15238809 NR Description: 40S RIBOSOMAL PROTEIN S16; protein id: supported by cDNA: gi_13877830, supported by cDNA: gi_16323499
  misc_feature (1)..(79): Homolog of NCBI NO: 15226676 NR Description: 40S ribosomal protein S16; protein id: supported by cDNA: 29241., supported by cDNA: gi_13926207 thaliana] >gi|25294609|pir||E84489 40S ribosomal protein S16
  misc_feature (1)..(79): Homolog of NCBI NO: 3122800 NR Description: 40S RIBOSOMAL PROTEIN S16
  misc_feature (1)..(79): Homolog of NCBI NO: 6984222 NR Description: 40S ribosomal protein S16 [Euphorbia esula]
  misc_feature (1)..(79): Homolog of NCBI NO: 1173209 NR Description: 40S RIBOSOMAL PROTEIN S16 >gi|541835|pir||S41193
  misc_feature (1)..(79): Homolog of NCBI NO: 17369864 NR Description: 40S ribosomal protein S16
  misc_feature (1)..(79): Homolog of NCBI NO: 39850096 NR Description: Unknown (protein for IMAGE:6887619) [Rattus
  misc_feature (1)..(79): Homolog of NCBI NO: 4506691 NR Description: ribosomal protein S16; 40S ribosomal protein S16 sapiens] >gi|27676542|ref|XP_214829.1| similar to ribosomal
  misc_feature (1)..(79): Homolog of NCBI NO: 15294045 NR Description: 40S ribosomal protein S16 [Ictalurus punctatus]

SEQ ID NO: 78549 - DNA, 2081 bp, Arabidopsis thaliana
  misc_feature (1)..(2081): Ceres Seq. ID no. 12642491
  misc_feature: MA Experiment ID: 108461 Result: Down-regulated in Transcription
  misc_feature: MA Experiment 108461 PARAMETER Experiment Name: At_Germinating_Seeds_cDNA_P Parameter: Age (day) Value: 1 vs. 0
  misc_feature: MA Experiment 108461 PARAMETER Experiment Name: At_Germinating_Seeds_cDNA_P Parameter: Tissue Value: Germinating Seeds
  misc_feature: MA Experiment ID: 108462 Result: Down-regulated in Transcription
  misc_feature: MA Experiment 108462 PARAMETER Experiment Name: At_Germinating_Seeds_cDNA_P Parameter: Age (day) Value: 2 vs. 0
  misc_feature: MA Experiment 108462 PARAMETER Experiment Name: At_Germinating_Seeds_cDNA_P Parameter: Tissue Value: Germinating Seeds
  misc_feature: MA Experiment ID: 108463 Result: Down-regulated in Transcription
  misc_feature: MA Experiment 108463 PARAMETER Experiment Name: At_Germinating_Seeds_cDNA_P Parameter: Age (day) Value: 3 vs. 0
  misc_feature: MA Experiment 108463 PARAMETER Experiment Name: At_Germinating_Seeds_cDNA_P Parameter: Tissue Value: Germinating Seeds
  misc_feature: MA Experiment ID: 108464 Result: Down-regulated in Transcription
  misc_feature: MA Experiment 108464 PARAMETER Experiment Name: At_Germinating_Seeds_cDNA_P Parameter: Age (day) Value: 4 vs. 0
  misc_feature: MA Experiment 108464 PARAMETER Experiment Name: At_Germinating_Seeds_cDNA_P Parameter: Tissue Value: Germinating Seeds
  misc_feature: MA Experiment ID: 108573 Result: Up-regulated in Transcription
  misc_feature: MA Experiment 108573 PARAMETER Experiment Name: At_Drought_cDNA_P Parameter: Timepoint (hr) Value: 6
  misc_feature: MA Experiment 108573 PARAMETER Experiment Name: At_Drought_cDNA_P Parameter: Tissue Value: Aerial
  misc_feature: MA Experiment 108573 PARAMETER Experiment Name: At_Drought_cDNA_P Parameter: Treatment Value: Drought vs. No Drought
  misc_feature: MA Experiment ID: 20000087 Result: Down-regulated in Transcription
  misc_feature: MA Experiment 20000087 PARAMETER Experiment Name: At_100uM_ABA_Mutants_cDNA_P Parameter: Plant Line Value: WS
  misc_feature: MA Experiment 20000087 PARAMETER Experiment Name: At_100uM_ABA_Mutants_cDNA_P Parameter: Timepoint (hr) Value: 6
  misc_feature: MA Experiment 20000087 PARAMETER Experiment Name: At_100uM_ABA_Mutants_cDNA_P Parameter: Tissue Value: Aerial
  misc_feature: MA Experiment 20000087 PARAMETER Experiment Name: At_100uM_ABA_Mutants_cDNA_P Parameter: Treatment Value: 100uM ABA vs. No Treatment
  misc_feature: MA Experiment ID: 20000180 Result: Down-regulated in Transcription
  misc_feature: MA Experiment 20000180 PARAMETER Experiment Name: At_Germinating_Seeds_P Parameter: Age (hr) Value: 24 vs. 0
  misc_feature: MA Experiment 20000180 PARAMETER Experiment Name: At_Germinating_Seeds_P Parameter: Tissue Value: Germinating Seeds
  misc_feature: MA Experiment ID: 20001451 Result: Down-regulated in Transcription
  misc_feature: MA Experiment 20001451 PARAMETER Experiment Name: At_Far-red-induction_P Parameter: Age (day) Value: 7
  misc_feature: MA Experiment 20001451 PARAMETER Experiment Name: At_Far-red-induction_P Parameter: Light Value: Far-red vs. White
  misc_feature: MA Experiment 20001451 PARAMETER Experiment Name: At_Far-red-induction_P Parameter: Organism Value: A. thaliana
  misc_feature: MA Experiment 20001451 PARAMETER Experiment Name: At_Far-red-induction_P Parameter: Plant Line Value: Columbia
  misc_feature: MA Experiment 20001451 PARAMETER Experiment Name: At_Far-red-induction_P Parameter: Timepoint (hr) Value: 24
  misc_feature: MA Experiment 20001451 PARAMETER Experiment Name: At_Far-red-induction_P Parameter: Tissue Value: Whole Plant
  misc_feature: MA Experiment ID: 20001557 Result: Up-regulated in Transcription
  misc_feature: MA Experiment 20001557 PARAMETER Experiment Name: At_Drought_Soil_Dry_P Parameter: Age (day) Value: 27
  misc_feature: MA Experiment 20001557 PARAMETER Experiment Name: At_Drought_Soil_Dry_P Parameter: Organism Value: A. thaliana
  misc_feature: MA Experiment 20001557 PARAMETER Experiment Name: At_Drought_Soil_Dry_P Parameter: Plant Line Value: WS
  misc_feature: MA Experiment 20001557 PARAMETER Experiment Name: At_Drought_Soil_Dry_P Parameter: Post Timepoint (hr) Value: 3
  misc_feature: MA Experiment 20001557 PARAMETER Experiment Name: At_Drought_Soil_Dry_P Parameter: Post-Treatment Value: Re-Water vs. No Drought
  misc_feature: MA Experiment 20001557 PARAMETER Experiment Name: At_Drought_Soil_Dry_P Parameter: Timepoint (day) Value: 13
  misc_feature: MA Experiment 20001557 PARAMETER Experiment Name: At_Drought_Soil_Dry_P Parameter: Treatment Value: Drought vs. No Drought
accggaatctctctctttctccgccgaacttcttcgaatcaagtttccgtttatcactctaatattgttaaagtttccactgataccaccgctctagtcatggctgaagctgaagatcagcaaaatttcgttgcacacaatggagatcaggtaccagatcaagggtcagatgagttgcataatgggttaccgtaccaggttcatgatgagacccttgttcaccaaccatacgaggttgaagatccgattcttgaacctcagcagtacgaggtaccagatccgactcttgaaccacagcagtacgaggtaccagatcagactcttgaacctcagcagtacgaggttgatgatcagttagagtatcatcaataccagttgcaggaccaggctaatgaagatgtccaagatcattcgcaagatgacctacaatatcagccacaaaatcaggagcagtttcagttacaagacgaggctcatgatcaggctcagtatcaggcgcaaggtgatgtacaagatcacaatggtgatgaagtgcaagataaagtagaagatgaggaaggaattcctgagcatcttgagtctctacagaaatcagagcctgaagaagatgcgacagttggaggtgaggagaagaggtggccgggatggcccggagagacggtattccgtatgctggttcctgcacagaaagtgggtagcatcattggtcgcaaaggtgatgtcattaagaaaatagttgaggagacaagggctcgaataaagattctcgatggtcctccaggcacaacagaaagagctgttatggtttctggtaaagaagagcccgaatcatctctaccaccttctatggatggccttcttagagtccacatgcggatagttgatggtttggatggtgaagcttctcaagcccctccgccttcaaaggtgtcaacaagattactagtcccagcatctcaggctggaagtttgattggaaaacagggaggaacagttaaagctattcaagaagcatccgcttgtatagtcagagttcttggatcagaggatttacctgtttttgctcttcaagacgatagggttgttgaagttgtgggggaaccaacaagtgttcatagagccttggagctgattgcgtcacatctcagaaagttcttggttgatcgtagcatcatcccattctttgaaaatcagatgcaaaagccaactcgccaaatggaccatatgccaccaccacaccagtcatggggtcctcctcaaggtcatgccccaagtgttggtggaggaggctatggtcacaacccacctccatatatgcaaccacctcctagacatgatagttactatcctcctcctgagatgcgtcaacctccaatggagaaacagcctcatcaaggtatatctgcatatggtagagagcctcctatgaatgtgcacgtatcatcagccccaccaatggtcgctcagcaagttacgcagcaaatgcagattccactgtcttatgctgatgctgtaattgggacgtcgggttcaaacataagctacactagacgtcttagtggagcaacagtaactattcaggagaccaggggagtacctggtgaaatgactgttgaggttagcggaactggctcacaagtccaaactgccgtgcagcttattcagaacttcatggctgaagctggagcgccggcaccagcacagcctcaaactgtagcaccagagcagcaaggctataacccatacgcaacacacggctcagtttacgcagcggctccaacaaacccgcctggaggatacgctacggattacagctcaggctacggttactgatgaaagattttaagtttctttagaatgttttactagtagttgcaagcaagagtggaaacgctagatgcctaatcgagtatatgttgttattagcgagcactctgtgtactgacaatcaattattatatcacttgttttgagacttcttcatttgtgtactattcataacattgatctaaccggaaatcttctttatattcaaaaaaagtaaaaaaaaaaaaaatgtatggttcattatcgtgtccttc

SEQ ID NO: 78550 - protein, 610 aa, Arabidopsis thaliana; identical to SEQ ID NO: 40615
  peptide (1)..(610): Ceres Seq. ID no. 12642492
  misc_feature (313)..(366): Pfam Name: KH domain Pfam Description: KH domain
  misc_feature (127)..(610): Homolog of NCBI NO: 16924113 NR Description: putative RNA binding protein [Oryza sativa]
  misc_feature (185)..(609): Homolog of NCBI NO: 37536904 NR Description: putative nucleic acid binding protein [Oryza
  misc_feature (183)..(581): Homolog of NCBI NO: 15236094 NR Description: KH domain protein; protein id: At4g26000.1, by cDNA: 33495., supported by cDNA: gi_15810498, supported by gi_20466385, supported by cDNA: gi_21280914 [Arabidopsis
  misc_feature (183)..(348): Homolog of NCBI NO: 37534332 NR Description: unknown protein [Oryza sativa (japonica
  misc_feature (434)..(566): Homolog of NCBI NO: 37534332 NR Description: unknown protein [Oryza sativa (japonica
  misc_feature (350)..(499): Homolog of NCBI NO: 37534332 NR Description: unknown protein [Oryza sativa (japonica
  misc_feature (219)..(558): Homolog of NCBI NO: 15217969 NR Description: KH domain protein; protein id: At1g51580.1
  misc_feature (196)..(451): Homolog of NCBI NO: 30685269 NR Description: KH domain protein [Arabidopsis thaliana]
  misc_feature (196)..(451): Homolog of NCBI NO: 11357886 NR Description: hypothetical protein F8M21.160 - Arabidopsis >gi|7671496|emb|CAB89337.1| putative protein [Arabidopsis
  misc_feature (189)..(447): Homolog of NCBI NO: 18921324 NR Description: putative nucleic acid binding protein [Oryza

SEQ ID NO: 78551 - protein, 577 aa, Arabidopsis thaliana; identical to SEQ ID NO: 40616
  peptide (1)..(577): Ceres Seq. ID no. 12642493
  misc_feature (280)..(333): Pfam Name: KH domain Pfam Description: KH domain
  misc_feature (94)..(577): Homolog of NCBI NO: 16924113 NR Description: putative RNA binding protein [Oryza sativa]
  misc_feature (152)..(576): Homolog of NCBI NO: 37536904 NR Description: putative nucleic acid binding protein [Oryza
  misc_feature (150)..(548): Homolog of NCBI NO: 15236094 NR Description: KH domain protein; protein id: At4g26000.1, by cDNA: 33495., supported by cDNA: gi_15810498, supported by gi_20466385, supported by cDNA: gi_21280914 [Arabidopsis
  misc_feature (150)..(315): Homolog of NCBI NO: 37534332 NR Description: unknown protein [Oryza sativa (japonica
  misc_feature (401)..(533): Homolog of NCBI NO: 37534332 NR Description: unknown protein [Oryza sativa (japonica
  misc_feature (317)..(466): Homolog of NCBI NO: 37534332 NR Description: unknown protein [Oryza sativa (japonica
  misc_feature (186)..(525): Homolog of NCBI NO: 15217969 NR Description: KH domain protein; protein id: At1g51580.1
  misc_feature (163)..(418): Homolog of NCBI NO: 30685269 NR Description: KH domain protein [Arabidopsis thaliana]
  misc_feature (163)..(418): Homolog of NCBI NO: 11357886 NR Description: hypothetical protein F8M21.160 - Arabidopsis >gi|7671496|emb|CAB89337.1| putative protein [Arabidopsis
  misc_feature (156)..(414): Homolog of NCBI NO: 18921324 NR Description: putative nucleic acid binding protein [Oryza

SEQ ID NO: 78552 - protein, 387 aa, Arabidopsis thaliana; identical to SEQ ID NO: 40617
  peptide (1)..(387): Ceres Seq. ID no. 12642494
  misc_feature (90)..(143): Pfam Name: KH domain Pfam Description: KH domain
  misc_feature (1)..(387): Homolog of NCBI NO: 16924113 NR Description: putative RNA binding protein [Oryza sativa]
  misc_feature (1)..(386): Homolog of NCBI NO: 37536904 NR Description: putative nucleic acid binding protein [Oryza
  misc_feature (1)..(358): Homolog of NCBI NO: 15236094 NR Description: KH domain protein; protein id: At4g26000.1, by cDNA: 33495., supported by cDNA: gi_15810498, supported by gi_20466385, supported by cDNA: gi_21280914 [Arabidopsis
  misc_feature (1)..(125): Homolog of NCBI NO: 37534332 NR Description: unknown protein [Oryza sativa (japonica
  misc_feature (211)..(343): Homolog of NCBI NO: 37534332 NR Description: unknown protein [Oryza sativa (japonica
  misc_feature (127)..(276): Homolog of NCBI NO: 37534332 NR Description: unknown protein [Oryza sativa (japonica
  misc_feature (1)..(335): Homolog of NCBI NO: 15217969 NR Description: KH domain protein; protein id: At1g51580.1
  misc_feature (1)..(228): Homolog of NCBI NO: 30685269 NR Description: KH domain protein [Arabidopsis thaliana]
  misc_feature (1)..(228): Homolog of NCBI NO: 11357886 NR Description: hypothetical protein F8M21.160 - Arabidopsis >gi|7671496|emb|CAB89337.1| putative protein [Arabidopsis
  misc_feature (1)..(224): Homolog of NCBI NO: 18921324 NR Description: putative nucleic acid binding protein [Oryza

SEQ ID NO: 78553 - DNA, 2436 bp, Arabidopsis thaliana
  misc_feature (1)..(2436): Ceres Seq. ID no. 12642499
  misc_feature: MA Experiment ID: 20000264 Result: Up-regulated in Transcription
  misc_feature: MA Experiment 20000264 PARAMETER Experiment Name: At_Open_Flower_P Parameter: Age (day) Value: 21
  misc_feature: MA Experiment 20000264 PARAMETER Experiment Name: At_Open_Flower_P Parameter: Plant Line Value: WS
  misc_feature: MA Experiment 20000264 PARAMETER Experiment Name: At_Open_Flower_P Parameter: Tissue Value: Open Flower vs. Whole Plant
  misc_feature: MA Experiment ID: 20000794 Result: Up-regulated in Transcription
  misc_feature: MA Experiment 20000794 PARAMETER Experiment Name: At_Petals_P Parameter: Age (day) Value: 23-25 days
  misc_feature: MA Experiment 20000794 PARAMETER Experiment Name: At_Petals_P Parameter: Plant Line Value: WS
  misc_feature: MA Experiment 20000794 PARAMETER Experiment Name: At_Petals_P Parameter: Tissue Value: Petals vs. Whole plant
  misc_feature: MA Experiment ID: 20001910 Result: Up-regulated in Transcription
  misc_feature: MA Experiment 20001910 PARAMETER Experiment Name: At_Drought_Reproduction_P Parameter: Age (day) Value: 37
  misc_feature: MA Experiment 20001910 PARAMETER Experiment Name: At_Drought_Reproduction_P Parameter: Organism Value: A. thaliana
  misc_feature: MA Experiment 20001910 PARAMETER Experiment Name: At_Drought_Reproduction_P Parameter: Plant Line Value: WS
  misc_feature: MA Experiment 20001910 PARAMETER Experiment Name: At_Drought_Reproduction_P Parameter: Timepoint (day) Value: 7
  misc_feature: MA Experiment 20001910 PARAMETER Experiment Name: At_Drought_Reproduction_P Parameter: Tissue Value: Flowers
  misc_feature: MA Experiment 20001910 PARAMETER Experiment Name: At_Drought_Reproduction_P Parameter: Treatment Value: Drought vs. No Drought
atgagcgggaaaactcggattctctttttcctcacatgtctctcctttctattggtttttccaactagatctaacggacaagatttagctctgagctgcgggacatcagaagcttctgctgaccaagataagaaaaaatgggaaccagatacaaagtttttaaagactggaaactcaattcacgcaacggctacatatcaagacccttcacttctctcaacagttccttatatgacagccagaatctttacagctccagcaacttatgaaatcccgattaaaggagataaaagacatttgcttcggttatatttctacccatcaacatacaccggtctcaacatttccaactcgtatttcactgtggaagctaacgatgttaccttactgagcaatttcagcgccgcgattacgtgtcaagctttgactcaagcttatctggttaaagaatactctcttgcacccactgacaaagatgttttgagcatcaagtttaccccttcagataaataccgagacgcatttgcctttataaacggtatcgaggtgattcagatgccggaattgtttgacacggcggctcttgttggtttcacagaccaaacaatggatgccaagactgcgaatcttcagtcaatgtttagacttaatgttggtggtcaggacatccctggaagccaagactccggtgggttgacaagaacttggtataatgatgcaccttacatctttagtgcgggtcttggtgttacacttcaagcaagcaacaattttaggatcaactaccagaacatgccggtgtctatagctccagccgatatatacaaaaccgcaagatctcaaggcccaaacggagatatcaacctcaaatccaatcttacatggatgttccaaatcgataagaacttcacctacattttgagactccatttctgcgaattccagctttccaagatcaaccagaaggttttcaacatttacatcaataacagaacagcgcagatgactccatcaacttttggtcaaccggaatattatgattcatctcttaacgggttagagattttcaagatggacaccatgaaaaatcttgcgggtccaaaccccgagccatcgcctatgcaagctgaggaagaggttaaaaaagaattcaagaacgaaaagagacacgctttcatcattggttcggccggaggagttttagcggttttaatcggtgccttgtgtttcacggcctacaagaagaaacaaggatatcaaggaggcgactctcacacatcaagttggcttcctatatatggaaactctaccacatcaggaaccaaatcaaccatctcagggaagagcaacaatggaagtcacctatccaatctcgcagcaggtttatgccgtagattctctttaccagaaatcaaacacggaacacaaaacttcgatgattccaacgtcattggagttggagggtttggtaaagtctacaaaggagttatagacggcacaactaaagtagcggtaaaaaaatcaaacccaaattcagaacaaggactcaacgaattcgagacagaaatcgaactcctctcaagactaagacacaaacacttagtctccttgataggatactgcgacgagggaggagaaatgtgtctcgtatacgattacatggcatttggaacactccgtgagcatctatacaacacaaagaaaccacaattaacttggaaacgaaggctagagatagctattggagcagcaagaggattacattaccttcacacaggagcaaagtacacgattatacacagagacgttaaaacaactaacatcctcgtagatgagaactgggtagccaaagtttcagactttgggttatccaaaactggacctaacatgaatggaggccatgtaacaaccgtcgtcaaaggaagcttcggttatttagatcctgaatacttcagaagacaacaactgactgagaaatcagacgtttactcattcggagttgttctgttcgaaatcttatgcgcaagaccagcgttaaacccgagtttgcctaaggaacaagtgagtctcggagactgggcaatgaattgcaaacgaaaagggaatttagaggatataatcgatccgaatctgaaagggaagatcaatgcagagtgtttgaagaaatttgcagacacggcggagaagtgtcttaacgatagtggattagaacggccgacaatgggagatgttttgtggaatctcgaattcgcacttcagcttcaagagactgctgacgggactcgtcatcggactccgaataatggaggaagctctgaggatctcggtagaggaggcatggcggttaacgtcgccggtagagatgatgtgagtgatctctcctcagaggacaataccgaaatattctctcagattgtaaatcccaaaggacgataa

SEQ ID NO: 78554 - protein, 811 aa, Arabidopsis thaliana
  peptide (1)..(811): Ceres Seq. ID no. 12642500
  misc_feature (337)..(759): Homolog of NCBI NO: 15230520 NR Description: receptor-protein kinase-like protein; protein id:
  misc_feature (7)..(373): Homolog of NCBI NO: 15230520 NR Description: receptor-protein kinase-like protein; protein id:
  misc_feature (337)..(759): Homolog of NCBI NO: 14334760 NR Description: putative receptor-protein kinase [Arabidopsis
  misc_feature (7)..(373): Homolog of NCBI NO: 14334760 NR Description: putative receptor-protein kinase [Arabidopsis
  misc_feature (337)..(799): Homolog of NCBI NO: 34909896 NR Description: putative receptor-protein kinase [Oryza sativa
  misc_feature (28)..(333): Homolog of NCBI NO: 34909896 NR Description: putative receptor-protein kinase [Oryza sativa
  misc_feature (337)..(759): Homolog of NCBI NO: 17887381 NR Description: receptor protein kinase-like protein [Capsicum
  misc_feature (234)..(334): Homolog of NCBI NO: 17887381 NR Description: receptor protein kinase-like protein [Capsicum
  misc_feature (332)..(811): Homolog of NCBI NO: 15239630 NR Description: receptor-protein kinase-like protein; protein id:
  misc_feature (7)..(333): Homolog of NCBI NO: 15239630 NR Description: receptor-protein kinase-like protein; protein id:
MSGKTRILFFLTCLSFLLVFPTRSNGQDLALSCGTSEASADQDKKKWEPDTKFLKTGNSIHATATYQDPSLLSTVPYMTARIFTAPATYEIPIKGDKRHLLRLYFYPSTYTGLNISNSYFTVEANDVTLLSNFSAAITCQALTQAYLVKEYSLAPTDKDVLSIKFTPSDKYRDAFAFINGIEVIQMPELFDTAALVGFTDQTMDAKTANLQSMFRLNVGGQDIPGSQDSGGLTRTWYNDAPYIFSAGLGVTLQASNNFRINYQNMPVSIAPADIYKTARSQGPNGDINLKSNLTWMFQIDKNFTYILRLHFCEFQLSKINQKVFNIYINNRTAQMTPSTFGQPEYYDSSLNGLEIFKMDTMKNLAGPNPEPSPMQAEEEVKKEFKNEKRHAFIIGSAGGVLAVLIGALCFTAYKKKQGYQGGDSHTSSWLPIYGNSTTSGTKSTISGKSNNGSHLSNLAAGLCRRFSLPEIKHGTQNFDDSNVIGVGGFGKVYKGVIDGTTKVAVKKSNPNSEQGLNEFETEIELLSRLRHKHLVSLIGYCDEGGEMCLVYDYMAFGTLREHLYNTKKPQLTWKRRLEIAIGAARGLHYLHTGAKYTIIHRDVKTTNILVDENWVAKVSDFGLSKTGPNMNGGHVTTVVKGSFGYLDPEYFRRQQLTEKSDVYSFGVVLFEILCARPALNPSLPKEQVSLGDWAMNCKRKGNLEDIIDPNLKGKINAECLKKFADTAEKCLNDSGLERPTMGDVLWNLEFALQLQETADGTRHRTPNNGGSSEDLGRGGMAVNVAGRDDVSDLSSEDNTEIFSQIVNPKGR

SEQ ID NO: 78555 - protein, 734 aa, Arabidopsis thaliana
  peptide (1)..(734): Ceres Seq. ID no. 12642501
  misc_feature (260)..(682): Homolog of NCBI NO: 15230520 NR Description: receptor-protein kinase-like protein; protein id:
  misc_feature (1)..(296): Homolog of NCBI NO: 15230520 NR Description: receptor-protein kinase-like protein; protein id:
  misc_feature (260)..(682): Homolog of NCBI NO: 14334760 NR Description: putative receptor-protein kinase [Arabidopsis
  misc_feature (1)..(296): Homolog of NCBI NO: 14334760 NR Description: putative receptor-protein kinase [Arabidopsis
  misc_feature (260)..(722): Homolog of NCBI NO: 34909896 NR Description: putative receptor-protein kinase [Oryza sativa
  misc_feature (1)..(256): Homolog of NCBI NO: 34909896 NR Description: putative receptor-protein kinase [Oryza sativa
  misc_feature (260)..(682): Homolog of NCBI NO: 17887381 NR Description: receptor protein kinase-like protein [Capsicum
  misc_feature (157)..(257): Homolog of NCBI NO: 17887381 NR Description: receptor protein kinase-like protein [Capsicum
  misc_feature (255)..(734): Homolog of NCBI NO: 15239630 NR Description: receptor-protein kinase-like protein; protein id:
  misc_feature (1)..(256): Homolog of NCBI NO: 15239630 NR Description: receptor-protein kinase-like protein; protein id:
MTARIFTAPATYEIPIKGDKRHLLRLYFYPSTYTGLNISNSYFTVEANDVTLLSNFSAAITCQALTQAYLVKEYSLAPTDKDVLSIKFTPSDKYRDAFAFINGIEVIQMPELFDTAALVGFTDQTMDAKTANLQSMFRLNVGGQDIPGSQDSGGLTRTWYNDAPYIFSAGLGVTLQASNNFRINYQNMPVSIAPADIYKTARSQGPNGDINLKSNLTWMFQIDKNFTYILRLHFCEFQLSKINQKVFNIYINNRTAQMTPSTFGQPEYYDSSLNGLEIFKMDTMKNLAGPNPEPSPMQAEEEVKKEFKNEKRHAFIIGSAGGVLAVLIGALCFTAYKKKQGYQGGDSHTSSWLPIYGNSTTSGTKSTISGKSNNGSHLSNLAAGLCRRFSLPEIKHGTQNFDDSNVIGVGGFGKVYKGVIDGTTKVAVKKSNPNSEQGLNEFETEIELLSRLRHKHLVSLIGYCDEGGEMCLVYDYMAFGTLREHLYNTKKPQLTWKRRLEIAIGAARGLHYLHTGAKYTIIHRDVKTTNILVDENWVAKVSDFGLSKTGPNMNGGHVTTVVKGSFGYLDPEYFRRQQLTEKSDVYSFGVVLFEILCARPALNPSLPKEQVSLGDWAMNCKRKGNLEDIIDPNLKGKINAECLKKFADTAEKCLNDSGLERPTMGDVLWNLEFALQLQETADGTRHRTPNNGGSSEDLGRGGMAVNVAGRDDVSDLSSEDNTEIFSQIVNPKGR

SEQ ID NO: 78556 - protein, 626 aa, Arabidopsis thaliana
  peptide (1)..(626): Ceres Seq. ID no. 12642502
  misc_feature (152)..(574): Homolog of NCBI NO: 15230520 NR Description: receptor-protein kinase-like protein; protein id:
  misc_feature (1)..(188): Homolog of NCBI NO: 15230520 NR Description: receptor-protein kinase-like protein; protein id:
  misc_feature (152)..(574): Homolog of NCBI NO: 14334760 NR Description: putative receptor-protein kinase [Arabidopsis
  misc_feature (1)..(188): Homolog of NCBI NO: 14334760 NR Description: putative receptor-protein kinase [Arabidopsis
  misc_feature (152)..(614): Homolog of NCBI NO: 34909896 NR Description: putative receptor-protein kinase [Oryza sativa
  misc_feature (1)..(148): Homolog of NCBI NO: 34909896 NR Description: putative receptor-protein kinase [Oryza sativa
  misc_feature (152)..(574): Homolog of NCBI NO: 17887381 NR Description: receptor protein kinase-like protein [Capsicum
  misc_feature (49)..(149): Homolog of NCBI NO: 17887381 NR Description: receptor protein kinase-like protein [Capsicum
  misc_feature (147)..(626): Homolog of NCBI NO: 15239630 NR Description: receptor-protein kinase-like protein; protein id:
  misc_feature (1)..(148): Homolog of NCBI NO: 15239630 NR Description: receptor-protein kinase-like protein; protein id:
MPELFDTAALVGFTDQTMDAKTANLQSMFRLNVGGQDIPGSQDSGGLTRTWYNDAPYIFSAGLGVTLQASNNFRINYQNMPVSIAPADIYKTARSQGPNGDINLKSNLTWMFQIDKNFTYILRLHFCEFQLSKINQKVFNIYINNRTAQMTPSTFGQPEYYDSSLNGLEIFKMDTMKNLAGPNPEPSPMQAEEEVKKEFKNEKRHAFIIGSAGGVLAVLIGALCFTAYKKKQGYQGGDSHTSSWLPIYGNSTTSGTKSTISGKSNNGSHLSNLAAGLCRRFSLPEIKHGTQNFDDSNVIGVGGFGKVYKGVIDGTTKVAVKKSNPNSEQGLNEFETEIELLSRLRHKHLVSLIGYCDEGGEMCLVYDYMAFGTLREHLYNTKKPQLTWKRRLEIAIGAARGLHYLHTGAKYTIIHRDVKTTNILVDENWVAKVSDFGLSKTGPNMNGGHVTTVVKGSFGYLDPEYFRRQQLTEKSDVYSFGVVLFEILCARPALNPSLPKEQVSLGDWAMNCKRKGNLEDIIDPNLKGKINAECLKKFADTAEKCLNDSGLERPTMGDVLWNLEFALQLQETADGTRHRTPNNGGSSEDLGRGGMAVNVAGRDDVSDLSSEDNTEIFSQIVNPKGR

SEQ ID NO: 78557 - DNA, 2343 bp, Arabidopsis thaliana
  misc_feature (1)..(2343): Ceres Seq. ID no. 12642535
  misc_feature: MA Experiment ID: 20000182 Result: Down-regulated in Transcription
  misc_feature: MA Experiment 20000182 PARAMETER Experiment Name: At_2mM_SA_P Parameter: Age (day) Value: 14
  misc_feature: MA Experiment 20000182 PARAMETER Experiment Name: At_2mM_SA_P Parameter: Organism Value: A. thaliana
  misc_feature: MA Experiment 20000182 PARAMETER Experiment Name: At_2mM_SA_P Parameter: Plant Line Value: WS
  misc_feature: MA Experiment 20000182 PARAMETER Experiment Name: At_2mM_SA_P Parameter: Timepoint (hr) Value: 6
  misc_feature: MA Experiment 20000182 PARAMETER Experiment Name: At_2mM_SA_P Parameter: Tissue Value: Aerial
  misc_feature: MA Experiment 20000182 PARAMETER Experiment Name: At_2mM_SA_P Parameter: Treatment Value: 2mM SA vs. No Treatment
  misc_feature: MA Experiment ID: 20000184 Result: Down-regulated in Transcription
  misc_feature: MA Experiment 20000184 PARAMETER Experiment Name: At_Shoots__P Parameter: Age (day) Value: 7
  misc_feature: MA Experiment 20000184 PARAMETER Experiment Name: At_Shoots__P Parameter: Tissue Value: Shoots vs. Whole Plant
  misc_feature: MA Experiment ID: 20000185 Result: Down-regulated in Transcription
  misc_feature: MA Experiment 20000185 PARAMETER Experiment Name: At_Roots__P Parameter: Age (day) Value: 7 vs. 21
  misc_feature: MA Experiment 20000185 PARAMETER Experiment Name: At_Roots__P Parameter: Organism Value: A. thaliana
  misc_feature: MA Experiment 20000185 PARAMETER Experiment Name: At_Roots__P Parameter: Tissue Value: Roots vs. Whole Plant
  misc_feature: MA Experiment ID: 20000235 Result: Up-regulated in Transcription
  misc_feature: MA Experiment 20000235 PARAMETER Experiment Name: At_Siliques_P Parameter: Age (day) Value: 21
  misc_feature: MA Experiment 20000235 PARAMETER Experiment Name: At_Siliques_P Parameter: Organism Value: A. thaliana
  misc_feature: MA Experiment 20000235 PARAMETER Experiment Name: At_Siliques_P Parameter: Plant Line Value: WS
  misc_feature: MA Experiment 20000235 PARAMETER Experiment Name: At_Siliques_P Parameter: Tissue Value: 5-10mm Siliques vs. Whole Plant
  misc_feature: MA Experiment ID: 20000264 Result: Up-regulated in Transcription
  misc_feature: MA Experiment 20000264 PARAMETER Experiment Name: At_Open_Flower_P Parameter: Age (day) Value: 21
  misc_feature: MA Experiment 20000264 PARAMETER Experiment Name: At_Open_Flower_P Parameter: Plant Line Value: WS
  misc_feature: MA Experiment 20000264 PARAMETER Experiment Name: At_Open_Flower_P Parameter: Tissue Value: Open Flower vs. Whole Plant
  misc_feature: MA Experiment ID: 20000265 Result: Up-regulated in Transcription
  misc_feature: MA Experiment 20000265 PARAMETER Experiment Name: At_Open_Flower_P Parameter: Age (day) Value: 21
  misc_feature: MA Experiment 20000265 PARAMETER Experiment Name: At_Open_Flower_P Parameter: Plant Line Value: WS
  misc_feature: MA Experiment 20000265 PARAMETER Experiment Name: At_Open_Flower_P Parameter: Tissue Value: Closed Flower vs. Whole Plant
  misc_feature: MA Experiment ID: 20000286 Result: Up-regulated in Transcription
  misc_feature: MA Experiment 20000286 PARAMETER Experiment Name: At_Open_Flower_P Parameter: Age (day) Value: 21
  misc_feature: MA Experiment 20000286 PARAMETER Experiment Name: At_Open_Flower_P Parameter: Plant Line Value: WS
  misc_feature: MA Experiment 20000286 PARAMETER Experiment Name: At_Open_Flower_P Parameter: Tissue Value: Half Open vs. Whole Plant
  misc_feature: MA Experiment ID: 20000438 Result: Down-regulated in Transcription
  misc_feature: MA Experiment 20000438 PARAMETER Experiment Name: At_Shoots__P Parameter: Age (day) Value: 14
  misc_feature: MA Experiment 20000438 PARAMETER Experiment Name: At_Shoots__P Parameter: Tissue Value: Shoots vs. Whole Plant
  misc_feature: MA Experiment ID: 20000439 Result: Down-regulated in Transcription
  misc_feature: MA Experiment 20000439 PARAMETER Experiment Name: At_Roots__P Parameter: Age (day) Value: 14 vs. 21
  misc_feature: MA Experiment 20000439 PARAMETER Experiment Name: At_Roots__P Parameter: Organism Value: A. thaliana
  misc_feature: MA Experiment 20000439 PARAMETER Experiment Name: At_Roots__P Parameter: Tissue Value: Roots vs. Whole Plant
  misc_feature: MA Experiment ID: 20000794 Result: Up-regulated in Transcription
  misc_feature: MA Experiment 20000794 PARAMETER Experiment Name: At_Petals_P Parameter: Age (day) Value: 23-25 days
  misc_feature: MA Experiment 20000794 PARAMETER Experiment Name: At_Petals_P Parameter: Plant Line Value: WS
  misc_feature: MA Experiment 20000794 PARAMETER Experiment Name: At_Petals_P Parameter: Tissue Value: Petals vs. Whole plant
atgtggtcttcgagaactctcaagtatattttcaggctaagacctgaaccaatttcttcctcatcgtcttctgcgtattcgctctctcgcatcaccggaggttctccaattccgtcgcagcagcaacgatcgattacctccacggcgccgcttaatggatggatggattcgatcaaaggtgtttttaccgggaacaaggatactcctttagaagaatcaaatctacccgttgaagctttcactcttctccgagagaatctccaagcgagtcaaaagcaagatgcggctaaacattgcaaatgcactataactgatgtggagaatacgctgtccaaatttacttgggccaggcaagctcacaagaagatgacagagttgaaagaaggaggcaaaccgttaccaaagaatatgggagagctgcaaaaaatgatggggtcaacaccaatggatctggcgagatcaaacttagccaaaagtgggcagatcagccgcaatgcactttgtccctgtggttccaaaaagagatataaaagtacagagagaactaagttcagatccatggaacctgcaacttcttcaccattgccacgagacacgtcggagcaggatcccgcgctggcgcagagtgaagatcagtctcaaggaagacttagggtttctgcttatgaccttatggtagtagacagtgatttagagggattagatcaaagaaaggaagagatgcgtaacatttttgatgatattcaggataaagcttcattaattcttcagttctcacttaagtgggaagaaatcgacgacaggtttggttttctaaagcaacgagccatggagaaggaggtctctgtccggaatcagattctggagctggagaagaaggaagagcgactgaggcttgttgaagaaagagagaggaagattgaggcatccttcagtacattgcaggagaaaggaaatgaatctgatctgatactgttaatggaagcgaatgtgatgagattggttcttcaaatgcagtttgaacaagtggtggttgctcagctcaacgcccaagagaactttcttggttcgctccatgattcgatgatgaagaagcatgaagagctaatgacagagcttgaagcaaggaaaaatgaggttgctttgatttctaagacgatcgatgccaagacttgtgatttagacatgaaagtcaaagactttgatcttaagcaaacaacagagtctgagagaatgagaaaagagactgagctgatggaaacatctcttaagcaacttgaagccagggagaatgagcttaggttgcttaatgagaccatccaagggaaatcgatggagctggagaagaaagaagtcaactttcaactgaaacatgaagcagcagccagagagactgaagtgaagaacaagtttcttgagttaaaggaaaagaaacttgaagaaagggagcaacatttggagttgaaacagagaaaaaaagaaaaaccagcaataagagcagagactcgtaagagatctaggcttgaatatgagtctccattgtcggcagagaagggtagatatgctgagactctgattcgccctggaaaaaagcaagtgcagaaaagagaggctcatgaaattatctacattgatgaagatgagccattcaactgtcctgatccagactttcacgattttaacaacacaatgagctctttcgctgtaggtcaagtatgggctctatatgatcctgtagatgatatgcctagatactatgctgagatcaggaaagtattgcaacctcagctgagtttacgggtgacatggctcgaatcattacagaccacagaggaaccaattcctgcttgtgggagattcgaacatggaaaatcagagaccagtagccacttgatgttttctcatgagatgtatcacaccatacgaggccaatatgtcactataaacccgagaaaaggcgagacgtgggcacttttcggagattggaccaagacttggaagagtcacagtgagcaacaaaagactccttacagttacgactttgtggaagtcgtgactgaatttgacagtgatcgaggcattggagtggcttatctagggagagtggaaggattcacatcagtgtatgaacgtgctgcgcaaaatggtcttgtcgaaatcatgatatcatgtgatgaaatgcttaggttttctcatagagttccatctttcaaaatgactggagatgagaaagaaggagtcccagctggctcttttgagctagaccctgctgctgttcctcgagtttatcttaaagatgctaaggtcaaagaagaaaagatggagcccatagtcttggtttga

SEQ ID NO: 78558 - protein, 780 aa, Arabidopsis thaliana
  peptide (1)..(780): Ceres Seq. ID no. 12642536
  misc_feature (77)..(495): Pfam Name: Myosin tail Pfam Description: Myosin tail
  misc_feature (227)..(775): Homolog of NCBI NO: 15234343 NR Description: putative protein; protein id: At4g27980.1
  misc_feature (401)..(749): Homolog of NCBI NO: 15229903 NR Description: hypothetical protein; protein id: At3g05110.1 thaliana] >gi|6729021|gb|AAF27017.1|AC009177_7 hypothetical
  misc_feature (553)..(769): Homolog of NCBI NO: 15240465 NR Description: putative protein; protein id: At5g27240.1
  misc_feature (553)..(769): Homolog of NCBI NO: 7485307 NR Description: hypothetical protein A_TM021B04.9 - Arabidopsis
  misc_feature (405)..(767): Homolog of NCBI NO: 15229859 NR Description: hypothetical protein, contains DnaJ motif: heat shock protein motif; protein id: At3g04980.1 [Arabidopsis
  misc_feature (85)..(140): Homolog of NCBI NO: 15229851 NR Description: unknown protein; protein id: At3g04950.1
  misc_feature (55)..(84): Homolog of NCBI NO: 15229851 NR Description: unknown protein; protein id: At3g04950.1
  misc_feature (511)..(760): Homolog of NCBI NO: 34914822 NR Description: B1045D11.23 [Oryza sativa (japonica
  misc_feature (483)..(778): Homolog of NCBI NO: 15239554 NR Description: putative protein; protein id: At5g18750.1
  misc_feature (461)..(777): Homolog of NCBI NO: 15238659 NR Description: DnaJ protein-like; protein id: At5g53150.1
MWSSRTLKYIFRLRPEPISSSSSSAYSLSRITGGSPIPSQQQRSITSTAPLNGWMDSIKGVFTGNKDTPLEESNLPVEAFTLLRENLQASQKQDAAKHCKCTITDVENTLSKFTWARQAHKKMTELKEGGKPLPKNMGELQKMMGSTPMDLARSNLAKSGQISRNALCPCGSKKRYKSTERTKFRSMEPATSSPLPRDTSEQDPALAQSEDQSQGRLRVSAYDLMVVDSDLEGLDQRKEEMRNIFDDIQDKASLILQFSLKWEEIDDRFGFLKQRAMEKEVSVRNQILELEKKEERLRLVEERERKIEASFSTLQEKGNESDLILLMEANVMRLVLQMQFEQVVVAQLNAQENFLGSLHDSMMKKHEELMTELEARKNEVALISKTIDAKTCDLDMKVKDFDLKQTTESERMRKETELMETSLKQLEARENELRLLNETIQGKSMELEKKEVNFQLKHEAAARETEVKNKFLELKEKKLEEREQHLELKQRKKEKPAIRAETRKRSRLEYESPLSAEKGRYAETLIRPGKKQVQKREAHEIIYIDEDEPFNCPDPDFHDFNNTMSSFAVGQVWALYDPVDDMPRYYAEIRKVLQPQLSLRVTWLESLQTTEEPIPACGRFEHGKSETSSHLMFSHEMYHTIRGQYVTINPRKGETWALFGDWTKTWKSHSEQQKTPYSYDFVEVVTEFDSDRGIGVAYLGRVEGFTSVYERAAQNGLVEIMISCDEMLRFSHRVPSFKMTGDEKEGVPAGSFELDPAAVPRVYLKDAKVKEEKMEPIVLV

SEQ ID NO: 78559 - protein, 726 aa, Arabidopsis thaliana
  peptide (1)..(726): Ceres Seq. ID no. 12642537
  misc_feature (23)..(441): Pfam Name: Myosin tail Pfam Description: Myosin tail
  misc_feature (173)..(721): Homolog of NCBI NO: 15234343 NR Description: putative protein; protein id: At4g27980.1
  misc_feature (347)..(695): Homolog of NCBI NO: 15229903 NR Description: hypothetical protein; protein id: At3g05110.1 thaliana] >gi|6729021|gb|AAF27017.1|AC009177_7 hypothetical
  misc_feature (499)..(715): Homolog of NCBI NO: 15240465 NR Description: putative protein; protein id: At5g27240.1
  misc_feature (499)..(715): Homolog of NCBI NO: 7485307 NR Description: hypothetical protein A_TM021B04.9 - Arabidopsis
  misc_feature (351)..(713): Homolog of NCBI NO: 15229859 NR Description: hypothetical protein, contains DnaJ motif: heat shock protein motif; protein id: At3g04980.1 [Arabidopsis
  misc_feature (31)..(86): Homolog of NCBI NO: 15229851 NR Description: unknown protein; protein id: At3g04950.1
  misc_feature (1)..(30): Homolog of NCBI NO: 15229851 NR Description: unknown protein; protein id: At3g04950.1
  misc_feature (457)..(706): Homolog of NCBI NO: 34914822 NR Description: B1045D11.23 [Oryza sativa (japonica
  misc_feature (429)..(724): Homolog of NCBI NO: 15239554 NR Description: putative protein; protein id: At5g18750.1
  misc_feature (407)..(723): Homolog of NCBI NO: 15238659 NR Description: DnaJ protein-like; protein id: At5g53150.1
MDSIKGVFTGNKDTPLEESNLPVEAFTLLRENLQASQKQDAAKHCKCTITDVENTLSKFTWARQAHKKMTELKEGGKPLPKNMGELQKMMGSTPMDLARSNLAKSGQISRNALCPCGSKKRYKSTERTKFRSMEPATSSPLPRDTSEQDPALAQSEDQSQGRLRVSAYDLMVVDSDLEGLDQRKEEMRNIFDDIQDKASLILQFSLKWEEIDDRFGFLKQRAMEKEVSVRNQILELEKKEERLRLVEERERKIEASFSTLQEKGNESDLILLMEANVMRLVLQMQFEQVVVAQLNAQENFLGSLHDSMMKKHEELMTELEARKNEVALISKTIDAKTCDLDMKVKDFDLKQTTESERMRKETELMETSLKQLEARENELRLLNETIQGKSMELEKKEVNFQLKHEAAARETEVKNKFLELKEKKLEEREQHLELKQRKKEKPAIRAETRKRSRLEYESPLSAEKGRYAETLIRPGKKQVQKREAHEIIYIDEDEPFNCPDPDFHDFNNTMSSFAVGQVWALYDPVDDMPRYYAEIRKVLQPQLSLRVTWLESLQTTEEPIPACGRFEHGKSETSSHLMFSHEMYHTIRGQYVTINPRKGETWALFGDWTKTWKSHSEQQKTPYSYDFVEVVTEFDSDRGIGVAYLGRVEGFTSVYERAAQNGLVEIMISCDEMLRFSHRVPSFKMTGDEKEGVPAGSFELDPAAVPRVYLKDAKVKEEKMEPIVLV

SEQ ID NO: 78560 - protein, 658 aa, Arabidopsis thaliana
  peptide (1)..(658): Ceres Seq. ID no. 12642538
  misc_feature (1)..(373): Pfam Name: Myosin tail Pfam Description: Myosin tail
  misc_feature (105)..(653): Homolog of NCBI NO: 15234343 NR Description: putative protein; protein id: At4g27980.1
  misc_feature (279)..(627): Homolog of NCBI NO: 15229903 NR Description: hypothetical protein; protein id: At3g05110.1 thaliana] >gi|6729021|gb|AAF27017.1|AC009177_7 hypothetical
  misc_feature (431)..(647): Homolog of NCBI NO: 15240465 NR Description: putative protein; protein id: At5g27240.1
  misc_feature (431)..(647): Homolog of NCBI NO: 7485307 NR Description: hypothetical protein A_TM021B04.9 - Arabidopsis
  misc_feature (283)..(645): Homolog of NCBI NO: 15229859 NR Description: hypothetical protein, contains DnaJ motif: heat shock protein motif; protein id: At3g04980.1 [Arabidopsis
  misc_feature (1)..(18): Homolog of NCBI NO: 15229851 NR Description: unknown protein; protein id: At3g04950.1
  misc_feature (389)..(638): Homolog of NCBI NO: 34914822 NR Description: B1045D11.23 [Oryza sativa (japonica
  misc_feature (361)..(656): Homolog of NCBI NO: 15239554 NR Description: putative protein; protein id: At5g18750.1
  misc_feature (339)..(655): Homolog of NCBI NO: 15238659 NR Description: DnaJ protein-like; protein id: At5g53150.1
  misc_feature (352)..(644): Homolog of NCBI NO: 34896966 NR Description: putative heat shock protein [Oryza sativa]
MTELKEGGKPLPKNMGELQKMMGSTPMDLARSNLAKSGQISRNALCPCGSKKRYKSTERTKFRSMEPATSSPLPRDTSEQDPALAQSEDQSQGRLRVSAYDLMVVDSDLEGLDQRKEEMRNIFDDIQDKASLILQFSLKWEEIDDRFGFLKQRAMEKEVSVRNQILELEKKEERLRLVEERERKIEASFSTLQEKGNESDLILLMEANVMRLVLQMQFEQVVVAQLNAQENFLGSLHDSMMKKHEELMTELEARKNEVALISKTIDAKTCDLDMKVKDFDLKQTTESERMRKETELMETSLKQLEARENELRLLNETIQGKSMELEKKEVNFQLKHEAAARETEVKNKFLELKEKKLEEREQHLELKQRKKEKPAIRAETRKRSRLEYESPLSAEKGRYAETLIRPGKKQVQKREAHEIIYIDEDEPFNCPDPDFHDFNNTMSSFAVGQVWALYDPVDDMPRYYAEIRKVLQPQLSLRVTWLESLQTTEEPIPACGRFEHGKSETSSHLMFSHEMYHTIRGQYVTINPRKGETWALFGDWTKTWKSHSEQQKTPYSYDFVEVVTEFDSDRGIGVAYLGRVEGFTSVYERAAQNGLVEIMISCDEMLRFSHRVPSFKMTGDEKEGVPAGSFELDPAAVPRVYLKDAKVKEEKMEPIVLV

SEQ ID NO: 78561 - DNA, 1247 bp, Arabidopsis thaliana
  misc_feature (1)..(1247): Ceres Seq. ID no. 12642597
  misc_feature: MA Experiment ID: 108434 Result: Up-regulated in Transcription
  misc_feature: MA Experiment 108434 PARAMETER Experiment Name: At_Root_Tips_cDNA_P Parameter: Tissue Value: Root Tips
  misc_feature: MA Experiment ID: 108463 Result: Down-regulated in Transcription
  misc_feature: MA Experiment 108463 PARAMETER Experiment Name: At_Germinating_Seeds_cDNA_P Parameter: Age (day) Value: 3 vs. 0
  misc_feature: MA Experiment 108463 PARAMETER Experiment Name: At_Germinating_Seeds_cDNA_P Parameter: Tissue Value: Germinating Seeds
  misc_feature: MA Experiment ID: 108464 Result: Down-regulated in Transcription
  misc_feature: MA Experiment 108464 PARAMETER Experiment Name: At_Germinating_Seeds_cDNA_P Parameter: Age (day) Value: 4 vs. 0
  misc_feature: MA Experiment 108464 PARAMETER Experiment Name: At_Germinating_Seeds_cDNA_P Parameter: Tissue Value: Germinating Seeds
  misc_feature: MA Experiment ID: 20000224 Result: Down-regulated in Transcription
atctccttctccggcgaagaaattgaaaattcattatccctaaaaccctaataaaggtccagagagtcgtcagaaaccaccgattagcttttgaaatggacggtgccacataccaaagattcccaaagatcaagatccgtgagcttaaagatgattacgccaagttcgagcttcgtgaaaccgacgtttctatggccaacgctctccgtcgcgtaatgatctccgaagtccctaccgtcgcaatagatctagtcgaaatcgaggttaattcatctgtactcaacgacgagttcattgctcatcgattaggtctcattcctctcactagcgaacgtgctatgagcatgcgtttctctcgagattgtgatgcttgtgatggagatggacaatgcgagttttgctctgttgagtttcggcttagttctaagtgtgttactgatcaaaccctagatgttactagtagggatttgtacagtgctgatcctactgttactcctgtggatttcactattgactcgtctgtatctgattcaagcgagcacaagggaattatcattgtgaaactgcgtcggggacaagagttgaagcttagagcgatagcgaggaaagggattgggaaagatcatgcgaaatggtctcctgcagctactgttacgtttatgtatgagcctgacataattattaatgaagatatgatggatactttgtcagacgaggaaaagatcgacttgattgagagcagtcctaccaaagtgtttggcatggatccagtcaccagacaggttgtagtggttgatcctgaagcatacacttacgatgaagaagtgatcaagaaagctgaagcaatggggaaaccgggactcattgagatcagtccgaaagatgacagttttatattcactgttgagtccacaggtgcagtgaaggcttcccaactggtactaaatgccattgatcttctgaagcagaagcttgatgcagtccgtctctcagatgacaccgtagaagcggatgatcagtttggtgaactcggtgcccatatgcgtggaggatgaactcaagtgattaattcgagctctttgttatacctgtttgtttcaggttttgagtttcttctggagcagactgatattaaccgtagtggcactgtcttgtttgataacatgtgaagtggcagtcttctatttgttctggacctctgatccctctgttcctgaatcttgttaagtttggttgttgttagttgt

SEQ ID NO: 78562 - protein, 319 aa, Arabidopsis thaliana; identical to SEQ ID NO: 26759
  peptide (1)..(319): Ceres Seq. ID no. 12642598
  misc_feature (53)..(181): Pfam Name: RNA polymerase Rpb3/RpoA insert domain Pfam Description: RNA polymerase Rpb3/RpoA insert domain
  misc_feature (1)..(319): Homolog of NCBI NO: 15226523 NR Description: DNA-directed RNA polymerase II, third largest protein id: At2g15430.1, supported by cDNA: 3839., supported by gi_17381017, supported by cDNA: gi_20465882 [Arabidopsis
  misc_feature (1)..(319): Homolog of NCBI NO: 21593370 NR Description: DNA-directed RNA polymerase II, third largest
  misc_feature (1)..(319): Homolog of NCBI NO: 15226509 NR Description: DNA-directed RNA polymerase II, third largest protein id: At2g15400.1 [Arabidopsis thaliana]
  misc_feature (1)..(319): Homolog of NCBI NO: 2129725 NR Description: DNA-directed RNA polymerase (EC 2.7.7.6) II 35.5K B - Arabidopsis thaliana >gi|514320|gb|AAB03740.1| RNA polymerase
  misc_feature (6)..(200): Homolog of NCBI NO: 40645083 NR Description: homologue of DNA-directed RNA polymerase II
  misc_feature (262)..(293): Homolog of NCBI NO: 40645083 NR Description: homologue of DNA-directed RNA polymerase II
  misc_feature (6)..(193): Homolog of NCBI NO: 28278474 NR Description: Similar to polymerase (RNA) II (DNA directed)
  misc_feature (11)..(297): Homolog of NCBI NO: 116575 NR Description: Conjugation stage-specific protein
  misc_feature (6)..(211): Homolog of NCBI NO: 39589723 NR Description: Hypothetical protein CBG12350 [Caenorhabditis
  misc_feature (221)..(299): Homolog of NCBI NO: 39589723 NR Description: Hypothetical protein CBG12350 [Caenorhabditis

SEQ ID NO: 78563 - protein, 287 aa, Arabidopsis thaliana; identical to SEQ ID NO: 26760
  peptide (1)..(287): Ceres Seq. ID no. 12642599
  misc_feature (21)..(149): Pfam Name: RNA polymerase Rpb3/RpoA insert domain Pfam Description: RNA polymerase Rpb3/RpoA insert domain
  misc_feature (1)..(287): Homolog of NCBI NO: 15226523 NR Description: DNA-directed RNA polymerase II, third largest protein id: At2g15430.1, supported by cDNA: 3839., supported by gi_17381017, supported by cDNA: gi_20465882 [Arabidopsis
  misc_feature (1)..(287): Homolog of NCBI NO: 21593370 NR Description: DNA-directed RNA polymerase II, third largest
  misc_feature (1)..(287): Homolog of NCBI NO: 15226509 NR Description: DNA-directed RNA polymerase II, third largest protein id: At2g15400.1 [Arabidopsis thaliana]
  misc_feature (1)..(287): Homolog of NCBI NO: 2129725 NR Description: DNA-directed RNA polymerase (EC 2.7.7.6) II 35.5K B - Arabidopsis thaliana >gi|514320|gb|AAB03740.1| RNA polymerase
  misc_feature (1)..(168): Homolog of NCBI NO: 40645083 NR Description: homologue of DNA-directed RNA polymerase II
  misc_feature (230)..(261): Homolog of NCBI NO: 40645083 NR Description: homologue of DNA-directed RNA polymerase II
  misc_feature (1)..(161): Homolog of NCBI NO: 28278474 NR Description: Similar to polymerase (RNA) II (DNA directed)
  misc_feature (1)..(265): Homolog of NCBI NO: 116575 NR Description: Conjugation stage-specific protein
  misc_feature (1)..(179): Homolog of NCBI NO: 39589723 NR Description: Hypothetical protein CBG12350 [Caenorhabditis
  misc_feature (189)..(267): Homolog of NCBI NO: 39589723 NR Description: Hypothetical protein CBG12350 [Caenorhabditis

SEQ ID NO: 78564 - protein, 279 aa, Arabidopsis thaliana; identical to SEQ ID NO: 26761
  peptide (1)..(279): Ceres Seq. ID no. 12642600
  misc_feature (13)..(141): Pfam Name: RNA polymerase Rpb3/RpoA insert domain Pfam Description: RNA polymerase Rpb3/RpoA insert domain
  misc_feature (1)..(279): Homolog of NCBI NO: 15226523 NR Description: DNA-directed RNA polymerase II, third largest protein id: At2g15430.1, supported by cDNA: 3839., supported by gi_17381017, supported by cDNA: gi_20465882 [Arabidopsis
  misc_feature (1)..(279): Homolog of NCBI NO: 21593370 NR Description: DNA-directed RNA polymerase II, third largest
  misc_feature (1)..(279): Homolog of NCBI NO: 15226509 NR Description: DNA-directed RNA polymerase II, third largest protein id: At2g15400.1 [Arabidopsis thaliana]
  misc_feature (1)..(279): Homolog of NCBI NO: 2129725 NR Description: DNA-directed RNA polymerase (EC 2.7.7.6) II 35.5K B - Arabidopsis thaliana >gi|514320|gb|AAB03740.1| RNA polymerase
  misc_feature (1)..(160): Homolog of NCBI NO: 40645083 NR Description: homologue of DNA-directed RNA polymerase II
  misc_feature (222)..(253): Homolog of NCBI NO: 40645083 NR Description: homologue of DNA-directed RNA polymerase II
  misc_feature (1)..(153): Homolog of NCBI NO: 28278474 NR Description: Similar to polymerase (RNA) II (DNA directed)
  misc_feature (1)..(257): Homolog of NCBI NO: 116575 NR Description: Conjugation stage-specific protein
  misc_feature (1)..(171): Homolog of NCBI NO: 39589723 NR Description: Hypothetical protein CBG12350 [Caenorhabditis
  misc_feature (181)..(259): Homolog of NCBI NO: 39589723 NR Description: Hypothetical protein CBG12350 [Caenorhabditis

SEQ ID NO: 78565 - DNA, 1446 bp, Arabidopsis thaliana
  misc_feature (1)..(1446): Ceres Seq. ID no. 12642605
  misc_feature: MA Experiment ID: 20000179 Result: Down-regulated in Transcription
  misc_feature: MA Experiment 20000179 PARAMETER Experiment Name: At_Germinating_Seeds_P Parameter: Age (hr) Value: 6 vs. 0
  misc_feature: MA Experiment 20000179 PARAMETER Experiment Name: At_Germinating_Seeds_P Parameter: Tissue Value: Germinating Seeds
  misc_feature: MA Experiment ID: 20000180 Result: Down-regulated in Transcription
  misc_feature: MA Experiment 20000180 PARAMETER Experiment Name: At_Germinating_Seeds_P Parameter: Age (hr) Value: 24 vs. 0
  misc_feature: MA Experiment 20000180 PARAMETER Experiment Name: At_Germinating_Seeds_P Parameter: Tissue Value: Germinating Seeds
  misc_feature: MA Experiment ID: 20000182 Result: Up-regulated in Transcription
  misc_feature: MA Experiment 20000182 PARAMETER Experiment Name: At_2mM_SA_P Parameter: Age (day) Value: 14
  misc_feature: MA Experiment 20000182 PARAMETER Experiment Name: At_2mM_SA_P Parameter: Organism Value: A. thaliana
  misc_feature: MA Experiment 20000182 PARAMETER Experiment Name: At_2mM_SA_P Parameter: Plant Line Value: WS
  misc_feature: MA Experiment 20000182 PARAMETER Experiment Name: At_2mM_SA_P Parameter: Timepoint (hr) Value: 6
  misc_feature: MA Experiment 20000182 PARAMETER Experiment Name: At_2mM_SA_P Parameter: Tissue Value: Aerial
  misc_feature: MA Experiment 20000182 PARAMETER Experiment Name: At_2mM_SA_P Parameter: Treatment Value: 2mM SA vs. No Treatment
  misc_feature: MA Experiment ID: 20000184 Result: Down-regulated in Transcription
  misc_feature: MA Experiment 20000184 PARAMETER Experiment Name: At_Shoots__P Parameter: Age (day) Value: 7
  misc_feature: MA Experiment 20000184 PARAMETER Experiment Name: At_Shoots__P Parameter: Tissue Value: Shoots vs. Whole Plant
  misc_feature: MA Experiment ID: 20000234 Result: Down-regulated in Transcription
  misc_feature: MA Experiment 20000234 PARAMETER Experiment Name: At_Siliques_P Parameter: Age (day) Value: 21
  misc_feature: MA Experiment 20000234 PARAMETER Experiment Name: At_Siliques_P Parameter: Organism Value: A. thaliana
  misc_feature: MA Experiment 20000234 PARAMETER Experiment Name: At_Siliques_P Parameter: Plant Line Value: WS
  misc_feature: MA Experiment 20000234 PARAMETER Experiment Name: At_Siliques_P Parameter: Tissue Value: Less Than 5mm Siliques vs. Whole Plant
  misc_feature: MA Experiment ID: 20000235 Result: Down-regulated in Transcription
  misc_feature: MA Experiment 20000235 PARAMETER Experiment Name: At_Siliques_P Parameter: Age (day) Value: 21
  misc_feature: MA Experiment 20000235 PARAMETER Experiment Name: At_Siliques_P Parameter: Organism Value: A. thaliana
  misc_feature: MA Experiment 20000235 PARAMETER Experiment Name: At_Siliques_P Parameter: Plant Line Value: WS
  misc_feature: MA Experiment 20000235 PARAMETER Experiment Name: At_Siliques_P Parameter: Tissue Value: 5-10mm Siliques vs. Whole Plant
  misc_feature: MA Experiment ID: 20000264 Result: Down-regulated in Transcription
  misc_feature: MA Experiment 20000264 PARAMETER Experiment Name: At_Open_Flower_P Parameter: Age (day) Value: 21
  misc_feature: MA Experiment 20000264 PARAMETER Experiment Name: At_Open_Flower_P Parameter: Plant Line Value: WS
  misc_feature: MA Experiment 20000264 PARAMETER Experiment Name: At_Open_Flower_P Parameter: Tissue Value: Open Flower vs. Whole Plant
  misc_feature: MA Experiment ID: 20000265 Result: Down-regulated in Transcription
  misc_feature: MA Experiment 20000265 PARAMETER Experiment Name: At_Open_Flower_P Parameter: Age (day) Value: 21
  misc_feature: MA Experiment 20000265 PARAMETER Experiment Name: At_Open_Flower_P Parameter: Plant Line Value: WS
  misc_feature: MA Experiment 20000265 PARAMETER Experiment Name: At_Open_Flower_P Parameter: Tissue Value: Closed Flower vs. Whole Plant
  misc_feature: MA Experiment ID: 20000286 Result: Down-regulated in Transcription
  misc_feature: MA Experiment 20000286 PARAMETER Experiment Name: At_Open_Flower_P Parameter: Age (day) Value: 21
  misc_feature: MA Experiment 20000286 PARAMETER Experiment Name: At_Open_Flower_P Parameter: Plant Line Value: WS
  misc_feature: MA Experiment 20000286 PARAMETER Experiment Name: At_Open_Flower_P Parameter: Tissue Value: Half Open vs. Whole Plant
  misc_feature: MA Experiment ID: 20000437 Result: Up-regulated in Transcription
  misc_feature: MA Experiment 20000437 PARAMETER Experiment Name: At_Drought_P Parameter: Age (day) Value: 8
  misc_feature: MA Experiment 20000437 PARAMETER Experiment Name: At_Drought_P Parameter: Organism Value: A. thaliana
  misc_feature: MA Experiment 20000437 PARAMETER Experiment Name: At_Drought_P Parameter: Plant Line Value: WS
  misc_feature: MA Experiment 20000437 PARAMETER Experiment Name: At_Drought_P Parameter: Timepoint (hr) Value: 24
  misc_feature: MA Experiment 20000437 PARAMETER Experiment Name: At_Drought_P Parameter: Tissue Value: Whole Plant
  misc_feature: MA Experiment 20000437 PARAMETER Experiment Name: At_Drought_P Parameter: Treatment Value: Drought vs. No Drought
  misc_feature: MA Experiment ID: 20000438 Result: Down-regulated in Transcription
  misc_feature: MA Experiment 20000438 PARAMETER Experiment Name: At_Shoots__P Parameter: Age (day) Value: 14
  misc_feature: MA Experiment 20000438 PARAMETER Experiment Name: At_Shoots__P Parameter: Tissue Value: Shoots vs. Whole Plant
  misc_feature: MA Experiment ID: 20000445 Result: Up-regulated in Transcription
  misc_feature: MA Experiment 20000445 PARAMETER Experiment Name: At_100uM_NAA__P Parameter: Age (day) Value: 14
  misc_feature: MA Experiment 20000445 PARAMETER Experiment Name: At_100uM_NAA__P Parameter: Organism Value: A. thaliana
  misc_feature: MA Experiment 20000445 PARAMETER Experiment Name: At_100uM_NAA__P Parameter: Plant Line Value: WS
  misc_feature: MA Experiment 20000445 PARAMETER Experiment Name: At_100uM_NAA__P Parameter: Timepoint (hr) Value: 6
  misc_feature: MA Experiment 20000445 PARAMETER Experiment Name: At_100uM_NAA__P Parameter: Tissue Value: Aerial
  misc_feature: MA Experiment 20000445 PARAMETER Experiment Name: At_100uM_NAA__P Parameter: Treatment Value: 100uM NAA vs. No Treatment
  misc_feature: MA Experiment ID: 20000453 Result: Up-regulated in Transcription
  misc_feature: MA Experiment 20000453 PARAMETER Experiment Name: At_100uM_ABA_P Parameter: Age (day) Value: 15
  misc_feature: MA Experiment 20000453 PARAMETER Experiment Name: At_100uM_ABA_P Parameter: Organism Value: A. thaliana
  misc_feature: MA Experiment 20000453 PARAMETER Experiment Name: At_100uM_ABA_P Parameter: Plant Line Value: WS
  misc_feature: MA Experiment 20000453 PARAMETER Experiment Name: At_100uM_ABA_P Parameter: Timepoint (hr) Value: 24
  misc_feature: MA Experiment 20000453 PARAMETER Experiment Name: At_100uM_ABA_P Parameter: Tissue Value: Aerial
  misc_feature: MA Experiment 20000453 PARAMETER Experiment Name: At_100uM_ABA_P Parameter: Treatment Value: 100uM ABA vs. No Treatment
  misc_feature: MA Experiment ID: 20000456 Result: Up-regulated in Transcription
  misc_feature: MA Experiment 20000456 PARAMETER Experiment Name: At_100uM_BA_P Parameter: Age (day) Value: 14
  misc_feature: MA Experiment 20000456 PARAMETER Experiment Name: At_100uM_BA_P Parameter: Organism Value: A. thaliana
  misc_feature: MA Experiment 20000456 PARAMETER Experiment Name: At_100uM_BA_P Parameter: Plant Line Value: WS
  misc_feature: MA Experiment 20000456 PARAMETER Experiment Name: At_100uM_BA_P Parameter: Timepoint (hr) Value: 6
  misc_feature: MA Experiment 20000456 PARAMETER Experiment Name: At_100uM_BA_P Parameter: Tissue Value: Aerial
  misc_feature: MA Experiment 20000456 PARAMETER Experiment Name: At_100uM_BA_P Parameter: Treatment Value: 100uM BA vs. No Treatment
  misc_feature: MA Experiment ID: 20000496 Result: Down-regulated in Transcription
  misc_feature: MA Experiment 20000496 PARAMETER Experiment Name: At_Guard_Cells_P Parameter: Harvest Date Value: 7/19/2002
  misc_feature: MA Experiment 20000496 PARAMETER Experiment Name: At_Guard_Cells_P Parameter: Organism Value: Canola
  misc_feature: MA Experiment 20000496 PARAMETER Experiment Name: At_Guard_Cells_P Parameter: Tissue Value: Guard Cells vs. Leaves
  misc_feature: MA Experiment ID: 20000527 Result: Down-regulated in Transcription
  misc_feature: MA Experiment 20000527 PARAMETER Experiment Name: At_10percent_PEG_P Parameter: Age (day) Value: 20
  misc_feature: MA Experiment 20000527 PARAMETER Experiment Name: At_10percent_PEG_P Parameter: Organism Value: A. thaliana
  misc_feature: MA Experiment 20000527 PARAMETER Experiment Name: At_10percent_PEG_P Parameter: Plant Line Value: WS
  misc_feature: MA Experiment 20000527 PARAMETER Experiment Name: At_10percent_PEG_P Parameter: Timepoint (day) Value: 20
  misc_feature: MA Experiment 20000527 PARAMETER Experiment Name: At_10percent_PEG_P Parameter: Tissue Value: Whole Plant
  misc_feature: MA Experiment 20000527 PARAMETER Experiment Name: At_10percent_PEG_P Parameter: Treatment Value: 10percent PEG vs. No Treatment
  misc_feature: MA Experiment ID: 20000574 Result: Up-regulated in Transcription
  misc_feature: MA Experiment 20000574 PARAMETER Experiment Name: At_100uM_ABA_Mutants__P Parameter: Organism Value: A. thaliana
  misc_feature: MA Experiment 20000574 PARAMETER Experiment Name: At_100uM_ABA_Mutants__P Parameter: Plant Line Value: CS23 vs. Ler wt
  misc_feature: MA Experiment 20000574 PARAMETER Experiment Name: At_100uM_ABA_Mutants__P Parameter: Timepoint (hr) Value: N/A
  misc_feature: MA Experiment 20000574 PARAMETER Experiment Name: At_100uM_ABA_Mutants__P Parameter: Tissue Value: Whole Plant
  misc_feature: MA Experiment 20000574 PARAMETER Experiment Name: At_100uM_ABA_Mutants__P Parameter: Treatment Value: None
  misc_feature: MA Experiment ID: 20000709 Result: Up-regulated in Transcription
  misc_feature: MA Experiment 20000709 PARAMETER Experiment Name: At_15mM_NH4NO3_L-to-H_P Parameter: Age (hr) Value: 14
  misc_feature: MA Experiment 20000709 PARAMETER Experiment Name: At_15mM_NH4NO3_L-to-H_P Parameter: Organism Value: A. thaliana
  misc_feature: MA Experiment 20000709 PARAMETER Experiment Name: At_15mM_NH4NO3_L-to-H_P Parameter: Plant Line Value: WS
  misc_feature: MA Experiment 20000709 PARAMETER Experiment Name: At_15mM_NH4NO3_L-to-H_P Parameter: Timepoint (hr) Value: 4
  misc_feature: MA Experiment 20000709 PARAMETER Experiment Name: At_15mM_NH4NO3_L-to-H_P Parameter: Tissue Value: Aerial
  misc_feature: MA Experiment 20000709 PARAMETER Experiment Name: At_15mM_NH4NO3_L-to-H_P Parameter: Treatment Value: 15mM NH4NO3 vs. 30mM Mannitol
  misc_feature: MA Experiment ID: 20000794 Result: Down-regulated in Transcription
  misc_feature: MA Experiment 20000794 PARAMETER Experiment Name: At_Petals_P Parameter: Age (day) Value: 23-25 days
  misc_feature: MA Experiment 20000794 PARAMETER Experiment Name: At_Petals_P Parameter: Plant Line Value: WS
  misc_feature: MA Experiment 20000794 PARAMETER Experiment Name: At_Petals_P Parameter: Tissue Value: Petals vs. Whole plant
  misc_feature: MA Experiment ID: 20001451 Result: Down-regulated in Transcription
  misc_feature: MA Experiment 20001451 PARAMETER Experiment Name: At_Far-red-induction_P Parameter: Age (day) Value: 7
  misc_feature: MA Experiment 20001451 PARAMETER Experiment Name: At_Far-red-induction_P Parameter: Light Value: Far-red vs. White
  misc_feature: MA Experiment 20001451 PARAMETER Experiment Name: At_Far-red-induction_P Parameter: Organism Value: A. thaliana
  misc_feature: MA Experiment 20001451 PARAMETER Experiment Name: At_Far-red-induction_P Parameter: Plant Line Value: Columbia
  misc_feature: MA Experiment 20001451 PARAMETER Experiment Name: At_Far-red-induction_P Parameter: Timepoint (hr) Value: 24
  misc_feature: MA Experiment 20001451 PARAMETER Experiment Name: At_Far-red-induction_P Parameter: Tissue Value: Whole Plant
  misc_feature: MA Experiment ID: 20001557 Result: Up-regulated in Transcription
  misc_feature: MA Experiment 20001557 PARAMETER Experiment Name: At_Drought_Soil_Dry_P Parameter: Age (day) Value: 27
  misc_feature: MA Experiment 20001557 PARAMETER Experiment Name: At_Drought_Soil_Dry_P Parameter: Organism Value: A. thaliana
  misc_feature: MA Experiment 20001557 PARAMETER Experiment Name: At_Drought_Soil_Dry_P Parameter: Plant Line Value: WS
  misc_feature: MA Experiment 20001557 PARAMETER Experiment Name: At_Drought_Soil_Dry_P Parameter: Post Timepoint (hr) Value: 3
  misc_feature: MA Experiment 20001557 PARAMETER Experiment Name: At_Drought_Soil_Dry_P Parameter: Post-Treatment Value: Re-Water vs. No Drought
  misc_feature: MA Experiment 20001557 PARAMETER Experiment Name: At_Drought_Soil_Dry_P Parameter: Timepoint (day) Value: 13
  misc_feature: MA Experiment 20001557 PARAMETER Experiment Name: At_Drought_Soil_Dry_P Parameter: Treatment Value: Drought vs. No Drought
  misc_feature: MA Experiment ID: 20001904 Result: Up-regulated in Transcription
  misc_feature: MA Experiment 20001904 PARAMETER Experiment Name: At_Drought_Reproduction_P Parameter: Age (day) Value: 37
  misc_feature: MA Experiment 20001904 PARAMETER Experiment Name: At_Drought_Reproduction_P Parameter: Organism Value: A. thaliana
  misc_feature: MA Experiment 20001904 PARAMETER Experiment Name: At_Drought_Reproduction_P Parameter: Plant Line Value: WS
  misc_feature: MA Experiment 20001904 PARAMETER Experiment Name: At_Drought_Reproduction_P Parameter: Timepoint (day) Value: 7
  misc_feature: MA Experiment 20001904 PARAMETER Experiment Name: At_Drought_Reproduction_P Parameter: Tissue Value: Rosettes
  misc_feature: MA Experiment 20001904 PARAMETER Experiment Name: At_Drought_Reproduction_P Parameter: Treatment Value: Drought vs. No Drought
  misc_feature: MA Experiment ID: 20001905 Result: Up-regulated in Transcription
  misc_feature: MA Experiment 20001905 PARAMETER Experiment Name: At_Drought_Reproduction_P Parameter: Age (day) Value: 40
  misc_feature: MA Experiment 20001905 PARAMETER Experiment Name: At_Drought_Reproduction_P Parameter: Organism Value: A. thaliana
  misc_feature: MA Experiment 20001905 PARAMETER Experiment Name: At_Drought_Reproduction_P Parameter: Plant Line Value: WS
  misc_feature: MA Experiment 20001905 PARAMETER Experiment Name: At_Drought_Reproduction_P Parameter: Timepoint (day) Value: 10
  misc_feature: MA Experiment 20001905 PARAMETER Experiment Name: At_Drought_Reproduction_P Parameter: Tissue Value: Rosettes
  misc_feature: MA Experiment 20001905 PARAMETER Experiment Name: At_Drought_Reproduction_P Parameter: Treatment Value: Drought vs. No Drought
atgaacagagagcaaattcatattttgttcttccccttcatggctcatggccacatgattccactcttagacatggccaagcttttcgctagaagaggagccaaatcaactctcctcacaaccccaataaatgctaagatcttggagaaacccattgaagcattcaaagttcaaaatcctgatctcgaaatcggaatcaagatcctcaatttcccttgtgtagagcttggattgccagaaggatgcgagaaccgtgacttcattaactcataccaaaaatctgactcatttgacttgttcttgaagtttcttttctctaccaagtatatgaaacagcagttggagagtttcattgaaacaaccaaaccgagtgctcttgtagccgatatgttcttcccttgggcaacagaatccgcggagaagatcggtgttccaagacttgtgttccacggcacatcatcctttgccttgtgttgttcgtataacatgaggattcataagccacacaagaaagtcgcttcgagttctactccatttgtaatccctggtctccctggagacatagttattacagaagaccaagccaatgtcaccaacgaagaaactccattcggaaagttttggaaagaagtcagggaatcagagaccagtagctttggtgttttggtgaatagcttctacgagctggaatcatcttatgctgatttttaccgtagttttgtggcgaaaaaagcgtggcatataggtccactttcactatccaacagagggattgcagagaaagccggaagagggaaaaaggcaaacattgatgagcaagaatgcctcaaatggcttgactctaagacacctggctcagtagtttacttgtcctttggtagcggaaccggcttacccaacgaacagctgttagagattgctttcggccttgaaggctctggacaaaatttcatttgggtggttagcaaaaatgaaaaccaaggtgaaaatgaagattggttgcctaaagggtttgaagagaggaataaaggaaaagggctgataatacgcggatgggccccgcaagtgctgatacttgaccacaaagcaatcggaggatttgtgacgcattgcggatggaactcgactttggagggcattgccgcagggctgcctatggtgacttggccgatgggggcagaacagttctacaacgagaagttattgacaaaagtgttgagaataggagtgaacgttggagctaccgagttggtgaaaaaaggaaagttgattagtagagcacaagtggagaaggcagtaagggaagtgattggtggtgagaaggcagaggaaaggcggctaagggctaaggagctgggcgagatggctaaagccgctgtggaagaaggagggtcttcttataatgatgtgaacaagtttatggaagagctgaatggtagaaagtag

SEQ ID NO: 78566 - protein, 481 aa, Arabidopsis thaliana
  peptide (1)..(481): Ceres Seq. ID no. 12642606
  misc_feature (26)..(481): Pfam Name: UDP-glucoronosyl and UDP-glucosyl transferase Pfam Description: UDP-glucoronosyl and UDP-glucosyl transferase
  misc_feature (1)..(481): Homolog of NCBI NO: 30725312 NR Description: At2g15490 [Arabidopsis thaliana]
  misc_feature (25)..(481): Homolog of NCBI NO: 15226537 NR Description: putative glucosyltransferase; protein id: [Arabidopsis thaliana] >gi|25286797|pir||F84529 probable
  misc_feature (1)..(481): Homolog of NCBI NO: 25286796 NR Description: probable glucosyltransferase [imported] - thaliana >gi|4335714|gb|AAD17392.1| putative glucosyltransferase
  misc_feature (110)..(481): Homolog of NCBI NO: 30679430 NR Description: glucosyltransferase -related [Arabidopsis >gi|22135886|gb|AAM91525.1| putative glucosyltransferase
  misc_feature (2)..(478): Homolog of NCBI NO: 18418380 NR Description: glucosyltransferase -like protein; protein id: supported by cDNA: gi_14334981 [Arabidopsis thaliana] putative glucosyltransferase [Arabidopsis thaliana]
  misc_feature (5)..(476): Homolog of NCBI NO: 7433898 NR Description: probable glucosyltransferase F28A23.110 (EC
  misc_feature (5)..(476): Homolog of NCBI NO: 18418378 NR Description: similar to glucosyltransferase -like protein; id: At4g34131.1, supported by cDNA: gi_17065353 [Arabidopsis >gi|17065354|gb|AAL32831.1| putative protein [Arabidopsis
  misc_feature (5)..(477): Homolog of NCBI NO: 18418382 NR Description: similar to glucosyltransferase -like protein; id: At4g34138.1, supported by cDNA: gi_18086384, supported by gi_19699135 [Arabidopsis thaliana] >gi|18086385|gb|AAL57652.1|
  misc_feature (6)..(479): Homolog of NCBI NO: 5918023 NR Description: betanidin-5-O-glucosyltransferase [Dorotheanthus
  misc_feature (5)..(478): Homolog of NCBI NO: 7433906 NR Description: glucosyltransferase IS5a (EC 2.4.1.-),
MNREQIHILFFPFMAHGHMIPLLDMAKLFARRGAKSTLLTTPINAKILEKPIEAFKVQNPDLEIGIKILNFPCVELGLPEGCENRDFINSYQKSDSFDLFLKFLFSTKYMKQQLESFIETTKPSALVADMFFPWATESAEKIGVPRLVFHGTSSFALCCSYNMRIHKPHKKVASSSTPFVIPGLPGDIVITEDQANVTNEETPFGKFWKEVRESETSSFGVLVNSFYELESSYADFYRSFVAKKAWHIGPLSLSNRGIAEKAGRGKKANIDEQECLKWLDSKTPGSVVYLSFGSGTGLPNEQLLEIAFGLEGSGQNFIWVVSKNENQGENEDWLPKGFEERNKGKGLIIRGWAPQVLILDHKAIGGFVTHCGWNSTLEGIAAGLPMVTWPMGAEQFYNEKLLTKVLRIGVNVGATELVKKGKLISRAQVEKAVREVIGGEKAEERRLRAKELGEMAKAAVEEGGSSYNDVNKFMEELNGRK

SEQ ID NO: 78567 - protein, 468 aa, Arabidopsis thaliana
  peptide (1)..(468): Ceres Seq. ID no. 12642607
  misc_feature (13)..(468): Pfam Name: UDP-glucoronosyl and UDP-glucosyl transferase Pfam Description: UDP-glucoronosyl and UDP-glucosyl transferase
  misc_feature (1)..(468): Homolog of NCBI NO: 30725312 NR Description: At2g15490 [Arabidopsis thaliana]
  misc_feature (12)..(468): Homolog of NCBI NO: 15226537 NR Description: putative glucosyltransferase; protein id: [Arabidopsis thaliana] >gi|25286797|pir||F84529 probable
  misc_feature (1)..(468): Homolog of NCBI NO: 25286796 NR Description: probable glucosyltransferase [imported] - thaliana >gi|4335714|gb|AAD17392.1| putative glucosyltransferase
  misc_feature (97)..(468): Homolog of NCBI NO: 30679430 NR Description: glucosyltransferase -related [Arabidopsis >gi|22135886|gb|AAM91525.1| putative glucosyltransferase
  misc_feature (1)..(465): Homolog of NCBI NO: 18418380 NR Description: glucosyltransferase -like protein; protein id: supported by cDNA: gi_14334981 [Arabidopsis thaliana] putative glucosyltransferase [Arabidopsis thaliana]
  misc_feature (1)..(463): Homolog of NCBI NO: 7433898 NR Description: probable glucosyltransferase F28A23.110 (EC
  misc_feature (1)..(463): Homolog of NCBI NO: 18418378 NR Description: similar to glucosyltransferase -like protein; id: At4g34131.1, supported by cDNA: gi_17065353 [Arabidopsis >gi|17065354|gb|AAL32831.1| putative protein [Arabidopsis
  misc_feature (1)..(464): Homolog of NCBI NO: 18418382 NR Description: similar to glucosyltransferase -like protein; id: At4g34138.1, supported by cDNA: gi_18086384, supported by gi_19699135 [Arabidopsis thaliana] >gi|18086385|gb|AAL57652.1|
  misc_feature (1)..(466): Homolog of NCBI NO: 5918023 NR Description: betanidin-5-O-glucosyltransferase [Dorotheanthus
  misc_feature (1)..(465): Homolog of NCBI NO: 7433906 NR Description: glucosyltransferase IS5a (EC 2.4.1.-),
MAHGHMIPLLDMAKLFARRGAKSTLLTTPINAKILEKPIEAFKVQNPDLEIGIKILNFPCVELGLPEGCENRDFINSYQKSDSFDLFLKFLFSTKYMKQQLESFIETTKPSALVADMFFPWATESAEKIGVPRLVFHGTSSFALCCSYNMRIHKPHKKVASSSTPFVIPGLPGDIVITEDQANVTNEETPFGKFWKEVRESETSSFGVLVNSFYELESSYADFYRSFVAKKAWHIGPLSLSNRGIAEKAGRGKKANIDEQECLKWLDSKTPGSVVYLSFGSGTGLPNEQLLEIAFGLEGSGQNFIWVVSKNENQGENEDWLPKGFEERNKGKGLIIRGWAPQVLILDHKAIGGFVTHCGWNSTLEGIAAGLPMVTWPMGAEQFYNEKLLTKVLRIGVNVGATELVKKGKLISRAQVEKAVREVIGGEKAEERRLRAKELGEMAKAAVEEGGSSYNDVNKFMEELNGRK

SEQ ID NO: 78568 - protein, 463 aa, Arabidopsis thaliana
  peptide (1)..(463): Ceres Seq. ID no. 12642608
  misc_feature (8)..(463): Pfam Name: UDP-glucoronosyl and UDP-glucosyl transferase Pfam Description: UDP-glucoronosyl and UDP-glucosyl transferase
  misc_feature (1)..(463): Homolog of NCBI NO: 30725312 NR Description: At2g15490 [Arabidopsis thaliana]
  misc_feature (7)..(463): Homolog of NCBI NO: 15226537 NR Description: putative glucosyltransferase; protein id: [Arabidopsis thaliana] >gi|25286797|pir||F84529 probable
  misc_feature (1)..(463): Homolog of NCBI NO: 25286796 NR Description: probable glucosyltransferase [imported] - thaliana >gi|4335714|gb|AAD17392.1| putative glucosyltransferase
  misc_feature (92)..(463): Homolog of NCBI NO: 30679430 NR Description: glucosyltransferase -related [Arabidopsis >gi|22135886|gb|AAM91525.1| putative glucosyltransferase
  misc_feature (1)..(460): Homolog of NCBI NO: 18418380 NR Description: glucosyltransferase -like protein; protein id: supported by cDNA: gi_14334981 [Arabidopsis thaliana] putative glucosyltransferase [Arabidopsis thaliana]
  misc_feature (1)..(458): Homolog of NCBI NO: 7433898 NR Description: probable glucosyltransferase F28A23.110 (EC
  misc_feature (1)..(458): Homolog of NCBI NO: 18418378 NR Description: similar to glucosyltransferase -like protein; id: At4g34131.1, supported by cDNA: gi_17065353 [Arabidopsis >gi|17065354|gb|AAL32831.1| putative protein [Arabidopsis
  misc_feature (1)..(459): Homolog of NCBI NO: 18418382 NR Description: similar to glucosyltransferase -like protein; id: At4g34138.1, supported by cDNA: gi_18086384, supported by gi_19699135 [Arabidopsis thaliana] >gi|18086385|gb|AAL57652.1|
  misc_feature (1)..(461): Homolog of NCBI NO: 5918023 NR Description: betanidin-5-O-glucosyltransferase [Dorotheanthus
  misc_feature (1)..(460): Homolog of NCBI NO: 7433906 NR Description: glucosyltransferase IS5a (EC 2.4.1.-),
MIPLLDMAKLFARRGAKSTLLTTPINAKILEKPIEAFKVQNPDLEIGIKILNFPCVELGLPEGCENRDFINSYQKSDSFDLFLKFLFSTKYMKQQLESFIETTKPSALVADMFFPWATESAEKIGVPRLVFHGTSSFALCCSYNMRIHKPHKKVASSSTPFVIPGLPGDIVITEDQANVTNEETPFGKFWKEVRESETSSFGVLVNSFYELESSYADFYRSFVAKKAWHIGPLSLSNRGIAEKAGRGKKANIDEQECLKWLDSKTPGSVVYLSFGSGTGLPNEQLLEIAFGLEGSGQNFIWVVSKNENQGENEDWLPKGFEERNKGKGLIIRGWAPQVLILDHKAIGGFVTHCGWNSTLEGIAAGLPMVTWPMGAEQFYNEKLLTKVLRIGVNVGATELVKKGKLISRAQVEKAVREVIGGEKAEERRLRAKELGEMAKAAVEEGGSSYNDVNKFMEELNGRK

SEQ ID NO: 78569 - DNA, 2727 bp, Arabidopsis thaliana
  misc_feature (1)..(2727): Ceres Seq. ID no. 12642758
  misc_feature: MA Experiment ID: 108434 Result: Down-regulated in Transcription
  misc_feature: MA Experiment 108434 PARAMETER Experiment Name: At_Root_Tips_cDNA_P Parameter: Tissue Value: Root Tips
  misc_feature: MA Experiment ID: 108595 Result: Up-regulated in Transcription
  misc_feature: MA Experiment 108595 PARAMETER Experiment Name: At_Ler-pi_Ovule_cDNA_P Parameter: Plant Line Value: null
atgaagagagatatggggagttacaaaatgggtttgtgttgcagtgacaagctcaggatgaacagaggagctccacctcaggatgtggtgacggcgtttgtagagtataccgagggcaggagccacatgacggcagagcagctatgtcggttcttggttgaggtgcaggacgagactgaagtgttggtttcagatgcagagaagatcatagaaagaatcacatgtgaaagacatcatatcactaagttcttgaggcatacgctgaacctcgatgatttcttcagtttcttgttctcagatgatctgaatcatccaattgatagtaaggtgcatcaagacatggcctctcccttgtcgcactatttcatttacaccagccataattcgtatctgactggaaatcagatcaacagcgaatgcagcgacgtacctctcataaaggcattaaagagaggtgttcgagctcttgaacttgacatgtggcctaactctactaaggacgacatacttgttctccatggctgggcatggacacctccagttgaactagtcaaatgcttgagatctataaaagaacatgccttttatgcatctgcataccctgtgatcttaactttggaagatcatttgactccagatcttcaagccaaagcagctgagatgatgaaagagatattcatggatatggtgtattttccagaggctggtggtttaaaagagtttccttcaccagaagatctcaagtacaaaattgtaatatctacaaagcctcctaaaggtagcttaagaaaggacaaggattctgagtcagatgcatcaggaaaggcgtcatcagatgtttcagcagacgatgagaagactgaggaagaaacaagtgaggccaaaaatgaagaggatggatttgatcaagaatccagcaacttggatttcctcacctatagtcgcctaataacgattccttctggaaatgctaaaaatggattaaaggaagcactaacaatcgataatggtggagttagacggctgagtttgagggagcagaagttcaagaaagccactgaaatgtatggaaccgaagtcataaaattcacacagaagaatctgttgagaatatatcccaaggctacccgagtaaattcctccaactataggccatacaacggttggatgtacggagctcaaatggtcgctttcaacatgcagggctatggaagagctctttggatgatgcatggtatgtttaggggaaatggtggatgcgggtacgtgaaaaaaccggactttatgatgaacaataatctcagtggagaagtgttcaacccgaaagcgaagttacccataaagaaaactctaaaagtgaaagtatacatgggcaaaggatgggactctggtttccagcgaacatgtttcaacacttggtcctctcctaacttctacacaagggtggggataacaggagtaagaggtgataaggtaatgaagaaaacaaagaaagaacaaaagacatgggagccattctggaacgaggagtttgagtttcagctaacagtaccggagctggcgttgctaagaatagaagttcacgactacaacatgccagagaaggacgatttctcgggtcagacatgtttgcctgtgtcagagctgagacaaggcatacgttctgttcctttttgcgtcccaaacacctatcttcacactcttaaaaccaaacctctaaaagaagttttgatcgattgtaacagtgacatatcctgcgagtttccaacaactacctccgagagccgtcaacgaaaactcttcctctcttgcgccgttgataattccgatgacgtgatcagaaatctcataacgcatcttgagtcatcttcttcgatcgaggaacagaagcaagctgctatggagattagactcttatcaaagaacaaaccagagaatcgtatcaaactcgctaaagccggtgctattaaaccgttggtttctttaatctcgtcttcggatcttcagcttcaagagtatggagtcactgcggtgttgaatctatctctctgcgatgagaacaaagagatgattgtttcttccggtgcggttaaaccgctcgttaatgcgttgagattaggaacaccgacgacgaaagagaacgctgcttgtgctctgctccggttatctcaagtggaggaaaacaaaatcacgattgggagatcaggagcgattcctttactagtgaaccttctagaaaatggcggattcagagcgaagaaagacgcgtcgacggctttatactcgttgtgttcgacgaacgagaacaaaaccagagctgttgaatctgggattatgaagccgttagtggagttaatgattgattttgaatcggatatggttgataaatcagcgtttgttatgaatctgttaatgtcggcgccggaatcgaagccggcggttgtggaagaaggaggagttccggtgttggttgagattgttgaagcgggaacacagagacagaaggagataagtgtgtcgatattgttgcagctttgtgaggagagtgttgtgtatcgaaccatggtggctcgtgaaggagcggttcctccgctcgtggctttatcgcagggtagtgcgagtcgtggtgctaaggtaaaggctgaggcgttgatagagcttcttaggcaacccagacaacaacaacaacaacaacaacactttgaatctaacgacaacgagagataa

SEQ ID NO: 78570 - protein, 908 aa, Arabidopsis thaliana
  peptide (1)..(908): Ceres Seq. ID no. 12642759
  misc_feature (113)..(257): Pfam Name: Phosphatidylinositol-specific phospholipase C, X domain Pfam Description: Phosphatidylinositol-specific phospholipase C,
  misc_feature (1)..(557): Homolog of NCBI NO: 22327954 NR Description: phosphoinositide-specific phospholipase C, protein id: At5g58690.1, supported by cDNA: gi_17065209, by cDNA: gi_19855029 [Arabidopsis thaliana]
  misc_feature (5)..(559): Homolog of NCBI NO: 1771381 NR Description: phosphoinositide-specific phospholipase C
  misc_feature (5)..(559): Homolog of NCBI NO: 2765140 NR Description: 1-phosphatidylinositol-4,5-bisphosphate
  misc_feature (579)..(908): Homolog of NCBI NO: 15237730 NR Description: putative protein; protein id: At5g58680.1, by cDNA: 105025. [Arabidopsis thaliana]
  misc_feature (579)..(908): Homolog of NCBI NO: 26452835 NR Description: unknown protein [Arabidopsis thaliana]
MKRDMGSYKMGLCCSDKLRMNRGAPPQDVVTAFVEYTEGRSHMTAEQLCRFLVEVQDETEVLVSDAEKIIERITCERHHITKFLRHTLNLDDFFSFLFSDDLNHPIDSKVHQDMASPLSHYFIYTSHNSYLTGNQINSECSDVPLIKALKRGVRALELDMWPNSTKDDILVLHGWAWTPPVELVKCLRSIKEHAFYASAYPVILTLEDHLTPDLQAKAAEMMKEIFMDMVYFPEAGGLKEFPSPEDLKYKIVISTKPPKGSLRKDKDSESDASGKASSDVSADDEKTEEETSEAKNEEDGFDQESSNLDFLTYSRLITIPSGNAKNGLKEALTIDNGGVRRLSLREQKFKKATEMYGTEVIKFTQKNLLRIYPKATRVNSSNYRPYNGWMYGAQMVAFNMQGYGRALWMMHGMFRGNGGCGYVKKPDFMMNNNLSGEVFNPKAKLPIKKTLKVKVYMGKGWDSGFQRTCFNTWSSPNFYTRVGITGVRGDKVMKKTKKEQKTWEPFWNEEFEFQLTVPELALLRIEVHDYNMPEKDDFSGQTCLPVSELRQGIRSVPFCVPNTYLHTLKTKPLKEVLIDCNSDISCEFPTTTSESRQRKLFLSCAVDNSDDVIRNLITHLESSSSIEEQKQAAMEIRLLSKNKPENRIKLAKAGAIKPLVSLISSSDLQLQEYGVTAVLNLSLCDENKEMIVSSGAVKPLVNALRLGTPTTKENAACALLRLSQVEENKITIGRSGAIPLLVNLLENGGFRAKKDASTALYSLCSTNENKTRAVESGIMKPLVELMIDFESDMVDKSAFVMNLLMSAPESKPAVVEEGGVPVLVEIVEAGTQRQKEISVSILLQLCEESVVYRTMVAREGAVPPLVALSQGSASRGAKVKAEALIELLRQPRQQQQQQQHFESNDNER

SEQ ID NO: 78571 - protein, 904 aa, Arabidopsis thaliana
  peptide (1)..(904): Ceres Seq. ID no. 12642760
  misc_feature (109)..(253): Pfam Name: Phosphatidylinositol-specific phospholipase C, X domain Pfam Description: Phosphatidylinositol-specific phospholipase C,
  misc_feature (1)..(553): Homolog of NCBI NO: 22327954 NR Description: phosphoinositide-specific phospholipase C, protein id: At5g58690.1, supported by cDNA: gi_17065209, by cDNA: gi_19855029 [Arabidopsis thaliana]
  misc_feature (1)..(555): Homolog of NCBI NO: 1771381 NR Description: phosphoinositide-specific phospholipase C
  misc_feature (1)..(555): Homolog of NCBI NO: 2765140 NR Description: 1-phosphatidylinositol-4,5-bisphosphate
  misc_feature (575)..(904): Homolog of NCBI NO: 15237730 NR Description: putative protein; protein id: At5g58680.1, by cDNA: 105025. [Arabidopsis thaliana]
  misc_feature (575)..(904): Homolog of NCBI NO: 26452835 NR Description: unknown protein [Arabidopsis thaliana]
MGSYKMGLCCSDKLRMNRGAPPQDVVTAFVEYTEGRSHMTAEQLCRFLVEVQDETEVLVSDAEKIIERITCERHHITKFLRHTLNLDDFFSFLFSDDLNHPIDSKVHQDMASPLSHYFIYTSHNSYLTGNQINSECSDVPLIKALKRGVRALELDMWPNSTKDDILVLHGWAWTPPVELVKCLRSIKEHAFYASAYPVILTLEDHLTPDLQAKAAEMMKEIFMDMVYFPEAGGLKEFPSPEDLKYKIVISTKPPKGSLRKDKDSESDASGKASSDVSADDEKTEEETSEAKNEEDGFDQESSNLDFLTYSRLITIPSGNAKNGLKEALTIDNGGVRRLSLREQKFKKATEMYGTEVIKFTQKNLLRIYPKATRVNSSNYRPYNGWMYGAQMVAFNMQGYGRALWMMHGMFRGNGGCGYVKKPDFMMNNNLSGEVFNPKAKLPIKKTLKVKVYMGKGWDSGFQRTCFNTWSSPNFYTRVGITGVRGDKVMKKTKKEQKTWEPFWNEEFEFQLTVPELALLRIEVHDYNMPEKDDFSGQTCLPVSELRQGIRSVPFCVPNTYLHTLKTKPLKEVLIDCNSDISCEFPTTTSESRQRKLFLSCAVDNSDDVIRNLITHLESSSSIEEQKQAAMEIRLLSKNKPENRIKLAKAGAIKPLVSLISSSDLQLQEYGVTAVLNLSLCDENKEMIVSSGAVKPLVNALRLGTPTTKENAACALLRLSQVEENKITIGRSGAIPLLVNLLENGGFRAKKDASTALYSLCSTNENKTRAVESGIMKPLVELMIDFESDMVDKSAFVMNLLMSAPESKPAVVEEGGVPVLVEIVEAGTQRQKEISVSILLQLCEESVVYRTMVAREGAVPPLVALSQGSASRGAKVKAEALIELLRQPRQQQQQQQHFESNDNER

SEQ ID NO: 78572 - protein, 899 aa, Arabidopsis thaliana
  peptide (1)..(899): Ceres Seq. ID no. 12642761
  misc_feature (104)..(248): Pfam Name: Phosphatidylinositol-specific phospholipase C, X domain Pfam Description: Phosphatidylinositol-specific phospholipase C,
  misc_feature (1)..(548): Homolog of NCBI NO: 22327954 NR Description: phosphoinositide-specific phospholipase C, protein id: At5g58690.1, supported by cDNA: gi_17065209, by cDNA: gi_19855029 [Arabidopsis thaliana]
  misc_feature (1)..(550): Homolog of NCBI NO: 1771381 NR Description: phosphoinositide-specific phospholipase C
  misc_feature (1)..(550): Homolog of NCBI NO: 2765140 NR Description: 1-phosphatidylinositol-4,5-bisphosphate
  misc_feature (570)..(899): Homolog of NCBI NO: 15237730 NR Description: putative protein; protein id: At5g58680.1, by cDNA: 105025. [Arabidopsis thaliana]
  misc_feature (570)..(899): Homolog of NCBI NO: 26452835 NR Description: unknown protein [Arabidopsis thaliana]
MGLCCSDKLRMNRGAPPQDVVTAFVEYTEGRSHMTAEQLCRFLVEVQDETEVLVSDAEKIIERITCERHHITKFLRHTLNLDDFFSFLFSDDLNHPIDSKVHQDMASPLSHYFIYTSHNSYLTGNQINSECSDVPLIKALKRGVRALELDMWPNSTKDDILVLHGWAWTPPVELVKCLRSIKEHAFYASAYPVILTLEDHLTPDLQAKAAEMMKEIFMDMVYFPEAGGLKEFPSPEDLKYKIVISTKPPKGSLRKDKDSESDASGKASSDVSADDEKTEEETSEAKNEEDGFDQESSNLDFLTYSRLITIPSGNAKNGLKEALTIDNGGVRRLSLREQKFKKATEMYGTEVIKFTQKNLLRIYPKATRVNSSNYRPYNGWMYGAQMVAFNMQGYGRALWMMHGMFRGNGGCGYVKKPDFMMNNNLSGEVFNPKAKLPIKKTLKVKVYMGKGWDSGFQRTCFNTWSSPNFYTRVGITGVRGDKVMKKTKKEQKTWEPFWNEEFEFQLTVPELALLRIEVHDYNMPEKDDFSGQTCLPVSELRQGIRSVPFCVPNTYLHTLKTKPLKEVLIDCNSDISCEFPTTTSESRQRKLFLSCAVDNSDDVIRNLITHLESSSSIEEQKQAAMEIRLLSKNKPENRIKLAKAGAIKPLVSLISSSDLQLQEYGVTAVLNLSLCDENKEMIVSSGAVKPLVNALRLGTPTTKENAACALLRLSQVEENKITIGRSGAIPLLVNLLENGGFRAKKDASTALYSLCSTNENKTRAVESGIMKPLVELMIDFESDMVDKSAFVMNLLMSAPESKPAVVEEGGVPVLVEIVEAGTQRQKEISVSILLQLCEESVVYRTMVAREGAVPPLVALSQGSASRGAKVKAEALIELLRQPRQQQQQQQHFESNDNER

SEQ ID NO: 78573 - DNA, 1566 bp, Arabidopsis thaliana
  misc_feature (1)..(1566): Ceres Seq. ID no. 12642816
  misc_feature: MA Experiment ID: 20000227 Result: Up-regulated in Transcription
  misc_feature: MA Experiment 20000227 PARAMETER Experiment Name: At_Root-Tips-vs-Tops_P Parameter: Tissue Value: Root Tips vs. Root Tops
  misc_feature: MA Experiment ID: 20000286 Result: Down-regulated in Transcription
  misc_feature: MA Experiment 20000286 PARAMETER Experiment Name: At_Open_Flower_P Parameter: Age (day) Value: 21
  misc_feature: MA Experiment 20000286 PARAMETER Experiment Name: At_Open_Flower_P Parameter: Plant Line Value: WS
  misc_feature: MA Experiment 20000286 PARAMETER Experiment Name: At_Open_Flower_P Parameter: Tissue Value: Half Open vs. Whole Plant
  misc_feature: MA Experiment ID: 20001555 Result: Down-regulated in Transcription
  misc_feature: MA Experiment 20001555 PARAMETER Experiment Name: At_Drought_Soil_Dry_P Parameter: Age (day) Value: 24
  misc_feature: MA Experiment 20001555 PARAMETER Experiment Name: At_Drought_Soil_Dry_P Parameter: Organism Value: A. thaliana
  misc_feature: MA Experiment 20001555 PARAMETER Experiment Name: At_Drought_Soil_Dry_P Parameter: Plant Line Value: WS
  misc_feature: MA Experiment 20001555 PARAMETER Experiment Name: At_Drought_Soil_Dry_P Parameter: Post Timepoint (hr) Value: None
  misc_feature: MA Experiment 20001555 PARAMETER Experiment Name: At_Drought_Soil_Dry_P Parameter: Post-Treatment Value: None
  misc_feature: MA Experiment 20001555 PARAMETER Experiment Name: At_Drought_Soil_Dry_P Parameter: Timepoint (day) Value: 10
  misc_feature: MA Experiment 20001555 PARAMETER Experiment Name: At_Drought_Soil_Dry_P Parameter: Treatment Value: Drought vs. No Drought
  misc_feature: MA Experiment ID: 20001556 Result: Down-regulated in Transcription
  misc_feature: MA Experiment 20001556 PARAMETER Experiment Name: At_Drought_Soil_Dry_P Parameter: Age (day) Value: 26
  misc_feature: MA Experiment 20001556 PARAMETER Experiment Name: At_Drought_Soil_Dry_P Parameter: Organism Value: A. thaliana
  misc_feature: MA Experiment 20001556 PARAMETER Experiment Name: At_Drought_Soil_Dry_P Parameter: Plant Line Value: WS
  misc_feature: MA Experiment 20001556 PARAMETER Experiment Name: At_Drought_Soil_Dry_P Parameter: Post Timepoint (hr) Value: None
  misc_feature: MA Experiment 20001556 PARAMETER Experiment Name: At_Drought_Soil_Dry_P Parameter: Post-Treatment Value: None
  misc_feature: MA Experiment 20001556 PARAMETER Experiment Name: At_Drought_Soil_Dry_P Parameter: Timepoint (day) Value: 12
  misc_feature: MA Experiment 20001556 PARAMETER Experiment Name: At_Drought_Soil_Dry_P Parameter: Treatment Value: Drought vs. No Drought
atggctagagaaaacccattgatgagcttctcctttagtttcagatatctctgtcactttgctctactcctctctctcctctcctttgtctcttttctcttcagacacaacacatcactctgttcttgtctttacgatcacaacacctacgttaacacattcgatcatcagcaaaacaatgaaaccatcgatcttcttcgattctcttctgcttggaaccatctcactttcccttctaaacccaagaagactctcaagatcgctgtggtggtcaagaaatggccgaggaaatcgcaagctggtgggctcgagcgacacgcgcttacattgcatctcgctctagccaatcgtggccacgagcttcatgttttcaccgctgcttctccatcgttccctgaatatcaactgaaaaatctgatgttccatctctctgagccaaccgctgctggatatcttgatcaagcttctgtctcgcaacagcttcagttgaagaaacggaatttaactaacgcaattttcctccggaaatcgcagacgcagaacgctagtggaagaccgtttgacgtaattcacacagagagcgttgggcttctccacacaagagccaagaatctccgtaacgtggtcgcgtcttggcatggaatcgcttacgaaacttttcactctgacatcatccaagaactccttcgtcaagcagacatcgccgccgccaccgctgctggaaccgaagaagaacagccaccgccttcatcgccagctctgacggagcgagcgaagcgagtcgtcgaggaagtcaaattcttccaacgttacgctcaccacgtggcaactagcgatcactgcggtgacgtactcaagaggatttacatgattccggaggaacgtgtccatatcattctaaacggcgtcgacgagaacgttttcaaaccggacgtttcaaaacgtgagagctttagagagaaatttggcgttagaagcggcaagaacaagaaatctcctctggttttgggaattgcagggaggttagtgagagataaaggtcatcctttgatgttctcagctttgaagcgagtgtttgaagaaaacaaggaggcacgtgaaaacgttgtcgttttggtagctggagatggtccatggggaaacagatataaagacctcgggtctactaatgtgattgttcttggaccgttggatcaagaaaagctagcgggattctacaacgcgatcgatgtgtttgtgaatccgacccttcgagctcaagggctggatcacactctcttggaagccatggtttcaggaaaaccggtcttagctactaggctagcgagtatcactgggtcagtggttgtcggtccacatttgggatatactttctcaccaaatgttgagtctcttaccgaggcgattttgcgggttgttagcgatggaacagaggaattacagaggaaaggcaaggaagcgcgtgaacggtcgttgaggcttttcacggcgactaaaatggctgattcatatgaaaggttttttctttgcatttcggatcagaggttttgtacgttacaagcttaa

SEQ ID NO: 78574 - protein, 521 aa, Arabidopsis thaliana
  peptide (1)..(521): Ceres Seq. ID no. 12642817
  misc_feature (320)..(490): Pfam Name: Glycosyl transferases group 1 Pfam Description: Glycosyl transferases group 1
  misc_feature (1)..(521): Homolog of NCBI NO: 10177634 NR Description: glycosyl transferase-like [Arabidopsis thaliana]
  misc_feature (1)..(521): Homolog of NCBI NO: 15237813 NR Description: hexosyltransferase - like protein; protein id:
  misc_feature (249)..(517): Homolog of NCBI NO: 15219398 NR Description: putative glycosyl transferase; protein id: [Arabidopsis thaliana] >gi|25406256|pir||E96757 protein glycosyl
  misc_feature (24)..(228): Homolog of NCBI NO: 15219398 NR Description: putative glycosyl transferase; protein id: [Arabidopsis thaliana] >gi|25406256|pir||E96757 protein glycosyl
  misc_feature (249)..(515): Homolog of NCBI NO: 5903105 NR Description: Hypothetical protein [Arabidopsis thaliana]
  misc_feature (24)..(228): Homolog of NCBI NO: 5903105 NR Description: Hypothetical protein [Arabidopsis thaliana]
  misc_feature (260)..(517): Homolog of NCBI NO: 21593749 NR Description: unknown [Arabidopsis thaliana]
  misc_feature (178)..(233): Homolog of NCBI NO: 21593749 NR Description: unknown [Arabidopsis thaliana]
  misc_feature (260)..(517): Homolog of NCBI NO: 18415319 NR Description: putative protein; protein id: At4g19460.1,
  misc_feature (178)..(233): Homolog of NCBI NO: 18415319 NR Description: putative protein; protein id: At4g19460.1,
MARENPLMSFSFSFRYLCHFALLLSLLSFVSFLFRHNTSLCSCLYDHNTYVNTFDHQQNNETIDLLRFSSAWNHLTFPSKPKKTLKIAVVVKKWPRKSQAGGLERHALTLHLALANRGHELHVFTAASPSFPEYQLKNLMFHLSEPTAAGYLDQASVSQQLQLKKRNLTNAIFLRKSQTQNASGRPFDVIHTESVGLLHTRAKNLRNVVASWHGIAYETFHSDIIQELLRQADIAAATAAGTEEEQPPPSSPALTERAKRVVEEVKFFQRYAHHVATSDHCGDVLKRIYMIPEERVHIILNGVDENVFKPDVSKRESFREKFGVRSGKNKKSPLVLGIAGRLVRDKGHPLMFSALKRVFEENKEARENVVVLVAGDGPWGNRYKDLGSTNVIVLGPLDQEKLAGFYNAIDVFVNPTLRAQGLDHTLLEAMVSGKPVLATRLASITGSVVVGPHLGYTFSPNVESLTEAILRVVSDGTEELQRKGKEARERSLRLFTATKMADSYERFFLCISDQRFCTLQA

SEQ ID NO: 78575 - protein, 514 aa, Arabidopsis thaliana
  peptide (1)..(514): Ceres Seq. ID no. 12642818
  misc_feature (313)..(483): Pfam Name: Glycosyl transferases group 1 Pfam Description: Glycosyl transferases group 1
  misc_feature (1)..(514): Homolog of NCBI NO: 10177634 NR Description: glycosyl transferase-like [Arabidopsis thaliana]
  misc_feature (1)..(514): Homolog of NCBI NO: 15237813 NR Description: hexosyltransferase - like protein; protein id:
  misc_feature (242)..(510): Homolog of NCBI NO: 15219398 NR Description: putative glycosyl transferase; protein id: [Arabidopsis thaliana] >gi|25406256|pir||E96757 protein glycosyl
  misc_feature (17)..(221): Homolog of NCBI NO: 15219398 NR Description: putative glycosyl transferase; protein id: [Arabidopsis thaliana] >gi|25406256|pir||E96757 protein glycosyl
  misc_feature (242)..(508): Homolog of NCBI NO: 5903105 NR Description: Hypothetical protein [Arabidopsis thaliana]
  misc_feature (17)..(221): Homolog of NCBI NO: 5903105 NR Description: Hypothetical protein [Arabidopsis thaliana]
  misc_feature (253)..(510): Homolog of NCBI NO: 21593749 NR Description: unknown [Arabidopsis thaliana]
  misc_feature (171)..(226): Homolog of NCBI NO: 21593749 NR Description: unknown [Arabidopsis thaliana]
  misc_feature (253)..(510): Homolog of NCBI NO: 18415319 NR Description: putative protein; protein id: At4g19460.1,
  misc_feature (171)..(226): Homolog of NCBI NO: 18415319 NR Description: putative protein; protein id: At4g19460.1,
MSFSFSFRYLCHFALLLSLLSFVSFLFRHNTSLCSCLYDHNTYVNTFDHQQNNETIDLLRFSSAWNHLTFPSKPKKTLKIAVVVKKWPRKSQAGGLERHALTLHLALANRGHELHVFTAASPSFPEYQLKNLMFHLSEPTAAGYLDQASVSQQLQLKKRNLTNAIFLRKSQTQNASGRPFDVIHTESVGLLHTRAKNLRNVVASWHGIAYETFHSDIIQELLRQADIAAATAAGTEEEQPPPSSPALTERAKRVVEEVKFFQRYAHHVATSDHCGDVLKRIYMIPEERVHIILNGVDENVFKPDVSKRESFREKFGVRSGKNKKSPLVLGIAGRLVRDKGHPLMFSALKRVFEENKEARENVVVLVAGDGPWGNRYKDLGSTNVIVLGPLDQEKLAGFYNAIDVFVNPTLRAQGLDHTLLEAMVSGKPVLATRLASITGSVVVGPHLGYTFSPNVESLTEAILRVVSDGTEELQRKGKEARERSLRLFTATKMADSYERFFLCISDQRFCTLQA

SEQ ID NO: 78576 - protein, 382 aa, Arabidopsis thaliana
  peptide (1)..(382): Ceres Seq. ID no. 12642819
  misc_feature (181)..(351): Pfam Name: Glycosyl transferases group 1 Pfam Description: Glycosyl transferases group 1
  misc_feature (1)..(382): Homolog of NCBI NO: 10177634 NR Description: glycosyl transferase-like [Arabidopsis thaliana]
  misc_feature (1)..(382): Homolog of NCBI NO: 15237813 NR Description: hexosyltransferase - like protein; protein id:
  misc_feature (110)..(378): Homolog of NCBI NO: 15219398 NR Description: putative glycosyl transferase; protein id: [Arabidopsis thaliana] >gi|25406256|pir||E96757 protein glycosyl
  misc_feature (1)..(89): Homolog of NCBI NO: 15219398 NR Description: putative glycosyl transferase; protein id: [Arabidopsis thaliana] >gi|25406256|pir||E96757 protein glycosyl
  misc_feature (110)..(376): Homolog of NCBI NO: 5903105 NR Description: Hypothetical protein [Arabidopsis thaliana]
  misc_feature (1)..(89): Homolog of NCBI NO: 5903105 NR Description: Hypothetical protein [Arabidopsis thaliana]
  misc_feature (121)..(378): Homolog of NCBI NO: 21593749 NR Description: unknown [Arabidopsis thaliana]
  misc_feature (39)..(94): Homolog of NCBI NO: 21593749 NR Description: unknown [Arabidopsis thaliana]
  misc_feature (121)..(378): Homolog of NCBI NO: 18415319 NR Description: putative protein; protein id: At4g19460.1,
  misc_feature (39)..(94): Homolog of NCBI NO: 18415319 NR Description: putative protein; protein id: At4g19460.1,
MFHLSEPTAAGYLDQASVSQQLQLKKRNLTNAIFLRKSQTQNASGRPFDVIHTESVGLLHTRAKNLRNVVASWHGIAYETFHSDIIQELLRQADIAAATAAGTEEEQPPPSSPALTERAKRVVEEVKFFQRYAHHVATSDHCGDVLKRIYMIPEERVHIILNGVDENVFKPDVSKRESFREKFGVRSGKNKKSPLVLGIAGRLVRDKGHPLMFSALKRVFEENKEARENVVVLVAGDGPWGNRYKDLGSTNVIVLGPLDQEKLAGFYNAIDVFVNPTLRAQGLDHTLLEAMVSGKPVLATRLASITGSVVVGPHLGYTFSPNVESLTEAILRVVSDGTEELQRKGKEARERSLRLFTATKMADSYERFFLCISDQRFCTLQA

SEQ ID NO: 78577 - DNA, 1473 bp, Arabidopsis thaliana
  misc_feature (1)..(1473): Ceres Seq. ID no. 12642846
  misc_feature: MA Experiment ID: 20000180 Result: Up-regulated in Transcription
  misc_feature: MA Experiment 20000180 PARAMETER Experiment Name: At_Germinating_Seeds_P Parameter: Age (hr) Value: 24 vs. 0
  misc_feature: MA Experiment 20000180 PARAMETER Experiment Name: At_Germinating_Seeds_P Parameter: Tissue Value: Germinating Seeds
  misc_feature: MA Experiment ID: 20000184 Result: Up-regulated in Transcription
  misc_feature: MA Experiment 20000184 PARAMETER Experiment Name: At_Shoots__P Parameter: Age (day) Value: 7
  misc_feature: MA Experiment 20000184 PARAMETER Experiment Name: At_Shoots__P Parameter: Tissue Value: Shoots vs. Whole Plant
  misc_feature: MA Experiment ID: 20000185 Result: Down-regulated in Transcription
  misc_feature: MA Experiment 20000185 PARAMETER Experiment Name: At_Roots__P Parameter: Age (day) Value: 7 vs. 21
  misc_feature: MA Experiment 20000185 PARAMETER Experiment Name: At_Roots__P Parameter: Organism Value: A. thaliana
  misc_feature: MA Experiment 20000185 PARAMETER Experiment Name: At_Roots__P Parameter: Tissue Value: Roots vs. Whole Plant
  misc_feature: MA Experiment ID: 20000438 Result: Up-regulated in Transcription
  misc_feature: MA Experiment 20000438 PARAMETER Experiment Name: At_Shoots__P Parameter: Age (day) Value: 14
  misc_feature: MA Experiment 20000438 PARAMETER Experiment Name: At_Shoots__P Parameter: Tissue Value: Shoots vs. Whole Plant
  misc_feature: MA Experiment ID: 20000439 Result: Down-regulated in Transcription
  misc_feature: MA Experiment 20000439 PARAMETER Experiment Name: At_Roots__P Parameter: Age (day) Value: 14 vs. 21
  misc_feature: MA Experiment 20000439 PARAMETER Experiment Name: At_Roots__P Parameter: Organism Value: A. thaliana
  misc_feature: MA Experiment 20000439 PARAMETER Experiment Name: At_Roots__P Parameter: Tissue Value: Roots vs. Whole Plant
  misc_feature: MA Experiment ID: 20001557 Result: Down-regulated in Transcription
  misc_feature: MA Experiment 20001557 PARAMETER Experiment Name: At_Drought_Soil_Dry_P Parameter: Age (day) Value: 27
  misc_feature: MA Experiment 20001557 PARAMETER Experiment Name: At_Drought_Soil_Dry_P Parameter: Organism Value: A. thaliana
  misc_feature: MA Experiment 20001557 PARAMETER Experiment Name: At_Drought_Soil_Dry_P Parameter: Plant Line Value: WS
  misc_feature: MA Experiment 20001557 PARAMETER Experiment Name: At_Drought_Soil_Dry_P Parameter: Post Timepoint (hr) Value: 3
  misc_feature: MA Experiment 20001557 PARAMETER Experiment Name: At_Drought_Soil_Dry_P Parameter: Post-Treatment Value: Re-Water vs. No Drought
  misc_feature: MA Experiment 20001557 PARAMETER Experiment Name: At_Drought_Soil_Dry_P Parameter: Timepoint (day) Value: 13
  misc_feature: MA Experiment 20001557 PARAMETER Experiment Name: At_Drought_Soil_Dry_P Parameter: Treatment Value: Drought vs. No Drought
  misc_feature: MA Experiment ID: 20001558 Result: Down-regulated in Transcription
  misc_feature: MA Experiment 20001558 PARAMETER Experiment Name: At_Drought_Soil_Dry_P Parameter: Age (day) Value: 27
  misc_feature: MA Experiment 20001558 PARAMETER Experiment Name: At_Drought_Soil_Dry_P Parameter: Organism Value: A. thaliana
  misc_feature: MA Experiment 20001558 PARAMETER Experiment Name: At_Drought_Soil_Dry_P Parameter: Plant Line Value: WS
  misc_feature: MA Experiment 20001558 PARAMETER Experiment Name: At_Drought_Soil_Dry_P Parameter: Post Timepoint (hr) Value: 6
  misc_feature: MA Experiment 20001558 PARAMETER Experiment Name: At_Drought_Soil_Dry_P Parameter: Post-Treatment Value: Re-Water vs. No Drought
  misc_feature: MA Experiment 20001558 PARAMETER Experiment Name: At_Drought_Soil_Dry_P Parameter: Timepoint (day) Value: 13
  misc_feature: MA Experiment 20001558 PARAMETER Experiment Name: At_Drought_Soil_Dry_P Parameter: Treatment Value: Drought vs. No Drought
  misc_feature: MA Experiment ID: 20001905 Result: Down-regulated in Transcription
  misc_feature: MA Experiment 20001905 PARAMETER Experiment Name: At_Drought_Reproduction_P Parameter: Age (day) Value: 40
  misc_feature: MA Experiment 20001905 PARAMETER Experiment Name: At_Drought_Reproduction_P Parameter: Organism Value: A. thaliana
  misc_feature: MA Experiment 20001905 PARAMETER Experiment Name: At_Drought_Reproduction_P Parameter: Plant Line Value: WS
  misc_feature: MA Experiment 20001905 PARAMETER Experiment Name: At_Drought_Reproduction_P Parameter: Timepoint (day) Value: 10
  misc_feature: MA Experiment 20001905 PARAMETER Experiment Name: At_Drought_Reproduction_P Parameter: Tissue Value: Rosettes
  misc_feature: MA Experiment 20001905 PARAMETER Experiment Name: At_Drought_Reproduction_P Parameter: Treatment Value: Drought vs. No Drought
atgccttatgtatcatcaattatagaagatagaaaattagttatttgcctagattgcactgatttaatagtaatttacttgaatcgtaggtttatcttcccggctttgggaggattattgtttgggtatgacattggggctacctccggtgctacgctctcacttcagtcacctgcgcttagcggaactacatggtttaacttctcacctgttcagctaggacttgtggttagcggatccttgtatggagcccttcttggctcaatttctgtctatggcgttgctgatttccttggaagaaggcgggaacttattatagctgctgttctctatctcctcgggtctctgatcactggctgtgcccctgatcttaatattctcttagttggaaggcttctctatggctttggtattggtttggcaatgcatggggctcccctctatattgctgagacatgcccatctcaaatccgtggaactttgatatctctgaaagaactcttcatcgtattgggaattttgttgggtttttctgttggaagcttccagattgatgtagttggagggtggcgttacatgtatggatttggtacgcctgttgctttgctgatgggactaggcatgtggagtctccctgcatctcctcgctggttgctgcttagagctgtccaaggtaaaggacaattacaagaatacaaagagaaggccatgcttgccctcagcaaattacgtggcagacctccaggtgataaaatctcagagaagttggtagatgatgcctatttatctgtgaaaacggcctatgaagatgagaaatctgggggaaacttcctggaagtattccaagggcctaatttgaaagctttgacaattggtggaggtttagtcctcttccaacagataactggacagcctagtgttctttattatgcgggttcgattcttcagactgctggattctctgctgctgctgatgcaactcgagtctctgttattattggtgttttcaagttactgatgacatgggtagctgttgcgaaagttgatgatctcggcagacgacctttactgattggaggtgtcagcggcattgcgttgtccttgtttctactgtcagcatactacaagtttctcggaggctttccccttgtcgctgttggtgcactgcttctctatgttggttgttaccagcgcgaacagatctcatttggacccatcagctggctaatggtgtcagagattttcccgctccgcacaagagggagagggatcagtcttgcagttcttacaaactttggctccaatgctattgtgacatttgcattttcacctttaaaggaatttcttggagccgagaatcttttccttctctttgggggcatagcactggtatcactgctgtttgtaatactagtagttccagagaccaagggtctcagcttggaagaaattgaatcaaaaatcttgaagtga

SEQ ID NO: 78578 - protein, 490 aa, Arabidopsis thaliana
  peptide (1)..(490): Ceres Seq. ID no. 12642847
  misc_feature (31)..(488): Pfam Name: Sugar (and other) transporter Pfam Description: Sugar (and other) transporter
  misc_feature (31)..(490): Homolog of NCBI NO: 9759246 NR Description: sugar transporter-like protein [Arabidopsis
  misc_feature (173)..(490): Homolog of NCBI NO: 15237848 NR Description: D-xylose-H+ symporter - like protein; protein id:
  misc_feature (31)..(144): Homolog of NCBI NO: 15237848 NR Description: D-xylose-H+ symporter - like protein; protein id:
  misc_feature (51)..(490): Homolog of NCBI NO: 34897404 NR Description: putative sugar transporter protein [Oryza sativa
  misc_feature (31)..(488): Homolog of NCBI NO: 37537174 NR Description: putative sugar transporter protein [Oryza sativa
  misc_feature (31)..(489): Homolog of NCBI NO: 30678759 NR Description: sugar transporter family [Arabidopsis thaliana]
  misc_feature (142)..(489): Homolog of NCBI NO: 6714427 NR Description: hypothetical protein [Arabidopsis thaliana]
  misc_feature (31)..(301): Homolog of NCBI NO: 15237892 NR Description: sugar transporter - like protein; protein id:
  misc_feature (410)..(489): Homolog of NCBI NO: 15237892 NR Description: sugar transporter - like protein; protein id:
  misc_feature (31)..(301): Homolog of NCBI NO: 30686148 NR Description: sugar transporter family [Arabidopsis thaliana]
MPYVSSIIEDRKLVICLDCTDLIVIYLNRRFIFPALGGLLFGYDIGATSGATLSLQSPALSGTTWFNFSPVQLGLVVSGSLYGALLGSISVYGVADFLGRRRELIIAAVLYLLGSLITGCAPDLNILLVGRLLYGFGIGLAMHGAPLYIAETCPSQIRGTLISLKELFIVLGILLGFSVGSFQIDVVGGWRYMYGFGTPVALLMGLGMWSLPASPRWLLLRAVQGKGQLQEYKEKAMLALSKLRGRPPGDKISEKLVDDAYLSVKTAYEDEKSGGNFLEVFQGPNLKALTIGGGLVLFQQITGQPSVLYYAGSILQTAGFSAAADATRVSVIIGVFKLLMTWVAVAKVDDLGRRPLLIGGVSGIALSLFLLSAYYKFLGGFPLVAVGALLLYVGCYQREQISFGPISWLMVSEIFPLRTRGRGISLAVLTNFGSNAIVTFAFSPLKEFLGAENLFLLFGGIALVSLLFVILVVPETKGLSLEEIESKILK

SEQ ID NO: 78579 - protein, 349 aa, Arabidopsis thaliana
  peptide (1)..(349): Ceres Seq. ID no. 12642848
  misc_feature (1)..(347): Pfam Name: Sugar (and other) transporter Pfam Description: Sugar (and other) transporter
  misc_feature (1)..(349): Homolog of NCBI NO: 9759246 NR Description: sugar transporter-like protein [Arabidopsis
  misc_feature (32)..(349): Homolog of NCBI NO: 15237848 NR Description: D-xylose-H+ symporter - like protein; protein id:
  misc_feature (1)..(349): Homolog of NCBI NO: 34897404 NR Description: putative sugar transporter protein [Oryza sativa
  misc_feature (1)..(347): Homolog of NCBI NO: 37537174 NR Description: putative sugar transporter protein [Oryza sativa
  misc_feature (1)..(348): Homolog of NCBI NO: 30678759 NR Description: sugar transporter family [Arabidopsis thaliana]
  misc_feature (1)..(348): Homolog of NCBI NO: 6714427 NR Description: hypothetical protein [Arabidopsis thaliana]
  misc_feature (1)..(160): Homolog of NCBI NO: 15237892 NR Description: sugar transporter - like protein; protein id:
  misc_feature (269)..(348): Homolog of NCBI NO: 15237892 NR Description: sugar transporter - like protein; protein id:
  misc_feature (1)..(160): Homolog of NCBI NO: 30686148 NR Description: sugar transporter family [Arabidopsis thaliana]
  misc_feature (269)..(348): Homolog of NCBI NO: 30686148 NR Description: sugar transporter family [Arabidopsis thaliana]
MHGAPLYIAETCPSQIRGTLISLKELFIVLGILLGFSVGSFQIDVVGGWRYMYGFGTPVALLMGLGMWSLPASPRWLLLRAVQGKGQLQEYKEKAMLALSKLRGRPPGDKISEKLVDDAYLSVKTAYEDEKSGGNFLEVFQGPNLKALTIGGGLVLFQQITGQPSVLYYAGSILQTAGFSAAADATRVSVIIGVFKLLMTWVAVAKVDDLGRRPLLIGGVSGIALSLFLLSAYYKFLGGFPLVAVGALLLYVGCYQREQISFGPISWLMVSEIFPLRTRGRGISLAVLTNFGSNAIVTFAFSPLKEFLGAENLFLLFGGIALVSLLFVILVVPETKGLSLEEIESKILK

SEQ ID NO: 78580 - protein, 298 aa, Arabidopsis thaliana
  peptide (1)..(298): Ceres Seq. ID no. 12642849
  misc_feature (1)..(296): Pfam Name: Sugar (and other) transporter Pfam Description: Sugar (and other) transporter
  misc_feature (1)..(298): Homolog of NCBI NO: 9759246 NR Description: sugar transporter-like protein [Arabidopsis
  misc_feature (1)..(298): Homolog of NCBI NO: 15237848 NR Description: D-xylose-H+ symporter - like protein; protein id:
  misc_feature (1)..(298): Homolog of NCBI NO: 34897404 NR Description: putative sugar transporter protein [Oryza sativa
  misc_feature (1)..(296): Homolog of NCBI NO: 37537174 NR Description: putative sugar transporter protein [Oryza sativa
  misc_feature (1)..(297): Homolog of NCBI NO: 30678759 NR Description: sugar transporter family [Arabidopsis thaliana]
  misc_feature (1)..(297): Homolog of NCBI NO: 6714427 NR Description: hypothetical protein [Arabidopsis thaliana]
  misc_feature (1)..(109): Homolog of NCBI NO: 15237892 NR Description: sugar transporter - like protein; protein id:
  misc_feature (218)..(297): Homolog of NCBI NO: 15237892 NR Description: sugar transporter - like protein; protein id:
  misc_feature (1)..(109): Homolog of NCBI NO: 30686148 NR Description: sugar transporter family [Arabidopsis thaliana]
  misc_feature (218)..(297): Homolog of NCBI NO: 30686148 NR Description: sugar transporter family [Arabidopsis thaliana]
MYGFGTPVALLMGLGMWSLPASPRWLLLRAVQGKGQLQEYKEKAMLALSKLRGRPPGDKISEKLVDDAYLSVKTAYEDEKSGGNFLEVFQGPNLKALTIGGGLVLFQQITGQPSVLYYAGSILQTAGFSAAADATRVSVIIGVFKLLMTWVAVAKVDDLGRRPLLIGGVSGIALSLFLLSAYYKFLGGFPLVAVGALLLYVGCYQREQISFGPISWLMVSEIFPLRTRGRGISLAVLTNFGSNAIVTFAFSPLKEFLGAENLFLLFGGIALVSLLFVILVVPETKGLSLEEIESKILK

SEQ ID NO: 78581 - DNA, 2988 bp, Arabidopsis thaliana
  misc_feature (1)..(2988): Ceres Seq. ID no. 12642924
atggctgctgcgattcaaaatcttacgcaactagaaactctcactccaaatcgccaatcgcgttctcaaacagtgctaatcgccgatgaagaggtctcattgtcatcgccgtccttctcacgacgggagatttcgctgccgtatatggccgatttatctccggagattcctcacattcgtcctcctcctcacaaaagttattgggccggctcaaagagatggaatcaaaattctctcagtttcatggccggaagttgcaatagaaaacacatttactcattcgtttcactgactcaggacatcttgccatgttgccagaggcttggactgtttcttgggtttatctatttatacgctgtgtttctctcaaactctggcattggagcttttgccattattggttgtgttcaagctcaggatcaacaagagtttatcagtttggattgcgggttacccatgactgaaccgtcttcttatactgagtcagtaaccggactacggttctcgtctgatgctgaattcatccagactggtgaaagtggtaaaatccaggcgagtatggagaatgactaccttaagccgtacacgaggctgaggtattttccagaggagagaaggaactgctatagtttgagtgttgacaagaacaggaaatatttgatcagggctaggttcatttatgggaattacgatggtcgtaactctaacccgatatttgaactgcatctaggacctaatctgtgggcaactatagatttgcaaaagtttgtgaatggtacaatggaggagatccttcacactccaacatcaaactctttgaacgtttgtcttgttaagacagggacaactacacccttgatctcagccttggaattacggccattaggaaataattcttatctcacagatggttctttgaatcttttcgttcggatatatctcaacaagacagatggctttcttcggtacccggatgatatttatgatcgcagatggcataattactttatggtggatgattggacccaaattttcaccactctcgaagtgaccaatgataacaattatgaaccaccaaaaaaggctcttgcagcggctgccacgccttctaatgccagcgcgccattgacaatcagttggccaccagacaatcctggtgaccaatattacttgtacagccacttctctgagatacaagatttacagaccaatgataccagagaatttgacatattatgggatggagctgttgttgaagaaggtttcatccctccaaagttaggggtgactactatccataatctttctccagtgacatgcaaaggagaaaattgcatttaccagctaataaaaacctcgaggtcaactcttccttctctacttaacgctcttgaaatctacacagttatccaatttccacggtcggaaacaaatgaaaatgatgtggttgctgttaaaaatatcgaagctgcctataaattgagtagaatcaggtggcaaggagatccttgcgtccctcaaaagtatgcgtgggatggtttgaactgtagcaacaacacagatgtttctaaacctccaagagtattatccttaaatttgtcttcgagcggtttaactggaatcattgcggccgcaattcaaaaccttacacatttagaaaaactggacttgtcaaataacacactaactggagtggtgccggaatttctagcccagatgaaatcaaacttaagcggcaacaatcttagtggtccccttcctcaaggtcttcgaagagagggactagaattactagttcaaggcaacccaaggctttgtctctctggttcctgcacagaaaaaaactcgaagaagaaattcccggtggtgattgttgcatcagttgcttctgtggccataattgttgctgtgttggttattatttttgttctcagtaagaaaaagtcatctactgtgggagctctacaacctccactgagtatgccaatggttcatgataattcacctgaaccatcaatcgagacgaaaaagagaaggtttacttattcagaggttatcaaaatgacgaataattttcaaagagttgtaggggaaggaggattcggtgttgtttgtcatggtactataaatggttctgaacaggtggctgttaaagttctctctcaatcatcaagtcaaggatataagcattttaaggcagaggttgatcttcttctacgagttcaccatacaaatttggtgagtcttgttggatattgcgatgaaagagatcacttggctctcatctatgagtttttgcccaagggagacttaagacaacatctatctggaaaaagcggtgggtcctttatcaactggggtaatcgtctacgaatagctctggaggctgcactaggattggaatatctacattctggatgcacaccaccaattgtacatagagatataaaaacgacaaacatattgctggacgaacagttaaaggccaagcttgccgatttcggcctttcgagatctttccctattggaggtgaaacacatatttcaactgtggttgctggtactcctggataccttgatcctgaatattaccagacaactcgactgggtgagaagagcgatgtgtacagcttcggaattgtgttattggagattatcacaaaccaacctgtgattgaccagtcccgttcaaagtctcacatatcacaatgggttggatttgagcttacccgaggagatattactaagatcatggatccaaacctgaacggggattacgaatctcgttctgtatggagagttcttgaactggcaatgtcgtgtgcgaatccttcttctgtgaaccgaccaaacatgtcccaagttgctaatgaactgaaagaatgtcttgtttctgaaaacttgagggaaaatatgaatatggactctcagaattctcttaaagtgagcatgagctttgacacagagttgtttccgagggcaaggtag

SEQ ID NO: 78582 - protein, 995 aa, Arabidopsis thaliana
  peptide (1)..(995): Ceres Seq. ID no. 12642925
  misc_feature (132)..(995): Homolog of NCBI NO: 22327979 NR Description: serine/threonine-specific protein kinase - like; id: At5g59670.1, supported by cDNA: gi_20466279 [Arabidopsis
  misc_feature (127)..(995): Homolog of NCBI NO: 15231403 NR Description: receptor-like protein kinase homolog; protein id:
  misc_feature (129)..(640): Homolog of NCBI NO: 15231428 NR Description: hypothetical protein; protein id: At3g46420.1
  misc_feature (685)..(995): Homolog of NCBI NO: 15231428 NR Description: hypothetical protein; protein id: At3g46420.1
  misc_feature (127)..(995): Homolog of NCBI NO: 9294681 NR Description: receptor-like protein kinase [Arabidopsis
  misc_feature (127)..(995): Homolog of NCBI NO: 15232537 NR Description: serine/threonine-specific protein kinase,
  misc_feature (127)..(995): Homolog of NCBI NO: 15227017 NR Description: putative receptor-like protein kinase; protein id:
  misc_feature (144)..(995): Homolog of NCBI NO: 25387154 NR Description: protein F22G5.6 [imported] - Arabidopsis thaliana
  misc_feature (403)..(734): Homolog of NCBI NO: 15238490 NR Description: leucine-rich repeat transmembrane protein kinase,
  misc_feature (760)..(995): Homolog of NCBI NO: 15238490 NR Description: leucine-rich repeat transmembrane protein kinase,
MAAAIQNLTQLETLTPNRQSRSQTVLIADEEVSLSSPSFSRREISLPYMADLSPEIPHIRPPPHKSYWAGSKRWNQNSLSFMAGSCNRKHIYSFVSLTQDILPCCQRLGLFLGFIYLYAVFLSNSGIGAFAIIGCVQAQDQQEFISLDCGLPMTEPSSYTESVTGLRFSSDAEFIQTGESGKIQASMENDYLKPYTRLRYFPEERRNCYSLSVDKNRKYLIRARFIYGNYDGRNSNPIFELHLGPNLWATIDLQKFVNGTMEEILHTPTSNSLNVCLVKTGTTTPLISALELRPLGNNSYLTDGSLNLFVRIYLNKTDGFLRYPDDIYDRRWHNYFMVDDWTQIFTTLEVTNDNNYEPPKKALAAAATPSNASAPLTISWPPDNPGDQYYLYSHFSEIQDLQTNDTREFDILWDGAVVEEGFIPPKLGVTTIHNLSPVTCKGENCIYQLIKTSRSTLPSLLNALEIYTVIQFPRSETNENDVVAVKNIEAAYKLSRIRWQGDPCVPQKYAWDGLNCSNNTDVSKPPRVLSLNLSSSGLTGIIAAAIQNLTHLEKLDLSNNTLTGVVPEFLAQMKSNLSGNNLSGPLPQGLRREGLELLVQGNPRLCLSGSCTEKNSKKKFPVVIVASVASVAIIVAVLVIIFVLSKKKSSTVGALQPPLSMPMVHDNSPEPSIETKKRRFTYSEVIKMTNNFQRVVGEGGFGVVCHGTINGSEQVAVKVLSQSSSQGYKHFKAEVDLLLRVHHTNLVSLVGYCDERDHLALIYEFLPKGDLRQHLSGKSGGSFINWGNRLRIALEAALGLEYLHSGCTPPIVHRDIKTTNILLDEQLKAKLADFGLSRSFPIGGETHISTVVAGTPGYLDPEYYQTTRLGEKSDVYSFGIVLLEIITNQPVIDQSRSKSHISQWVGFELTRGDITKIMDPNLNGDYESRSVWRVLELAMSCANPSSVNRPNMSQVANELKECLVSENLRENMNMDSQNSLKVSMSFDTELFPRAR

SEQ ID NO: 78583 - protein, 947 aa, Arabidopsis thaliana
  peptide (1)..(947): Ceres Seq. ID no. 12642926
  misc_feature (84)..(947): Homolog of NCBI NO: 22327979 NR Description: serine/threonine-specific protein kinase - like; id: At5g59670.1, supported by cDNA: gi_20466279 [Arabidopsis
  misc_feature (79)..(947): Homolog of NCBI NO: 15231403 NR Description: receptor-like protein kinase homolog; protein id:
  misc_feature (81)..(592): Homolog of NCBI NO: 15231428 NR Description: hypothetical protein; protein id: At3g46420.1
  misc_feature (637)..(947): Homolog of NCBI NO: 15231428 NR Description: hypothetical protein; protein id: At3g46420.1
  misc_feature (79)..(947): Homolog of NCBI NO: 9294681 NR Description: receptor-like protein kinase [Arabidopsis
  misc_feature (79)..(947): Homolog of NCBI NO: 15232537 NR Description: serine/threonine-specific protein kinase,
  misc_feature (79)..(947): Homolog of NCBI NO: 15227017 NR Description: putative receptor-like protein kinase; protein id:
  misc_feature (96)..(947): Homolog of NCBI NO: 25387154 NR Description: protein F22G5.6 [imported] - Arabidopsis thaliana
  misc_feature (355)..(686): Homolog of NCBI NO: 15238490 NR Description: leucine-rich repeat transmembrane protein kinase,
  misc_feature (712)..(947): Homolog of NCBI NO: 15238490 NR Description: leucine-rich repeat transmembrane protein kinase,
MADLSPEIPHIRPPPHKSYWAGSKRWNQNSLSFMAGSCNRKHIYSFVSLTQDILPCCQRLGLFLGFIYLYAVFLSNSGIGAFAIIGCVQAQDQQEFISLDCGLPMTEPSSYTESVTGLRFSSDAEFIQTGESGKIQASMENDYLKPYTRLRYFPEERRNCYSLSVDKNRKYLIRARFIYGNYDGRNSNPIFELHLGPNLWATIDLQKFVNGTMEEILHTPTSNSLNVCLVKTGTTTPLISALELRPLGNNSYLTDGSLNLFVRIYLNKTDGFLRYPDDIYDRRWHNYFMVDDWTQIFTTLEVTNDNNYEPPKKALAAAATPSNASAPLTISWPPDNPGDQYYLYSHFSEIQDLQTNDTREFDILWDGAVVEEGFIPPKLGVTTIHNLSPVTCKGENCIYQLIKTSRSTLPSLLNALEIYTVIQFPRSETNENDVVAVKNIEAAYKLSRIRWQGDPCVPQKYAWDGLNCSNNTDVSKPPRVLSLNLSSSGLTGIIAAAIQNLTHLEKLDLSNNTLTGVVPEFLAQMKSNLSGNNLSGPLPQGLRREGLELLVQGNPRLCLSGSCTEKNSKKKFPVVIVASVASVAIIVAVLVIIFVLSKKKSSTVGALQPPLSMPMVHDNSPEPSIETKKRRFTYSEVIKMTNNFQRVVGEGGFGVVCHGTINGSEQVAVKVLSQSSSQGYKHFKAEVDLLLRVHHTNLVSLVGYCDERDHLALIYEFLPKGDLRQHLSGKSGGSFINWGNRLRIALEAALGLEYLHSGCTPPIVHRDIKTTNILLDEQLKAKLADFGLSRSFPIGGETHISTVVAGTPGYLDPEYYQTTRLGEKSDVYSFGIVLLEIITNQPVIDQSRSKSHISQWVGFELTRGDITKIMDPNLNGDYESRSVWRVLELAMSCANPSSVNRPNMSQVANELKECLVSENLRENMNMDSQNSLKVSMSFDTELFPRAR

SEQ ID NO: 78584 - protein, 914 aa, Arabidopsis thaliana
  peptide (1)..(914): Ceres Seq. ID no. 12642927
  misc_feature (51)..(914): Homolog of NCBI NO: 22327979 NR Description: serine/threonine-specific protein kinase - like; id: At5g59670.1, supported by cDNA: gi_20466279 [Arabidopsis
  misc_feature (46)..(914): Homolog of NCBI NO: 15231403 NR Description: receptor-like protein kinase homolog; protein id:
  misc_feature (48)..(559): Homolog of NCBI NO: 15231428 NR Description: hypothetical protein; protein id: At3g46420.1
  misc_feature (604)..(914): Homolog of NCBI NO: 15231428 NR Description: hypothetical protein; protein id: At3g46420.1
  misc_feature (46)..(914): Homolog of NCBI NO: 9294681 NR Description: receptor-like protein kinase [Arabidopsis
  misc_feature (46)..(914): Homolog of NCBI NO: 15232537 NR Description: serine/threonine-specific protein kinase,
  misc_feature (46)..(914): Homolog of NCBI NO: 15227017 NR Description: putative receptor-like protein kinase; protein id:
  misc_feature (63)..(914): Homolog of NCBI NO: 25387154 NR Description: protein F22G5.6 [imported] - Arabidopsis thaliana
  misc_feature (322)..(653): Homolog of NCBI NO: 15238490 NR Description: leucine-rich repeat transmembrane protein kinase,
  misc_feature (679)..(914): Homolog of NCBI NO: 15238490 NR Description: leucine-rich repeat transmembrane protein kinase,
MAGSCNRKHIYSFVSLTQDILPCCQRLGLFLGFIYLYAVFLSNSGIGAFAIIGCVQAQDQQEFISLDCGLPMTEPSSYTESVTGLRFSSDAEFIQTGESGKIQASMENDYLKPYTRLRYFPEERRNCYSLSVDKNRKYLIRARFIYGNYDGRNSNPIFELHLGPNLWATIDLQKFVNGTMEEILHTPTSNSLNVCLVKTGTTTPLISALELRPLGNNSYLTDGSLNLFVRIYLNKTDGFLRYPDDIYDRRWHNYFMVDDWTQIFTTLEVTNDNNYEPPKKALAAAATPSNASAPLTISWPPDNPGDQYYLYSHFSEIQDLQTNDTREFDILWDGAVVEEGFIPPKLGVTTIHNLSPVTCKGENCIYQLIKTSRSTLPSLLNALEIYTVIQFPRSETNENDVVAVKNIEAAYKLSRIRWQGDPCVPQKYAWDGLNCSNNTDVSKPPRVLSLNLSSSGLTGIIAAAIQNLTHLEKLDLSNNTLTGVVPEFLAQMKSNLSGNNLSGPLPQGLRREGLELLVQGNPRLCLSGSCTEKNSKKKFPVVIVASVASVAIIVAVLVIIFVLSKKKSSTVGALQPPLSMPMVHDNSPEPSIETKKRRFTYSEVIKMTNNFQRVVGEGGFGVVCHGTINGSEQVAVKVLSQSSSQGYKHFKAEVDLLLRVHHTNLVSLVGYCDERDHLALIYEFLPKGDLRQHLSGKSGGSFINWGNRLRIALEAALGLEYLHSGCTPPIVHRDIKTTNILLDEQLKAKLADFGLSRSFPIGGETHISTVVAGTPGYLDPEYYQTTRLGEKSDVYSFGIVLLEIITNQPVIDQSRSKSHISQWVGFELTRGDITKIMDPNLNGDYESRSVWRVLELAMSCANPSSVNRPNMSQVANELKECLVSENLRENMNMDSQNSLKVSMSFDTELFPRAR

SEQ ID NO: 78585 - DNA, 2598 bp, Arabidopsis thaliana
  misc_feature (1)..(2598): Ceres Seq. ID no. 12642932
  misc_feature: MA Experiment ID: 20000314 Result: Up-regulated in Transcription
  misc_feature: MA Experiment 20000314 PARAMETER Experiment Name: At_14day_Shoots-Roots_Sub_P Parameter: Age (day) Value: 14
  misc_feature: MA Experiment 20000314 PARAMETER Experiment Name: At_14day_Shoots-Roots_Sub_P Parameter: Organism Value: A. thaliana
  misc_feature: MA Experiment 20000314 PARAMETER Experiment Name: At_14day_Shoots-Roots_Sub_P Parameter: Plant Line Value: WS
  misc_feature: MA Experiment 20000314 PARAMETER Experiment Name: At_14day_Shoots-Roots_Sub_P Parameter: Tissue Value: Roots vs. Whole Plant
  misc_feature: MA Experiment ID: 20000315 Result: Down-regulated in Transcription
  misc_feature: MA Experiment 20000315 PARAMETER Experiment Name: At_14day_Shoots-Roots_Sub_P Parameter: Age (day) Value: 14
  misc_feature: MA Experiment 20000315 PARAMETER Experiment Name: At_14day_Shoots-Roots_Sub_P Parameter: Organism Value: A. thaliana
  misc_feature: MA Experiment 20000315 PARAMETER Experiment Name: At_14day_Shoots-Roots_Sub_P Parameter: Plant Line Value: WS
  misc_feature: MA Experiment 20000315 PARAMETER Experiment Name: At_14day_Shoots-Roots_Sub_P Parameter: Tissue Value: Shoots vs. Whole Plant
  misc_feature: MA Experiment ID: 20000327 Result: Down-regulated in Transcription
  misc_feature: MA Experiment 20000327 PARAMETER Experiment Name: At_42deg_Heat_Sub_P Parameter: Age (day) Value: 14
  misc_feature: MA Experiment 20000327 PARAMETER Experiment Name: At_42deg_Heat_Sub_P Parameter: Organism Value: A. thaliana
  misc_feature: MA Experiment 20000327 PARAMETER Experiment Name: At_42deg_Heat_Sub_P Parameter: Plant Line Value: WS
  misc_feature: MA Experiment 20000327 PARAMETER Experiment Name: At_42deg_Heat_Sub_P Parameter: Temperature (deg C) Value: 42 vs. 22
  misc_feature: MA Experiment 20000327 PARAMETER Experiment Name: At_42deg_Heat_Sub_P Parameter: Timepoint (hr) Value: 1
  misc_feature: MA Experiment 20000327 PARAMETER Experiment Name: At_42deg_Heat_Sub_P Parameter: Tissue Value: Aerial
  misc_feature: MA Experiment ID: 20000328 Result: Down-regulated in Transcription
  misc_feature: MA Experiment 20000328 PARAMETER Experiment Name: At_42deg_Heat_Sub_P Parameter: Age (day) Value: 14
  misc_feature: MA Experiment 20000328 PARAMETER Experiment Name: At_42deg_Heat_Sub_P Parameter: Organism Value: A. thaliana
  misc_feature: MA Experiment 20000328 PARAMETER Experiment Name: At_42deg_Heat_Sub_P Parameter: Plant Line Value: WS
  misc_feature: MA Experiment 20000328 PARAMETER Experiment Name: At_42deg_Heat_Sub_P Parameter: Temperature (deg C) Value: 42 vs. 22
  misc_feature: MA Experiment 20000328 PARAMETER Experiment Name: At_42deg_Heat_Sub_P Parameter: Timepoint (hr) Value: 6
  misc_feature: MA Experiment 20000328 PARAMETER Experiment Name: At_42deg_Heat_Sub_P Parameter: Tissue Value: Aerial
  misc_feature: MA Experiment ID: 20000347 Result: Up-regulated in Transcription
  misc_feature: MA Experiment 20000347 PARAMETER Experiment Name: At_2mM_SA_Sub_P Parameter: Age (day) Value: 14
  misc_feature: MA Experiment 20000347 PARAMETER Experiment Name: At_2mM_SA_Sub_P Parameter: Organism Value: A. thaliana
  misc_feature: MA Experiment 20000347 PARAMETER Experiment Name: At_2mM_SA_Sub_P Parameter: Plant Line Value: WS
  misc_feature: MA Experiment 20000347 PARAMETER Experiment Name: At_2mM_SA_Sub_P Parameter: Timepoint (hr) Value: 6
  misc_feature: MA Experiment 20000347 PARAMETER Experiment Name: At_2mM_SA_Sub_P Parameter: Tissue Value: Aerial
  misc_feature: MA Experiment 20000347 PARAMETER Experiment Name: At_2mM_SA_Sub_P Parameter: Treatment Value: 2mM SA vs. No Treatment
atggagagttcttttgggcttttgttggcactgttaactttgaccatcattcatattgttcaagctcaagacccacaagggttcatcagtttggattgcgggctacccgcaaatgagacgtctccttatacagagactcaaactggtctgttgttctcttcggacgcaacattcatccagagcggaaaaactggtagagtccaagcaaatcaagagagtaaattcttgaagccatacagaacgctgagatatttcccagagggagtacggaattgctacaatctgagtgtgttcaaggagcgtaaatatttgatcgctgctagttttttatatggaaattacgatggtcataacatagcccctgtgtttgatctttatcttggaccaaatttatgggcgaaaatagatttacaagatgtgaatggtacaggggaagagatcttacacatcccaacatcgaactcgttgcagatatgtcttgttcagactggggaaactacaccgctgatatcctctttggaattacggccaatgagaactggaagctataccactgtgtctggttccctgaaaacatacaggcgtttatattttaaaaagtctggatctaggctacggtacagtaaagatgtttatgatcgctcatggtttccgcgcttcatggacgaatggacccagatttccactgctctcggggtgattaataccaacatctaccaaccaccggaagatgcgctgaaaaatgctgccacgcctactgatgctagtgcgccactgacatttaaatggaattcagaaaaattggatgtccaatattacttttacgcacactatgctgagatccaagacttgcaggcaaatgataccagagaattcaacatcttattgaatggacaaaatttatctgtgactggccctgaagtcccagataagctaagtataaagaccttccaaagctcgtcaccgataagttgcaatggatgggcatgtaattttcagctgataagaaccaaaagatcaactcttccacctctacttaatgctttggaagtctacacagttattcagtttccacggtccgaaacagatgaaagcgacgtggttgctatgaaaaacatctcagccagctatggattgagtagaatcaactggcaaggcgatccatgcttccctcagcagcttaggtgggacgctttagactgcaccaacagaaatatctcccaaccaccaagaatcacttctttaaacttgtcttcaagtcgtttaaatggaaccatagcagctgccattcaaagtattacacaacttgaaacactggacttgtcgtataataacttaactggagaggtgccagagtttcttggcaaaatgaaatcgttaaacttaagcgggaacaatcttaatggttcaattccgcaagctcttcgaaagaaaagactaaaactataccttgaaggaaacccaaggcttataaaaccacctaagaaggaatttcctgtggcaattgttacattagttgtttttgtcacagtcattgtggttctttttcttgttttcagaaagaaaatgtccacgattgtaaaaggtctacgcctgccaccaaggacatcaatggtggatgttacattttctaataaaaaaagcaaaaggttcacatattcagaggtcgtccaagtgacaaagaacttccaaagagttttaggtaaaggagggttcggcatggtctatcacggtactgtaaagggttctgaacaggtggccgttaaggttctctctcaatcgtcaactcaaggctctaaggagttcaaagcagaggttgatctccttctgagagtgcaccatacaaatttggtgagcctggttgggtattgctgtgaaggagattacttggccctcgtctatgagtttcttcccaatggagacttaaaacaacatttgtcaggaaaaggaggtaattccatcatcaactggagtattcgactgcgaatagctttggaagcagcactaggtttggagtacttgcatattggatgcacaccaccgatggttcatagagatgtcaaaactgccaacatattgctcgacgagaattttaaggccaaactcgctgattttggtctttcaagatctttccaaggtgaaggcgaatctcaggaatcgacaacaattgctggtactcttggataccttgatcccgaatgttaccattcaggtcgattgggtgagaagagtgatgtctacagtttcgggatcgtgttattggagatgatcacaaaccaaccagtgatcaatcaaacctcgggagattctcacataacacaatgggttggctttcagatgaaccgaggtgatattcttgagattatggatccaaaccttcgcaaggattataacattaattctgcctggagagctttggaactggcaatgtcatgcgcgtatccttcttcctcaaaacgaccatccatgtctcaggttatacacgagctgaaagagtgtattgcgtgtgaaaacacagggataagtaagaatcgaagcttggaatatcaagaaatgaacgttagcttggacactacggcggttcccatggcaagatag

SEQ ID NO: 78586 - protein, 865 aa, Arabidopsis thaliana
  peptide (1)..(865): Ceres Seq. ID no. 12642933
  misc_feature (1)..(545): Homolog of NCBI NO: 9758834 NR Description: receptor-like protein kinase [Arabidopsis
  misc_feature (460)..(865): Homolog of NCBI NO: 9758834 NR Description: receptor-like protein kinase [Arabidopsis
  misc_feature (1)..(545): Homolog of NCBI NO: 15238493 NR Description: serine/threonine-specific protein kinase - like;
  misc_feature (460)..(865): Homolog of NCBI NO: 15238493 NR Description: serine/threonine-specific protein kinase - like;
  misc_feature (16)..(534): Homolog of NCBI NO: 9758831 NR Description: receptor-like protein kinase [Arabidopsis
  misc_feature (460)..(865): Homolog of NCBI NO: 9758831 NR Description: receptor-like protein kinase [Arabidopsis
  misc_feature (1)..(490): Homolog of NCBI NO: 15238489 NR Description: serine/threonine-specific protein kinase - like;
  misc_feature (460)..(865): Homolog of NCBI NO: 15238489 NR Description: serine/threonine-specific protein kinase - like;
  misc_feature (8)..(493): Homolog of NCBI NO: 9294681 NR Description: receptor-like protein kinase [Arabidopsis
  misc_feature (404)..(865): Homolog of NCBI NO: 9294681 NR Description: receptor-like protein kinase [Arabidopsis
MESSFGLLLALLTLTIIHIVQAQDPQGFISLDCGLPANETSPYTETQTGLLFSSDATFIQSGKTGRVQANQESKFLKPYRTLRYFPEGVRNCYNLSVFKERKYLIAASFLYGNYDGHNIAPVFDLYLGPNLWAKIDLQDVNGTGEEILHIPTSNSLQICLVQTGETTPLISSLELRPMRTGSYTTVSGSLKTYRRLYFKKSGSRLRYSKDVYDRSWFPRFMDEWTQISTALGVINTNIYQPPEDALKNAATPTDASAPLTFKWNSEKLDVQYYFYAHYAEIQDLQANDTREFNILLNGQNLSVTGPEVPDKLSIKTFQSSSPISCNGWACNFQLIRTKRSTLPPLLNALEVYTVIQFPRSETDESDVVAMKNISASYGLSRINWQGDPCFPQQLRWDALDCTNRNISQPPRITSLNLSSSRLNGTIAAAIQSITQLETLDLSYNNLTGEVPEFLGKMKSLNLSGNNLNGSIPQALRKKRLKLYLEGNPRLIKPPKKEFPVAIVTLVVFVTVIVVLFLVFRKKMSTIVKGLRLPPRTSMVDVTFSNKKSKRFTYSEVVQVTKNFQRVLGKGGFGMVYHGTVKGSEQVAVKVLSQSSTQGSKEFKAEVDLLLRVHHTNLVSLVGYCCEGDYLALVYEFLPNGDLKQHLSGKGGNSIINWSIRLRIALEAALGLEYLHIGCTPPMVHRDVKTANILLDENFKAKLADFGLSRSFQGEGESQESTTIAGTLGYLDPECYHSGRLGEKSDVYSFGIVLLEMITNQPVINQTSGDSHITQWVGFQMNRGDILEIMDPNLRKDYNINSAWRALELAMSCAYPSSSKRPSMSQVIHELKECIACENTGISKNRSLEYQEMNVSLDTTAVPMAR

SEQ ID NO: 78587 - protein, 688 aa, Arabidopsis thaliana
  peptide (1)..(688): Ceres Seq. ID no. 12642934
  misc_feature (1)..(368): Homolog of NCBI NO: 9758834 NR Description: receptor-like protein kinase [Arabidopsis
  misc_feature (283)..(688): Homolog of NCBI NO: 9758834 NR Description: receptor-like protein kinase [Arabidopsis
  misc_feature (1)..(368): Homolog of NCBI NO: 15238493 NR Description: serine/threonine-specific protein kinase - like;
  misc_feature (283)..(688): Homolog of NCBI NO: 15238493 NR Description: serine/threonine-specific protein kinase - like;
  misc_feature (1)..(357): Homolog of NCBI NO: 9758831 NR Description: receptor-like protein kinase [Arabidopsis
  misc_feature (283)..(688): Homolog of NCBI NO: 9758831 NR Description: receptor-like protein kinase [Arabidopsis
  misc_feature (1)..(313): Homolog of NCBI NO: 15238489 NR Description: serine/threonine-specific protein kinase - like;
  misc_feature (283)..(688): Homolog of NCBI NO: 15238489 NR Description: serine/threonine-specific protein kinase - like;
  misc_feature (1)..(316): Homolog of NCBI NO: 9294681 NR Description: receptor-like protein kinase [Arabidopsis
  misc_feature (227)..(688): Homolog of NCBI NO: 9294681 NR Description: receptor-like protein kinase [Arabidopsis
MRTGSYTTVSGSLKTYRRLYFKKSGSRLRYSKDVYDRSWFPRFMDEWTQISTALGVINTNIYQPPEDALKNAATPTDASAPLTFKWNSEKLDVQYYFYAHYAEIQDLQANDTREFNILLNGQNLSVTGPEVPDKLSIKTFQSSSPISCNGWACNFQLIRTKRSTLPPLLNALEVYTVIQFPRSETDESDVVAMKNISASYGLSRINWQGDPCFPQQLRWDALDCTNRNISQPPRITSLNLSSSRLNGTIAAAIQSITQLETLDLSYNNLTGEVPEFLGKMKSLNLSGNNLNGSIPQALRKKRLKLYLEGNPRLIKPPKKEFPVAIVTLVVFVTVIVVLFLVFRKKMSTIVKGLRLPPRTSMVDVTFSNKKSKRFTYSEVVQVTKNFQRVLGKGGFGMVYHGTVKGSEQVAVKVLSQSSTQGSKEFKAEVDLLLRVHHTNLVSLVGYCCEGDYLALVYEFLPNGDLKQHLSGKGGNSIINWSIRLRIALEAALGLEYLHIGCTPPMVHRDVKTANILLDENFKAKLADFGLSRSFQGEGESQESTTIAGTLGYLDPECYHSGRLGEKSDVYSFGIVLLEMITNQPVINQTSGDSHITQWVGFQMNRGDILEIMDPNLRKDYNINSAWRALELAMSCAYPSSSKRPSMSQVIHELKECIACENTGISKNRSLEYQEMNVSLDTTAVPMAR

SEQ ID NO: 78588 - protein, 645 aa, Arabidopsis thaliana
  peptide (1)..(645): Ceres Seq. ID no. 12642935
  misc_feature (1)..(325): Homolog of NCBI NO: 9758834 NR Description: receptor-like protein kinase [Arabidopsis
  misc_feature (240)..(645): Homolog of NCBI NO: 9758834 NR Description: receptor-like protein kinase [Arabidopsis
  misc_feature (1)..(325): Homolog of NCBI NO: 15238493 NR Description: serine/threonine-specific protein kinase - like;
  misc_feature (240)..(645): Homolog of NCBI NO: 15238493 NR Description: serine/threonine-specific protein kinase - like;
  misc_feature (1)..(314): Homolog of NCBI NO: 9758831 NR Description: receptor-like protein kinase [Arabidopsis
  misc_feature (240)..(645): Homolog of NCBI NO: 9758831 NR Description: receptor-like protein kinase [Arabidopsis
  misc_feature (1)..(270): Homolog of NCBI NO: 15238489 NR Description: serine/threonine-specific protein kinase - like;
  misc_feature (240)..(645): Homolog of NCBI NO: 15238489 NR Description: serine/threonine-specific protein kinase - like;
  misc_feature (1)..(273): Homolog of NCBI NO: 9294681 NR Description: receptor-like protein kinase [Arabidopsis
  misc_feature (184)..(645): Homolog of NCBI NO: 9294681 NR Description: receptor-like protein kinase [Arabidopsis
MDEWTQISTALGVINTNIYQPPEDALKNAATPTDASAPLTFKWNSEKLDVQYYFYAHYAEIQDLQANDTREFNILLNGQNLSVTGPEVPDKLSIKTFQSSSPISCNGWACNFQLIRTKRSTLPPLLNALEVYTVIQFPRSETDESDVVAMKNISASYGLSRINWQGDPCFPQQLRWDALDCTNRNISQPPRITSLNLSSSRLNGTIAAAIQSITQLETLDLSYNNLTGEVPEFLGKMKSLNLSGNNLNGSIPQALRKKRLKLYLEGNPRLIKPPKKEFPVAIVTLVVFVTVIVVLFLVFRKKMSTIVKGLRLPPRTSMVDVTFSNKKSKRFTYSEVVQVTKNFQRVLGKGGFGMVYHGTVKGSEQVAVKVLSQSSTQGSKEFKAEVDLLLRVHHTNLVSLVGYCCEGDYLALVYEFLPNGDLKQHLSGKGGNSIINWSIRLRIALEAALGLEYLHIGCTPPMVHRDVKTANILLDENFKAKLADFGLSRSFQGEGESQESTTIAGTLGYLDPECYHSGRLGEKSDVYSFGIVLLEMITNQPVINQTSGDSHITQWVGFQMNRGDILEIMDPNLRKDYNINSAWRALELAMSCAYPSSSKRPSMSQVIHELKECIACENTGISKNRSLEYQEMNVSLDTTAVPMAR

SEQ ID NO: 78589 - DNA, 2484 bp, Arabidopsis thaliana
  misc_feature (1)..(2484): Ceres Seq. ID no. 12642936
  misc_feature: MA Experiment ID: 20000166 Result: Down-regulated in Transcription
  misc_feature: MA Experiment 20000166 PARAMETER Experiment Name: At_100uM_ABA_P Parameter: Age (day) Value: 14
  misc_feature: MA Experiment 20000166 PARAMETER Experiment Name: At_100uM_ABA_P Parameter: Organism Value: A. thaliana
  misc_feature: MA Experiment 20000166 PARAMETER Experiment Name: At_100uM_ABA_P Parameter: Plant Line Value: WS
  misc_feature: MA Experiment 20000166 PARAMETER Experiment Name: At_100uM_ABA_P Parameter: Timepoint (hr) Value: 1
  misc_feature: MA Experiment 20000166 PARAMETER Experiment Name: At_100uM_ABA_P Parameter: Tissue Value: Aerial
  misc_feature: MA Experiment 20000166 PARAMETER Experiment Name: At_100uM_ABA_P Parameter: Treatment Value: 100uM ABA vs. No Treatment
  misc_feature: MA Experiment ID: 20000179 Result: Up-regulated in Transcription
  misc_feature: MA Experiment 20000179 PARAMETER Experiment Name: At_Germinating_Seeds_P Parameter: Age (hr) Value: 6 vs. 0
  misc_feature: MA Experiment 20000179 PARAMETER Experiment Name: At_Germinating_Seeds_P Parameter: Tissue Value: Germinating Seeds
  misc_feature: MA Experiment ID: 20000180 Result: Up-regulated in Transcription
  misc_feature: MA Experiment 20000180 PARAMETER Experiment Name: At_Germinating_Seeds_P Parameter: Age (hr) Value: 24 vs. 0
  misc_feature: MA Experiment 20000180 PARAMETER Experiment Name: At_Germinating_Seeds_P Parameter: Tissue Value: Germinating Seeds
  misc_feature: MA Experiment ID: 20000185 Result: Up-regulated in Transcription
  misc_feature: MA Experiment 20000185 PARAMETER Experiment Name: At_Roots__P Parameter: Age (day) Value: 7 vs. 21
  misc_feature: MA Experiment 20000185 PARAMETER Experiment Name: At_Roots__P Parameter: Organism Value: A. thaliana
  misc_feature: MA Experiment 20000185 PARAMETER Experiment Name: At_Roots__P Parameter: Tissue Value: Roots vs. Whole Plant
  misc_feature: MA Experiment ID: 20000235 Result: Down-regulated in Transcription
  misc_feature: MA Experiment 20000235 PARAMETER Experiment Name: At_Siliques_P Parameter: Age (day) Value: 21
  misc_feature: MA Experiment 20000235 PARAMETER Experiment Name: At_Siliques_P Parameter: Organism Value: A. thaliana
  misc_feature: MA Experiment 20000235 PARAMETER Experiment Name: At_Siliques_P Parameter: Plant Line Value: WS
  misc_feature: MA Experiment 20000235 PARAMETER Experiment Name: At_Siliques_P Parameter: Tissue Value: 5-10mm Siliques vs. Whole Plant
  misc_feature: MA Experiment ID: 20000439 Result: Up-regulated in Transcription
  misc_feature: MA Experiment 20000439 PARAMETER Experiment Name: At_Roots__P Parameter: Age (day) Value: 14 vs. 21
  misc_feature: MA Experiment 20000439 PARAMETER Experiment Name: At_Roots__P Parameter: Organism Value: A. thaliana
  misc_feature: MA Experiment 20000439 PARAMETER Experiment Name: At_Roots__P Parameter: Tissue Value: Roots vs. Whole Plant
  misc_feature: MA Experiment ID: 20000460 Result: Down-regulated in Transcription
  misc_feature: MA Experiment 20000460 PARAMETER Experiment Name: At_10percent_PEG_P Parameter: Age (day) Value: 12
  misc_feature: MA Experiment 20000460 PARAMETER Experiment Name: At_10percent_PEG_P Parameter: Organism Value: A. thaliana
  misc_feature: MA Experiment 20000460 PARAMETER Experiment Name: At_10percent_PEG_P Parameter: Plant Line Value: WS
  misc_feature: MA Experiment 20000460 PARAMETER Experiment Name: At_10percent_PEG_P Parameter: Timepoint (day) Value: 12
  misc_feature: MA Experiment 20000460 PARAMETER Experiment Name: At_10percent_PEG_P Parameter: Tissue Value: Whole Plant
  misc_feature: MA Experiment 20000460 PARAMETER Experiment Name: At_10percent_PEG_P Parameter: Treatment Value: 10percent PEG vs. No Treatment
  misc_feature: MA Experiment ID: 20001451 Result: Up-regulated in Transcription
  misc_feature: MA Experiment 20001451 PARAMETER Experiment Name: At_Far-red-induction_P Parameter: Age (day) Value: 7
  misc_feature: MA Experiment 20001451 PARAMETER Experiment Name: At_Far-red-induction_P Parameter: Light Value: Far-red vs. White
  misc_feature: MA Experiment 20001451 PARAMETER Experiment Name: At_Far-red-induction_P Parameter: Organism Value: A. thaliana
  misc_feature: MA Experiment 20001451 PARAMETER Experiment Name: At_Far-red-induction_P Parameter: Plant Line Value: Columbia
  misc_feature: MA Experiment 20001451 PARAMETER Experiment Name: At_Far-red-induction_P Parameter: Timepoint (hr) Value: 24
  misc_feature: MA Experiment 20001451 PARAMETER Experiment Name: At_Far-red-induction_P Parameter: Tissue Value: Whole Plant
  misc_feature: MA Experiment ID: 20001554 Result: Down-regulated in Transcription
  misc_feature: MA Experiment 20001554 PARAMETER Experiment Name: At_Drought_Soil_Dry_P Parameter: Age (day) Value: 21
  misc_feature: MA Experiment 20001554 PARAMETER Experiment Name: At_Drought_Soil_Dry_P Parameter: Organism Value: A. thaliana
  misc_feature: MA Experiment 20001554 PARAMETER Experiment Name: At_Drought_Soil_Dry_P Parameter: Plant Line Value: WS
  misc_feature: MA Experiment 20001554 PARAMETER Experiment Name: At_Drought_Soil_Dry_P Parameter: Post Timepoint (hr) Value: None
  misc_feature: MA Experiment 20001554 PARAMETER Experiment Name: At_Drought_Soil_Dry_P Parameter: Post-Treatment Value: None
  misc_feature: MA Experiment 20001554 PARAMETER Experiment Name: At_Drought_Soil_Dry_P Parameter: Timepoint (day) Value: 7
  misc_feature: MA Experiment 20001554 PARAMETER Experiment Name: At_Drought_Soil_Dry_P Parameter: Treatment Value: Drought vs. No Drought
  misc_feature: MA Experiment ID: 20001555 Result: Down-regulated in Transcription
  misc_feature: MA Experiment 20001555 PARAMETER Experiment Name: At_Drought_Soil_Dry_P Parameter: Age (day) Value: 24
  misc_feature: MA Experiment 20001555 PARAMETER Experiment Name: At_Drought_Soil_Dry_P Parameter: Organism Value: A. thaliana
  misc_feature: MA Experiment 20001555 PARAMETER Experiment Name: At_Drought_Soil_Dry_P Parameter: Plant Line Value: WS
  misc_feature: MA Experiment 20001555 PARAMETER Experiment Name: At_Drought_Soil_Dry_P Parameter: Post Timepoint (hr) Value: None
  misc_feature: MA Experiment 20001555 PARAMETER Experiment Name: At_Drought_Soil_Dry_P Parameter: Post-Treatment Value: None
  misc_feature: MA Experiment 20001555 PARAMETER Experiment Name: At_Drought_Soil_Dry_P Parameter: Timepoint (day) Value: 10
  misc_feature: MA Experiment 20001555 PARAMETER Experiment Name: At_Drought_Soil_Dry_P Parameter: Treatment Value: Drought vs. No Drought
  misc_feature: MA Experiment ID: 20001556 Result: Down-regulated in Transcription
  misc_feature: MA Experiment 20001556 PARAMETER Experiment Name: At_Drought_Soil_Dry_P Parameter: Age (day) Value: 26
  misc_feature: MA Experiment 20001556 PARAMETER Experiment Name: At_Drought_Soil_Dry_P Parameter: Organism Value: A. thaliana
  misc_feature: MA Experiment 20001556 PARAMETER Experiment Name: At_Drought_Soil_Dry_P Parameter: Plant Line Value: WS
  misc_feature: MA Experiment 20001556 PARAMETER Experiment Name: At_Drought_Soil_Dry_P Parameter: Post Timepoint (hr) Value: None
  misc_feature: MA Experiment 20001556 PARAMETER Experiment Name: At_Drought_Soil_Dry_P Parameter: Post-Treatment Value: None
  misc_feature: MA Experiment 20001556 PARAMETER Experiment Name: At_Drought_Soil_Dry_P Parameter: Timepoint (day) Value: 12
  misc_feature: MA Experiment 20001556 PARAMETER Experiment Name: At_Drought_Soil_Dry_P Parameter: Treatment Value: Drought vs. No Drought
  misc_feature: MA Experiment ID: 20001560 Result: Down-regulated in Transcription
  misc_feature: MA Experiment 20001560 PARAMETER Experiment Name: At_Drought_Soil_Dry_P Parameter: Age (day) Value: 28
  misc_feature: MA Experiment 20001560 PARAMETER Experiment Name: At_Drought_Soil_Dry_P Parameter: Organism Value: A. thaliana
  misc_feature: MA Experiment 20001560 PARAMETER Experiment Name: At_Drought_Soil_Dry_P Parameter: Plant Line Value: WS
  misc_feature: MA Experiment 20001560 PARAMETER Experiment Name: At_Drought_Soil_Dry_P Parameter: Post Timepoint (hr) Value: None
  misc_feature: MA Experiment 20001560 PARAMETER Experiment Name: At_Drought_Soil_Dry_P Parameter: Post-Treatment Value: None
  misc_feature: MA Experiment 20001560 PARAMETER Experiment Name: At_Drought_Soil_Dry_P Parameter: Timepoint (day) Value: 14
  misc_feature: MA Experiment 20001560 PARAMETER Experiment Name: At_Drought_Soil_Dry_P Parameter: Treatment Value: Drought vs. No Drought
  misc_feature: MA Experiment ID: 20001757 Result: Up-regulated in Transcription
  misc_feature: MA Experiment 20001757 PARAMETER Experiment Name: At_50mM_NH4NO3_L-to-H_P Parameter: Timepoint (hr) Value: 6
  misc_feature: MA Experiment 20001757 PARAMETER Experiment Name: At_50mM_NH4NO3_L-to-H_P Parameter: Tissue Value: Leaf
  misc_feature: MA Experiment 20001757 PARAMETER Experiment Name: At_50mM_NH4NO3_L-to-H_P Parameter: Treatment Value: 50mM NH4NO3 vs 100mM Mannitol
  misc_feature: MA Experiment ID: 20001904 Result: Down-regulated in Transcription
  misc_feature: MA Experiment 20001904 PARAMETER Experiment Name: At_Drought_Reproduction_P Parameter: Age (day) Value: 37
  misc_feature: MA Experiment 20001904 PARAMETER Experiment Name: At_Drought_Reproduction_P Parameter: Organism Value: A. thaliana
  misc_feature: MA Experiment 20001904 PARAMETER Experiment Name: At_Drought_Reproduction_P Parameter: Plant Line Value: WS
  misc_feature: MA Experiment 20001904 PARAMETER Experiment Name: At_Drought_Reproduction_P Parameter: Timepoint (day) Value: 7
  misc_feature: MA Experiment 20001904 PARAMETER Experiment Name: At_Drought_Reproduction_P Parameter: Tissue Value: Rosettes
  misc_feature: MA Experiment 20001904 PARAMETER Experiment Name: At_Drought_Reproduction_P Parameter: Treatment Value: Drought vs. No Drought
atggagaggtctcttgagctcttgttgctccttatcagaactttggccatcattcatatttctcaagctcaaagccaacaagggttcatcagtttggattgtggtctacccgcgaatgaaccatctccttatacagagccgaggactggattgcagttttcttcggacgcagcattcatccagagtggaaaaattggtaggattcaagcaaatctggaggctgacttcctgaagccatcaacgacgatgagatattttccagacggaaaacggaactgctacaatctaaacgttgagaagggaagaaatcatcttatcagggctcggtttgtatatggaaattatgatggtcgtgacactggccccaagtttgatctgtatcttggacctaatccatgggccacgatagatttggcaaaacaagtgaatggtacacgtcccgagatcatgcacatcccaacatcaaacaagttgcaggtttgtcttgttaagactggggaaactacaccgctaatatcggttttggaagtacggccgatgggaagtggtacttatctcaccaagtctggctctctgaaactttactatcgagaatattttagcaagtctgattcttctctaaggtaccctgatgatatctatgaccgccaatggacttcgttctttgatacagagtggacacaaattaacaccactagcgatgtgggaaattccaatgactataagccaccaaaagtcgctctcactactgcggccattccaactaatgccagtgcgccattgacgaatgaatggagttcagtaaaccccgatgaacagtattacgtatacgcccatttttctgagatccaagagttgcaggcaaatgaaaccagggaattcaacatgttactaaatgggaaacttttttttggccctgtggttcctccaaagctagcaataagtactatcctaagtgtgtcgccgaatacttgtgaaggaggggagtgcaatttacagctgataagaaccaacagatcaactcttccacctctacttaacgcttatgaggtctacaaagttattcagtttccgcagttggaaacaaatgaaaccgacgtttctgctgtgaaaaacatccaagccacctatgaattgagtagaatcaactggcaaagcgatccatgcgtccctcaacagtttatgtgggatggtttaaactgcagcatcacagatataaccacgccaccaagaatcactactttggacttgtcgaataataacttgaccggagaggtgccagaatttctaagcaacatgaaatcgctaaacttaagcgggaacgatcttaacggtacaattcctcaatctctacaaaggaaaggacttgagctactttatcaaggaaaccccaggcttatttcccctggttcaactgaaaccaaatctggcaagagctttccagtaacaatagttgcatcagttggttctgcagccattcttattgttgtgctggttcttgtactttttctccgaaagaaaaagccgtcggctgttgaagaggttacgaaaatgactaataatttcggaagagttgtaggggaaggaggatttggcgttgtctgccatggtactgtaaatggttctgaacaggtggctgttaaactactttcacaatcatcaactcaaggctataaagagttcaaggcagaggttgatcttcttctgagagttcaccatacgaatttggtaagccttgtcggatattgtgatgaaggagaccacttggcccttatctacgagtttgtacccaatggagacttaagacaacatttgtctggaaaaggaggtaaacccatcgtcaattggggtactcggctaagaatagcggcggaggcagcactaggtttggagtacttacacattggatgcacaccaccaatggttcatagagatgtcaaaactacaaacatattgctggacgagcattataaggccaaacttgctgattttgggctctcgagatctttccctgttggaggtgaatctcatgtttcgacggtgattgctggtactcctggttaccttgatccagaatattaccatacaagtcggttgagtgagaaaagtgatgtttacagtttcgggattgttttattagagatgatcacaaaccaagcagtgattgatcgaaaccgcagaaagtctcacataacacaatgggtagggtctgagcttaacggaggagatattgctaagatcatggatctaaagcttaacggtgattatgattctcgttctgcgtggagagctcttgagctagcaatgtcgtgcgcggatcctacctcagcaagacgaccaaccatgtctcatgttgttattgaactaaaagagtgtctcgtgtctgaaaactcgaggagaaatatgagtcgaggcatggatacactaagttcccctgaagtgagcatgatctttgatgctgagatgattcccagagcaagatag

SEQ ID NO: 78590 - protein, 827 aa, Arabidopsis thaliana
  peptide (1)..(827): Ceres Seq. ID no. 12642937
  misc_feature (12)..(469): Homolog of NCBI NO: 9758831 NR Description: receptor-like protein kinase [Arabidopsis
  misc_feature (506)..(827): Homolog of NCBI NO: 9758831 NR Description: receptor-like protein kinase [Arabidopsis
  misc_feature (1)..(469): Homolog of NCBI NO: 15238489 NR Description: serine/threonine-specific protein kinase - like;
  misc_feature (506)..(827): Homolog of NCBI NO: 15238489 NR Description: serine/threonine-specific protein kinase - like;
  misc_feature (9)..(451): Homolog of NCBI NO: 9294681 NR Description: receptor-like protein kinase [Arabidopsis
  misc_feature (504)..(827): Homolog of NCBI NO: 9294681 NR Description: receptor-like protein kinase [Arabidopsis
  misc_feature (415)..(515): Homolog of NCBI NO: 9294681 NR Description: receptor-like protein kinase [Arabidopsis
  misc_feature (1)..(463): Homolog of NCBI NO: 22327979 NR Description: serine/threonine-specific protein kinase - like; id: At5g59670.1, supported by cDNA: gi_20466279 [Arabidopsis
  misc_feature (498)..(827): Homolog of NCBI NO: 22327979 NR Description: serine/threonine-specific protein kinase - like; id: At5g59670.1, supported by cDNA: gi_20466279 [Arabidopsis
  misc_feature (5)..(451): Homolog of NCBI NO: 25387148 NR Description: probable protein kinase [imported] - Arabidopsis >gi|9802795|gb|AAF99864.1|AC015448_14 Putative protein kinase
MERSLELLLLLIRTLAIIHISQAQSQQGFISLDCGLPANEPSPYTEPRTGLQFSSDAAFIQSGKIGRIQANLEADFLKPSTTMRYFPDGKRNCYNLNVEKGRNHLIRARFVYGNYDGRDTGPKFDLYLGPNPWATIDLAKQVNGTRPEIMHIPTSNKLQVCLVKTGETTPLISVLEVRPMGSGTYLTKSGSLKLYYREYFSKSDSSLRYPDDIYDRQWTSFFDTEWTQINTTSDVGNSNDYKPPKVALTTAAIPTNASAPLTNEWSSVNPDEQYYVYAHFSEIQELQANETREFNMLLNGKLFFGPVVPPKLAISTILSVSPNTCEGGECNLQLIRTNRSTLPPLLNAYEVYKVIQFPQLETNETDVSAVKNIQATYELSRINWQSDPCVPQQFMWDGLNCSITDITTPPRITTLDLSNNNLTGEVPEFLSNMKSLNLSGNDLNGTIPQSLQRKGLELLYQGNPRLISPGSTETKSGKSFPVTIVASVGSAAILIVVLVLVLFLRKKKPSAVEEVTKMTNNFGRVVGEGGFGVVCHGTVNGSEQVAVKLLSQSSTQGYKEFKAEVDLLLRVHHTNLVSLVGYCDEGDHLALIYEFVPNGDLRQHLSGKGGKPIVNWGTRLRIAAEAALGLEYLHIGCTPPMVHRDVKTTNILLDEHYKAKLADFGLSRSFPVGGESHVSTVIAGTPGYLDPEYYHTSRLSEKSDVYSFGIVLLEMITNQAVIDRNRRKSHITQWVGSELNGGDIAKIMDLKLNGDYDSRSAWRALELAMSCADPTSARRPTMSHVVIELKECLVSENSRRNMSRGMDTLSSPEVSMIFDAEMIPRAR

SEQ ID NO: 78591 - protein, 745 aa, Arabidopsis thaliana
  peptide (1)..(745): Ceres Seq. ID no. 12642938
  misc_feature (1)..(387): Homolog of NCBI NO: 9758831 NR Description: receptor-like protein kinase [Arabidopsis
  misc_feature (424)..(745): Homolog of NCBI NO: 9758831 NR Description: receptor-like protein kinase [Arabidopsis
  misc_feature (1)..(387): Homolog of NCBI NO: 15238489 NR Description: serine/threonine-specific protein kinase - like;
  misc_feature (424)..(745): Homolog of NCBI NO: 15238489 NR Description: serine/threonine-specific protein kinase - like;
  misc_feature (1)..(369): Homolog of NCBI NO: 9294681 NR Description: receptor-like protein kinase [Arabidopsis
  misc_feature (422)..(745): Homolog of NCBI NO: 9294681 NR Description: receptor-like protein kinase [Arabidopsis
  misc_feature (333)..(433): Homolog of NCBI NO: 9294681 NR Description: receptor-like protein kinase [Arabidopsis
  misc_feature (1)..(381): Homolog of NCBI NO: 22327979 NR Description: serine/threonine-specific protein kinase - like; id: At5g59670.1, supported by cDNA: gi_20466279 [Arabidopsis
  misc_feature (416)..(745): Homolog of NCBI NO: 22327979 NR Description: serine/threonine-specific protein kinase - like; id: At5g59670.1, supported by cDNA: gi_20466279 [Arabidopsis
  misc_feature (1)..(369): Homolog of NCBI NO: 25387148 NR Description: probable protein kinase [imported] - Arabidopsis >gi|9802795|gb|AAF99864.1|AC015448_14 Putative protein kinase
MRYFPDGKRNCYNLNVEKGRNHLIRARFVYGNYDGRDTGPKFDLYLGPNPWATIDLAKQVNGTRPEIMHIPTSNKLQVCLVKTGETTPLISVLEVRPMGSGTYLTKSGSLKLYYREYFSKSDSSLRYPDDIYDRQWTSFFDTEWTQINTTSDVGNSNDYKPPKVALTTAAIPTNASAPLTNEWSSVNPDEQYYVYAHFSEIQELQANETREFNMLLNGKLFFGPVVPPKLAISTILSVSPNTCEGGECNLQLIRTNRSTLPPLLNAYEVYKVIQFPQLETNETDVSAVKNIQATYELSRINWQSDPCVPQQFMWDGLNCSITDITTPPRITTLDLSNNNLTGEVPEFLSNMKSLNLSGNDLNGTIPQSLQRKGLELLYQGNPRLISPGSTETKSGKSFPVTIVASVGSAAILIVVLVLVLFLRKKKPSAVEEVTKMTNNFGRVVGEGGFGVVCHGTVNGSEQVAVKLLSQSSTQGYKEFKAEVDLLLRVHHTNLVSLVGYCDEGDHLALIYEFVPNGDLRQHLSGKGGKPIVNWGTRLRIAAEAALGLEYLHIGCTPPMVHRDVKTTNILLDEHYKAKLADFGLSRSFPVGGESHVSTVIAGTPGYLDPEYYHTSRLSEKSDVYSFGIVLLEMITNQAVIDRNRRKSHITQWVGSELNGGDIAKIMDLKLNGDYDSRSAWRALELAMSCADPTSARRPTMSHVVIELKECLVSENSRRNMSRGMDTLSSPEVSMIFDAEMIPRAR

SEQ ID NO: 78592 - protein, 678 aa, Arabidopsis thaliana
  peptide (1)..(678): Ceres Seq. ID no. 12642939
  misc_feature (1)..(320): Homolog of NCBI NO: 9758831 NR Description: receptor-like protein kinase [Arabidopsis
  misc_feature (357)..(678): Homolog of NCBI NO: 9758831 NR Description: receptor-like protein kinase [Arabidopsis
  misc_feature (1)..(320): Homolog of NCBI NO: 15238489 NR Description: serine/threonine-specific protein kinase - like;
  misc_feature (357)..(678): Homolog of NCBI NO: 15238489 NR Description: serine/threonine-specific protein kinase - like;
  misc_feature (1)..(302): Homolog of NCBI NO: 9294681 NR Description: receptor-like protein kinase [Arabidopsis
  misc_feature (355)..(678): Homolog of NCBI NO: 9294681 NR Description: receptor-like protein kinase [Arabidopsis
  misc_feature (266)..(366): Homolog of NCBI NO: 9294681 NR Description: receptor-like protein kinase [Arabidopsis
  misc_feature (1)..(314): Homolog of NCBI NO: 22327979 NR Description: serine/threonine-specific protein kinase - like; id: At5g59670.1, supported by cDNA: gi_20466279 [Arabidopsis
  misc_feature (349)..(678): Homolog of NCBI NO: 22327979 NR Description: serine/threonine-specific protein kinase - like; id: At5g59670.1, supported by cDNA: gi_20466279 [Arabidopsis
  misc_feature (1)..(302): Homolog of NCBI NO: 25387148 NR Description: probable protein kinase [imported] - Arabidopsis >gi|9802795|gb|AAF99864.1|AC015448_14 Putative protein kinase
MHIPTSNKLQVCLVKTGETTPLISVLEVRPMGSGTYLTKSGSLKLYYREYFSKSDSSLRYPDDIYDRQWTSFFDTEWTQINTTSDVGNSNDYKPPKVALTTAAIPTNASAPLTNEWSSVNPDEQYYVYAHFSEIQELQANETREFNMLLNGKLFFGPVVPPKLAISTILSVSPNTCEGGECNLQLIRTNRSTLPPLLNAYEVYKVIQFPQLETNETDVSAVKNIQATYELSRINWQSDPCVPQQFMWDGLNCSITDITTPPRITTLDLSNNNLTGEVPEFLSNMKSLNLSGNDLNGTIPQSLQRKGLELLYQGNPRLISPGSTETKSGKSFPVTIVASVGSAAILIVVLVLVLFLRKKKPSAVEEVTKMTNNFGRVVGEGGFGVVCHGTVNGSEQVAVKLLSQSSTQGYKEFKAEVDLLLRVHHTNLVSLVGYCDEGDHLALIYEFVPNGDLRQHLSGKGGKPIVNWGTRLRIAAEAALGLEYLHIGCTPPMVHRDVKTTNILLDEHYKAKLADFGLSRSFPVGGESHVSTVIAGTPGYLDPEYYHTSRLSEKSDVYSFGIVLLEMITNQAVIDRNRRKSHITQWVGSELNGGDIAKIMDLKLNGDYDSRSAWRALELAMSCADPTSARRPTMSHVVIELKECLVSENSRRNMSRGMDTLSSPEVSMIFDAEMIPRAR

SEQ ID NO: 78593 - DNA, 697 bp, Arabidopsis thaliana
  misc_feature (1)..(697): Ceres Seq. ID no. 12642943
  misc_feature: MA Experiment ID: 108576 Result: Up-regulated in Transcription
  misc_feature: MA Experiment 108576 PARAMETER Experiment Name: At_42deg_Heat_cDNA_P Parameter: Temperature (deg C) Value: 42 vs. 22
  misc_feature: MA Experiment 108576 PARAMETER Experiment Name: At_42deg_Heat_cDNA_P Parameter: Timepoint (hr) Value: 1
  misc_feature: MA Experiment 108576 PARAMETER Experiment Name: At_42deg_Heat_cDNA_P Parameter: Tissue Value: Aerial
  misc_feature: MA Experiment ID: 108577 Result: Up-regulated in Transcription
  misc_feature: MA Experiment 108577 PARAMETER Experiment Name: At_42deg_Heat_cDNA_P Parameter: Temperature (deg C) Value: 42 vs. 22
  misc_feature: MA Experiment 108577 PARAMETER Experiment Name: At_42deg_Heat_cDNA_P Parameter: Timepoint (hr) Value: 6
  misc_feature: MA Experiment 108577 PARAMETER Experiment Name: At_42deg_Heat_cDNA_P Parameter: Tissue Value: Aerial
  misc_feature: MA Experiment ID: 108595 Result: Up-regulated in Transcription
  misc_feature: MA Experiment 108595 PARAMETER Experiment Name: At_Ler-pi_Ovule_cDNA_P Parameter: Plant Line Value: null
  misc_feature: MA Experiment ID: 108668 Result: Up-regulated in Transcription
  misc_feature: MA Experiment 108668 PARAMETER Experiment Name: At_2mM_SA_cDNA_P Parameter: Plant Line Value: WS
  misc_feature: MA Experiment 108668 PARAMETER Experiment Name: At_2mM_SA_cDNA_P Parameter: Timepoint (hr) Value: 6
  misc_feature: MA Experiment 108668 PARAMETER Experiment Name: At_2mM_SA_cDNA_P Parameter: Treatment Value: 2mM SA vs. No Treatment
  misc_feature: MA Experiment ID: 20000089 Result: Up-regulated in Transcription
  misc_feature: MA Experiment ID: 20000093 Result: Up-regulated in Transcription
  misc_feature: MA Experiment 20000093 PARAMETER Experiment Name: At_42deg_Heat_cDNA_P Parameter: Temperature (deg C) Value: 42 vs. 22
  misc_feature: MA Experiment 20000093 PARAMETER Experiment Name: At_42deg_Heat_cDNA_P Parameter: Timepoint (hr) Value: 0.5
  misc_feature: MA Experiment 20000093 PARAMETER Experiment Name: At_42deg_Heat_cDNA_P Parameter: Tissue Value: Aerial
  misc_feature: MA Experiment ID: 20000112 Result: Up-regulated in Transcription
  misc_feature: MA Experiment 20000112 PARAMETER Experiment Name: At_42deg_Heat_cDNA_P Parameter: Temperature (deg C) Value: 42 vs. 22
  misc_feature: MA Experiment 20000112 PARAMETER Experiment Name: At_42deg_Heat_cDNA_P Parameter: Timepoint (hr) Value: 2
  misc_feature: MA Experiment 20000112 PARAMETER Experiment Name: At_42deg_Heat_cDNA_P Parameter: Tissue Value: Aerial
  misc_feature: MA Experiment ID: 20000113 Result: Up-regulated in Transcription
  misc_feature: MA Experiment 20000113 PARAMETER Experiment Name: At_42deg_Heat_cDNA_P Parameter: Temperature (deg C) Value: 42 vs. 22
  misc_feature: MA Experiment 20000113 PARAMETER Experiment Name: At_42deg_Heat_cDNA_P Parameter: Timepoint (hr) Value: 8
  misc_feature: MA Experiment 20000113 PARAMETER Experiment Name: At_42deg_Heat_cDNA_P Parameter: Tissue Value: Aerial
  misc_feature: MA Experiment ID: 20000144 Result: Up-regulated in Transcription
  misc_feature: MA Experiment 20000144 PARAMETER Experiment Name: At_42deg_Heat_cDNA_P Parameter: Temperature (deg C) Value: 42 vs. 22
  misc_feature: MA Experiment 20000144 PARAMETER Experiment Name: At_42deg_Heat_cDNA_P Parameter: Timepoint (hr) Value: 1
  misc_feature: MA Experiment 20000144 PARAMETER Experiment Name: At_42deg_Heat_cDNA_P Parameter: Tissue Value: Aerial
  misc_feature: MA Experiment ID: 20000171 Result: Up-regulated in Transcription
  misc_feature: MA Experiment 20000171 PARAMETER Experiment Name: At_42deg_Heat_P Parameter: Age (day) Value: 14
  misc_feature: MA Experiment 20000171 PARAMETER Experiment Name: At_42deg_Heat_P Parameter: Organism Value: A. thaliana
  misc_feature: MA Experiment 20000171 PARAMETER Experiment Name: At_42deg_Heat_P Parameter: Plant Line Value: WS
  misc_feature: MA Experiment 20000171 PARAMETER Experiment Name: At_42deg_Heat_P Parameter: Temperature (deg C) Value: 42 vs. 22
  misc_feature: MA Experiment 20000171 PARAMETER Experiment Name: At_42deg_Heat_P Parameter: Timepoint (hr) Value: 1
  misc_feature: MA Experiment 20000171 PARAMETER Experiment Name: At_42deg_Heat_P Parameter: Tissue Value: Aerial
  misc_feature: MA Experiment ID: 20000173 Result: Up-regulated in Transcription
  misc_feature: MA Experiment 20000173 PARAMETER Experiment Name: At_42deg_Heat_P Parameter: Age (day) Value: 14
  misc_feature: MA Experiment 20000173 PARAMETER Experiment Name: At_42deg_Heat_P Parameter: Organism Value: A. thaliana
  misc_feature: MA Experiment 20000173 PARAMETER Experiment Name: At_42deg_Heat_P Parameter: Plant Line Value: WS
  misc_feature: MA Experiment 20000173 PARAMETER Experiment Name: At_42deg_Heat_P Parameter: Temperature (deg C) Value: 42 vs. 22
  misc_feature: MA Experiment 20000173 PARAMETER Experiment Name: At_42deg_Heat_P Parameter: Timepoint (hr) Value: 6
  misc_feature: MA Experiment 20000173 PARAMETER Experiment Name: At_42deg_Heat_P Parameter: Tissue Value: Aerial
  misc_feature: MA Experiment ID: 20000182 Result: Up-regulated in Transcription
  misc_feature: MA Experiment 20000182 PARAMETER Experiment Name: At_2mM_SA_P Parameter: Age (day) Value: 14
  misc_feature: MA Experiment 20000182 PARAMETER Experiment Name: At_2mM_SA_P Parameter: Organism Value: A. thaliana
  misc_feature: MA Experiment 20000182 PARAMETER Experiment Name: At_2mM_SA_P Parameter: Plant Line Value: WS
  misc_feature: MA Experiment 20000182 PARAMETER Experiment Name: At_2mM_SA_P Parameter: Timepoint (hr) Value: 6
  misc_feature: MA Experiment 20000182 PARAMETER Experiment Name: At_2mM_SA_P Parameter: Tissue Value: Aerial
  misc_feature: MA Experiment 20000182 PARAMETER Experiment Name: At_2mM_SA_P Parameter: Treatment Value: 2mM SA vs. No Treatment
  misc_feature: MA Experiment ID: 20000227 Result: Down-regulated in Transcription
  misc_feature: MA Experiment 20000227 PARAMETER Experiment Name: At_Root-Tips-vs-Tops_P Parameter: Tissue Value: Root Tips vs. Root Tops
  misc_feature: MA Experiment ID: 20000436 Result: Up-regulated in Transcription
  misc_feature: MA Experiment 20000436 PARAMETER Experiment Name: At_Drought_P Parameter: Age (day) Value: 7
  misc_feature: MA Experiment 20000436 PARAMETER Experiment Name: At_Drought_P Parameter: Organism Value: A. thaliana
  misc_feature: MA Experiment 20000436 PARAMETER Experiment Name: At_Drought_P Parameter: Plant Line Value: WS
  misc_feature: MA Experiment 20000436 PARAMETER Experiment Name: At_Drought_P Parameter: Timepoint (hr) Value: 12
  misc_feature: MA Experiment 20000436 PARAMETER Experiment Name: At_Drought_P Parameter: Tissue Value: Whole Plant
  misc_feature: MA Experiment 20000436 PARAMETER Experiment Name: At_Drought_P Parameter: Treatment Value: Drought vs. No Drought
  misc_feature: MA Experiment ID: 20000437 Result: Up-regulated in Transcription
  misc_feature: MA Experiment 20000437 PARAMETER Experiment Name: At_Drought_P Parameter: Age (day) Value: 8
  misc_feature: MA Experiment 20000437 PARAMETER Experiment Name: At_Drought_P Parameter: Organism Value: A. thaliana
  misc_feature: MA Experiment 20000437 PARAMETER Experiment Name: At_Drought_P Parameter: Plant Line Value: WS
  misc_feature: MA Experiment 20000437 PARAMETER Experiment Name: At_Drought_P Parameter: Timepoint (hr) Value: 24
  misc_feature: MA Experiment 20000437 PARAMETER Experiment Name: At_Drought_P Parameter: Tissue Value: Whole Plant
  misc_feature: MA Experiment 20000437 PARAMETER Experiment Name: At_Drought_P Parameter: Treatment Value: Drought vs. No Drought
  misc_feature: MA Experiment ID: 20000456 Result: Up-regulated in Transcription
  misc_feature: MA Experiment 20000456 PARAMETER Experiment Name: At_100uM_BA_P Parameter: Age (day) Value: 14
  misc_feature: MA Experiment 20000456 PARAMETER Experiment Name: At_100uM_BA_P Parameter: Organism Value: A. thaliana
  misc_feature: MA Experiment 20000456 PARAMETER Experiment Name: At_100uM_BA_P Parameter: Plant Line Value: WS
  misc_feature: MA Experiment 20000456 PARAMETER Experiment Name: At_100uM_BA_P Parameter: Timepoint (hr) Value: 6
  misc_feature: MA Experiment 20000456 PARAMETER Experiment Name: At_100uM_BA_P Parameter: Tissue Value: Aerial
  misc_feature: MA Experiment 20000456 PARAMETER Experiment Name: At_100uM_BA_P Parameter: Treatment Value: 100uM BA vs. No Treatment
  misc_feature: MA Experiment ID: 20000794 Result: Down-regulated in Transcription
  misc_feature: MA Experiment 20000794 PARAMETER Experiment Name: At_Petals_P Parameter: Age (day) Value: 23-25 days
  misc_feature: MA Experiment 20000794 PARAMETER Experiment Name: At_Petals_P Parameter: Plant Line Value: WS
  misc_feature: MA Experiment 20000794 PARAMETER Experiment Name: At_Petals_P Parameter: Tissue Value: Petals vs. Whole plant
  misc_feature: MA Experiment ID: 20001248 Result: Down-regulated in Transcription
  misc_feature: MA Experiment 20001248 PARAMETER Experiment Name: At_Far-red-induction_P Parameter: Age (day) Value: 7
  misc_feature: MA Experiment 20001248 PARAMETER Experiment Name: At_Far-red-induction_P Parameter: Light Value: Far-red vs. White
  misc_feature: MA Experiment 20001248 PARAMETER Experiment Name: At_Far-red-induction_P Parameter: Organism Value: A. thaliana
  misc_feature: MA Experiment 20001248 PARAMETER Experiment Name: At_Far-red-induction_P Parameter: Plant Line Value: Columbia
  misc_feature: MA Experiment 20001248 PARAMETER Experiment Name: At_Far-red-induction_P Parameter: Timepoint (hr) Value: 4
  misc_feature: MA Experiment 20001248 PARAMETER Experiment Name: At_Far-red-induction_P Parameter: Tissue Value: Whole Plant
  misc_feature: MA Experiment ID: 20001555 Result: Up-regulated in Transcription
  misc_feature: MA Experiment 20001555 PARAMETER Experiment Name: At_Drought_Soil_Dry_P Parameter: Age (day) Value: 24
  misc_feature: MA Experiment 20001555 PARAMETER Experiment Name: At_Drought_Soil_Dry_P Parameter: Organism Value: A. thaliana
  misc_feature: MA Experiment 20001555 PARAMETER Experiment Name: At_Drought_Soil_Dry_P Parameter: Plant Line Value: WS
  misc_feature: MA Experiment 20001555 PARAMETER Experiment Name: At_Drought_Soil_Dry_P Parameter: Post Timepoint (hr) Value: None
  misc_feature: MA Experiment 20001555 PARAMETER Experiment Name: At_Drought_Soil_Dry_P Parameter: Post-Treatment Value: None
  misc_feature: MA Experiment 20001555 PARAMETER Experiment Name: At_Drought_Soil_Dry_P Parameter: Timepoint (day) Value: 10
  misc_feature: MA Experiment 20001555 PARAMETER Experiment Name: At_Drought_Soil_Dry_P Parameter: Treatment Value: Drought vs. No Drought
  misc_feature: MA Experiment ID: 20001556 Result: Up-regulated in Transcription
  misc_feature: MA Experiment 20001556 PARAMETER Experiment Name: At_Drought_Soil_Dry_P Parameter: Age (day) Value: 26
  misc_feature: MA Experiment 20001556 PARAMETER Experiment Name: At_Drought_Soil_Dry_P Parameter: Organism Value: A. thaliana
  misc_feature: MA Experiment 20001556 PARAMETER Experiment Name: At_Drought_Soil_Dry_P Parameter: Plant Line Value: WS
  misc_feature: MA Experiment 20001556 PARAMETER Experiment Name: At_Drought_Soil_Dry_P Parameter: Post Timepoint (hr) Value: None
  misc_feature: MA Experiment 20001556 PARAMETER Experiment Name: At_Drought_Soil_Dry_P Parameter: Post-Treatment Value: None
  misc_feature: MA Experiment 20001556 PARAMETER Experiment Name: At_Drought_Soil_Dry_P Parameter: Timepoint (day) Value: 12
  misc_feature: MA Experiment 20001556 PARAMETER Experiment Name: At_Drought_Soil_Dry_P Parameter: Treatment Value: Drought vs. No Drought
  misc_feature: MA Experiment ID: 20001904 Result: Up-regulated in Transcription
  misc_feature: MA Experiment 20001904 PARAMETER Experiment Name: At_Drought_Reproduction_P Parameter: Age (day) Value: 37
  misc_feature: MA Experiment 20001904 PARAMETER Experiment Name: At_Drought_Reproduction_P Parameter: Organism Value: A. thaliana
  misc_feature: MA Experiment 20001904 PARAMETER Experiment Name: At_Drought_Reproduction_P Parameter: Plant Line Value: WS
  misc_feature: MA Experiment 20001904 PARAMETER Experiment Name: At_Drought_Reproduction_P Parameter: Timepoint (day) Value: 7
  misc_feature: MA Experiment 20001904 PARAMETER Experiment Name: At_Drought_Reproduction_P Parameter: Tissue Value: Rosettes
  misc_feature: MA Experiment 20001904 PARAMETER Experiment Name: At_Drought_Reproduction_P Parameter: Treatment Value: Drought vs. No Drought
agatcaaatcagcaggaaaatcaagaaccaaaagtctcccgaaaagcaacgaacaatgtctctcattccaagcatttttggaggacgcagatcaaacgtctttgatccgttctcgcaagacttatgggatccattcgaaggattcttcacgccatcttctgcgttggcaaacgcttcaaccgctcgtgatgtggcagcgtttacaaacgcaagagtggattggaaggaaacgccggaggcacatgtgttcaaagcggacttgccaggcctgaagaaggaagaagtcaaggttgaggttgaagacaagaacgttctgcagattagcggagagaggagcaaggagaacgaagagaagaacgataagtggcaccgtgtggagagagctagtgggaagtttatgagaaggtttaggttaccggagaatgcaaagatggaagaagtgaaggcaacaatggagaatggtgtgcttacggttgtggttccgaaagcgcctgagaagaagcctcaagtcaagtccatcgatatctccggggctaattgaatatgaagatgaagatgaaatatttggtgtgtcaaataaaaagcttgtgtgcttaagtttgtgtttttttcttggcttgttgtgttatgaatttgtggctttttctaatattaaatgaatgtaagatctcattataatgaataaacaaatgtttct

SEQ ID NO: 78594 - protein, 179 aa, Arabidopsis thaliana; identical to SEQ ID NO: 38390
  peptide (1)..(179): Ceres Seq. ID no. 12642944
  misc_feature (19)..(179): Homolog of NCBI NO: 15238509 NR Description: heat shock protein 18; protein id: At5g59720.1, by cDNA: 97197. [Arabidopsis thaliana]
  misc_feature (19)..(179): Homolog of NCBI NO: 21618106 NR Description: heat shock protein 18 [Arabidopsis thaliana]
  misc_feature (18)..(177): Homolog of NCBI NO: 8671873 NR Description: Contains similarity to 17.6 KD class I heat shock from Arabidopsis thaliana gi|P13853 and contains Hsp20/alpha PF|00011 and signal peptidase I PF|00461 domains. ESTs
  misc_feature (19)..(177): Homolog of NCBI NO: 15220832 NR Description: 17.6 kDa heat shock protein (AA 1-156); protein At1g53540.1 [Arabidopsis thaliana]
  misc_feature (19)..(177): Homolog of NCBI NO: 7441319 NR Description: heat-shock protein 17.6, low molecular weight -
  misc_feature (19)..(177): Homolog of NCBI NO: 81639 NR Description: heat shock protein 17 - Arabidopsis thaliana
  misc_feature (19)..(177): Homolog of NCBI NO: 15231372 NR Description: heat shock protein 17; protein id: At3g46230.1, by cDNA: gi_15294149 [Arabidopsis thaliana]
  misc_feature (19)..(177): Homolog of NCBI NO: 8250119 NR Description: HSP17.7-a protein [Brassica oleracea]
  misc_feature (19)..(177): Homolog of NCBI NO: 15294150 NR Description: AT3g46230/F12M12_200 [Arabidopsis thaliana]
  misc_feature (19)..(177): Homolog of NCBI NO: 11276924 NR Description: heat-shock protein, low molecular weight

SEQ ID NO: 78595 - protein, 161 aa, Arabidopsis thaliana; identical to SEQ ID NO: 38391
  peptide (1)..(161): Ceres Seq. ID no. 12642945
  misc_feature (1)..(161): Homolog of NCBI NO: 15238509 NR Description: heat shock protein 18; protein id: At5g59720.1, by cDNA: 97197. [Arabidopsis thaliana]
  misc_feature (1)..(161): Homolog of NCBI NO: 21618106 NR Description: heat shock protein 18 [Arabidopsis thaliana]
  misc_feature (1)..(159): Homolog of NCBI NO: 8671873 NR Description: Contains similarity to 17.6 KD class I heat shock from Arabidopsis thaliana gi|P13853 and contains Hsp20/alpha PF|00011 and signal peptidase I PF|00461 domains. ESTs
  misc_feature (1)..(159): Homolog of NCBI NO: 15220832 NR Description: 17.6 kDa heat shock protein (AA 1-156); protein At1g53540.1 [Arabidopsis thaliana]
  misc_feature (1)..(159): Homolog of NCBI NO: 7441319 NR Description: heat-shock protein 17.6, low molecular weight -
  misc_feature (1)..(159): Homolog of NCBI NO: 81639 NR Description: heat shock protein 17 - Arabidopsis thaliana
  misc_feature (1)..(159): Homolog of NCBI NO: 15231372 NR Description: heat shock protein 17; protein id: At3g46230.1, by cDNA: gi_15294149 [Arabidopsis thaliana]
  misc_feature (1)..(159): Homolog of NCBI NO: 8250119 NR Description: HSP17.7-a protein [Brassica oleracea]
  misc_feature (1)..(159): Homolog of NCBI NO: 15294150 NR Description: AT3g46230/F12M12_200 [Arabidopsis thaliana]
  misc_feature (1)..(159): Homolog of NCBI NO: 11276924 NR Description: heat-shock protein, low molecular weight

SEQ ID NO: 78596 - protein, 89 aa, Arabidopsis thaliana; identical to SEQ ID NO: 38392
  peptide (1)..(89): Ceres Seq. ID no. 12642946

SEQ ID NO: 78597 - DNA, 1218 bp, Arabidopsis thaliana
  misc_feature (1)..(1218): Ceres Seq. ID no. 12642967
  misc_feature: MA Experiment ID: 20000185 Result: Up-regulated in Transcription
  misc_feature: MA Experiment 20000185 PARAMETER Experiment Name: At_Roots__P Parameter: Age (day) Value: 7 vs. 21
  misc_feature: MA Experiment 20000185 PARAMETER Experiment Name: At_Roots__P Parameter: Organism Value: A. thaliana
  misc_feature: MA Experiment 20000185 PARAMETER Experiment Name: At_Roots__P Parameter: Tissue Value: Roots vs. Whole Plant
  misc_feature: MA Experiment ID: 20000439 Result: Up-regulated in Transcription
  misc_feature: MA Experiment 20000439 PARAMETER Experiment Name: At_Roots__P Parameter: Age (day) Value: 14 vs. 21
  misc_feature: MA Experiment 20000439 PARAMETER Experiment Name: At_Roots__P Parameter: Organism Value: A. thaliana
  misc_feature: MA Experiment 20000439 PARAMETER Experiment Name: At_Roots__P Parameter: Tissue Value: Roots vs. Whole Plant
atggagatgatggtaatgtttatgtttgaggaagttaagagctacatagagaggctccaagagacatcattccccatgaaagtcgaagcttttattcccgccgttttattgctctgttttggggtaatgttatgtttaaaaagctcgtgtgcgttgcagataggtaacaataatgagttgaagaattacataagttgggaagatttgagagttgtggaagatggaagaatagagagaagttttagcattaaggagaatagtaattgggtaaccacaaacgctaacgctaacgcgaacgctactaacgtgagaagagtgattgtggttgataaaaacggaggaggagattctgttacagttcaaggagctgttgatatggttcctgattccaattcacagagagttaaaatcttcattcttcctgggatttacagggagaaggtgattgtgccgaaatcaaaaccgtatatttcgttcataggtaatgagagctatgcgggagatacagtgattagttggagcgataaagcttcagaccttggctgcgatggtaaagaactcggcacttatagaaccgcctctgtttccattgaatctgatttcttctgtgctactgccatcacttttgagaacacggtggttgcagaggcaggggaacaggggaggcaagcggtggcgttgagaataattggggacaaagctgtgttctatagagttagggttttgggatcacaagacactctttttgatgacaatggatctcactacttttaccaatgctatatccaaggcaatgtagatttcatctttggcaatgcgaaatcactttaccaggactgtgatatccactcaaccgcaaagagatatggcgcgatcgcggctcatcatagagactcggagactgaagataccgggttctcctttgtgaactgtgatatcagtggtactgggcagatttacttaggaagggcttggggaaactactcaagaactgtttattcaaactgtttcatagctgatattatcactcctgtgggctggagtgactggaaacaccctgagaggcaaaggaaagtgatgttcggggagtacaattgcaggggaagaggagcagagagaggaggccgagtaccgtggtcgaaaactcttaccagagatgaagtgaagccttttctgggaagagagttcatatatggagatcaatggctgagactctaa

SEQ ID NO: 78598 - protein, 405 aa, Arabidopsis thaliana
  peptide (1)..(405): Ceres Seq. ID no. 12642968
  misc_feature (106)..(400): Pfam Name: Pectinesterase Pfam Description: Pectinesterase
  misc_feature (26)..(405): Homolog of NCBI NO: 15240544 NR Description: pectinesterase family; protein id: At5g55590.1 thaliana] >gi|9758593|dbj|BAB09226.1| contains similarity to
  misc_feature (103)..(403): Homolog of NCBI NO: 38345478 NR Description: OSJNBa0010H02.16 [Oryza sativa (japonica
  misc_feature (107)..(405): Homolog of NCBI NO: 34909402 NR Description: putative pectin methylesterase [Oryza sativa
  misc_feature (105)..(403): Homolog of NCBI NO: 15238111 NR Description: pectinesterase family; protein id: At5g47500.1, by cDNA: gi_20856814 [Arabidopsis thaliana] AT5g47500/MNJ7_9 [Arabidopsis thaliana]
  misc_feature (105)..(403): Homolog of NCBI NO: 9758778 NR Description: pectin methylesterase-like [Arabidopsis thaliana]
  misc_feature (111)..(405): Homolog of NCBI NO: 15241163 NR Description: pectinesterase family; protein id: At5g19730.1, by cDNA: gi_17529289, supported by cDNA: gi_20465498 [Arabidopsis >gi|17529290|gb|AAL38872.1| putative pectin methylesterase
  misc_feature (101)..(404): Homolog of NCBI NO: 15220471 NR Description: pectinesterase family; protein id: At1g05310.1
  misc_feature (106)..(404): Homolog of NCBI NO: 15228023 NR Description: pectinesterase family; protein id: At2g36710.1
  misc_feature (101)..(404): Homolog of NCBI NO: 25325338 NR Description: hypothetical protein [imported] - Arabidopsis >gi|2388565|gb|AAB71446.1| Similar to Prunus pectinesterase
  misc_feature (106)..(404): Homolog of NCBI NO: 27754550 NR Description: putative pectinesterase family protein
MEMMVMFMFEEVKSYIERLQETSFPMKVEAFIPAVLLLCFGVMLCLKSSCALQIGNNNELKNYISWEDLRVVEDGRIERSFSIKENSNWVTTNANANANATNVRRVIVVDKNGGGDSVTVQGAVDMVPDSNSQRVKIFILPGIYREKVIVPKSKPYISFIGNESYAGDTVISWSDKASDLGCDGKELGTYRTASVSIESDFFCATAITFENTVVAEAGEQGRQAVALRIIGDKAVFYRVRVLGSQDTLFDDNGSHYFYQCYIQGNVDFIFGNAKSLYQDCDIHSTAKRYGAIAAHHRDSETEDTGFSFVNCDISGTGQIYLGRAWGNYSRTVYSNCFIADIITPVGWSDWKHPERQRKVMFGEYNCRGRGAERGGRVPWSKTLTRDEVKPFLGREFIYGDQWLRL

SEQ ID NO: 78599 - protein, 403 aa, Arabidopsis thaliana
  peptide (1)..(403): Ceres Seq. ID no. 12642969
  misc_feature (104)..(398): Pfam Name: Pectinesterase Pfam Description: Pectinesterase
  misc_feature (24)..(403): Homolog of NCBI NO: 15240544 NR Description: pectinesterase family; protein id: At5g55590.1 thaliana] >gi|9758593|dbj|BAB09226.1| contains similarity to
  misc_feature (101)..(401): Homolog of NCBI NO: 38345478 NR Description: OSJNBa0010H02.16 [Oryza sativa (japonica
  misc_feature (105)..(403): Homolog of NCBI NO: 34909402 NR Description: putative pectin methylesterase [Oryza sativa
  misc_feature (103)..(401): Homolog of NCBI NO: 15238111 NR Description: pectinesterase family; protein id: At5g47500.1, by cDNA: gi_20856814 [Arabidopsis thaliana] AT5g47500/MNJ7_9 [Arabidopsis thaliana]
  misc_feature (103)..(401): Homolog of NCBI NO: 9758778 NR Description: pectin methylesterase-like [Arabidopsis thaliana]
  misc_feature (109)..(403): Homolog of NCBI NO: 15241163 NR Description: pectinesterase family; protein id: At5g19730.1, by cDNA: gi_17529289, supported by cDNA: gi_20465498 [Arabidopsis >gi|17529290|gb|AAL38872.1| putative pectin methylesterase
  misc_feature (99)..(402): Homolog of NCBI NO: 15220471 NR Description: pectinesterase family; protein id: At1g05310.1
  misc_feature (104)..(402): Homolog of NCBI NO: 15228023 NR Description: pectinesterase family; protein id: At2g36710.1
  misc_feature (99)..(402): Homolog of NCBI NO: 25325338 NR Description: hypothetical protein [imported] - Arabidopsis >gi|2388565|gb|AAB71446.1| Similar to Prunus pectinesterase
  misc_feature (104)..(402): Homolog of NCBI NO: 27754550 NR Description: putative pectinesterase family protein
MMVMFMFEEVKSYIERLQETSFPMKVEAFIPAVLLLCFGVMLCLKSSCALQIGNNNELKNYISWEDLRVVEDGRIERSFSIKENSNWVTTNANANANATNVRRVIVVDKNGGGDSVTVQGAVDMVPDSNSQRVKIFILPGIYREKVIVPKSKPYISFIGNESYAGDTVISWSDKASDLGCDGKELGTYRTASVSIESDFFCATAITFENTVVAEAGEQGRQAVALRIIGDKAVFYRVRVLGSQDTLFDDNGSHYFYQCYIQGNVDFIFGNAKSLYQDCDIHSTAKRYGAIAAHHRDSETEDTGFSFVNCDISGTGQIYLGRAWGNYSRTVYSNCFIADIITPVGWSDWKHPERQRKVMFGEYNCRGRGAERGGRVPWSKTLTRDEVKPFLGREFIYGDQWLRL

SEQ ID NO: 78600 - protein, 402 aa, Arabidopsis thaliana
  peptide (1)..(402): Ceres Seq. ID no. 12642970
  misc_feature (103)..(397): Pfam Name: Pectinesterase Pfam Description: Pectinesterase
  misc_feature (23)..(402): Homolog of NCBI NO: 15240544 NR Description: pectinesterase family; protein id: At5g55590.1 thaliana] >gi|9758593|dbj|BAB09226.1| contains similarity to
  misc_feature (100)..(400): Homolog of NCBI NO: 38345478 NR Description: OSJNBa0010H02.16 [Oryza sativa (japonica
  misc_feature (104)..(402): Homolog of NCBI NO: 34909402 NR Description: putative pectin methylesterase [Oryza sativa
  misc_feature (102)..(400): Homolog of NCBI NO: 15238111 NR Description: pectinesterase family; protein id: At5g47500.1, by cDNA: gi_20856814 [Arabidopsis thaliana] AT5g47500/MNJ7_9 [Arabidopsis thaliana]
  misc_feature (102)..(400): Homolog of NCBI NO: 9758778 NR Description: pectin methylesterase-like [Arabidopsis thaliana]
  misc_feature (108)..(402): Homolog of NCBI NO: 15241163 NR Description: pectinesterase family; protein id: At5g19730.1, by cDNA: gi_17529289, supported by cDNA: gi_20465498 [Arabidopsis >gi|17529290|gb|AAL38872.1| putative pectin methylesterase
  misc_feature (98)..(401): Homolog of NCBI NO: 15220471 NR Description: pectinesterase family; protein id: At1g05310.1
  misc_feature (103)..(401): Homolog of NCBI NO: 15228023 NR Description: pectinesterase family; protein id: At2g36710.1
  misc_feature (98)..(401): Homolog of NCBI NO: 25325338 NR Description: hypothetical protein [imported] - Arabidopsis >gi|2388565|gb|AAB71446.1| Similar to Prunus pectinesterase
  misc_feature (103)..(401): Homolog of NCBI NO: 27754550 NR Description: putative pectinesterase family protein
MVMFMFEEVKSYIERLQETSFPMKVEAFIPAVLLLCFGVMLCLKSSCALQIGNNNELKNYISWEDLRVVEDGRIERSFSIKENSNWVTTNANANANATNVRRVIVVDKNGGGDSVTVQGAVDMVPDSNSQRVKIFILPGIYREKVIVPKSKPYISFIGNESYAGDTVISWSDKASDLGCDGKELGTYRTASVSIESDFFCATAITFENTVVAEAGEQGRQAVALRIIGDKAVFYRVRVLGSQDTLFDDNGSHYFYQCYIQGNVDFIFGNAKSLYQDCDIHSTAKRYGAIAAHHRDSETEDTGFSFVNCDISGTGQIYLGRAWGNYSRTVYSNCFIADIITPVGWSDWKHPERQRKVMFGEYNCRGRGAERGGRVPWSKTLTRDEVKPFLGREFIYGDQWLRL

SEQ ID NO: 78601 - DNA, 1502 bp, Arabidopsis thaliana
  misc_feature (1)..(1502): Ceres Seq. ID no. 12642995
  misc_feature: MA Experiment ID: 108434 Result: Up-regulated in Transcription
  misc_feature: MA Experiment 108434 PARAMETER Experiment Name: At_Root_Tips_cDNA_P Parameter: Tissue Value: Root Tips
  misc_feature: MA Experiment ID: 108435 Result: Up-regulated in Transcription
  misc_feature: MA Experiment 108435 PARAMETER Experiment Name: At_stm_Mutants_cDNA_P Parameter: Plant Line Value: wt Landsburg vs stm
  misc_feature: MA Experiment 108435 PARAMETER Experiment Name: At_stm_Mutants_cDNA_P Parameter: Tissue Value: Shoot Apical Meristem Region
  misc_feature: MA Experiment ID: 108461 Result: Up-regulated in Transcription
  misc_feature: MA Experiment 108461 PARAMETER Experiment Name: At_Germinating_Seeds_cDNA_P Parameter: Age (day) Value: 1 vs. 0
  misc_feature: MA Experiment 108461 PARAMETER Experiment Name: At_Germinating_Seeds_cDNA_P Parameter: Tissue Value: Germinating Seeds
  misc_feature: MA Experiment ID: 108462 Result: Up-regulated in Transcription
  misc_feature: MA Experiment 108462 PARAMETER Experiment Name: At_Germinating_Seeds_cDNA_P Parameter: Age (day) Value: 2 vs. 0
  misc_feature: MA Experiment 108462 PARAMETER Experiment Name: At_Germinating_Seeds_cDNA_P Parameter: Tissue Value: Germinating Seeds
  misc_feature: MA Experiment ID: 108561 Result: Down-regulated in Transcription
  misc_feature: MA Experiment 108561 PARAMETER Experiment Name: At_100uM_ABA_cDNA_P Parameter: Timepoint (hr) Value: 6
  misc_feature: MA Experiment 108561 PARAMETER Experiment Name: At_100uM_ABA_cDNA_P Parameter: Tissue Value: Aerial
  misc_feature: MA Experiment 108561 PARAMETER Experiment Name: At_100uM_ABA_cDNA_P Parameter: Treatment Value: 100uM ABA vs. No Treatment
  misc_feature: MA Experiment ID: 20000069 Result: Down-regulated in Transcription
  misc_feature: MA Experiment 20000069 PARAMETER Experiment Name: At_100uM_ABA_Mutants_cDNA_P Parameter: Plant Line Value: CS23
  misc_feature: MA Experiment 20000069 PARAMETER Experiment Name: At_100uM_ABA_Mutants_cDNA_P Parameter: Timepoint (hr) Value: 6
  misc_feature: MA Experiment 20000069 PARAMETER Experiment Name: At_100uM_ABA_Mutants_cDNA_P Parameter: Tissue Value: Aerial
  misc_feature: MA Experiment 20000069 PARAMETER Experiment Name: At_100uM_ABA_Mutants_cDNA_P Parameter: Treatment Value: 100uM ABA vs. No Treatment
  misc_feature: MA Experiment ID: 20000070 Result: Down-regulated in Transcription
  misc_feature: MA Experiment 20000070 PARAMETER Experiment Name: At_100uM_ABA_Mutants_cDNA_P Parameter: Plant Line Value: CS24
  misc_feature: MA Experiment 20000070 PARAMETER Experiment Name: At_100uM_ABA_Mutants_cDNA_P Parameter: Timepoint (hr) Value: 6
  misc_feature: MA Experiment 20000070 PARAMETER Experiment Name: At_100uM_ABA_Mutants_cDNA_P Parameter: Tissue Value: Aerial
  misc_feature: MA Experiment 20000070 PARAMETER Experiment Name: At_100uM_ABA_Mutants_cDNA_P Parameter: Treatment Value: 100uM ABA vs. No Treatment
  misc_feature: MA Experiment ID: 20000071 Result: Down-regulated in Transcription
  misc_feature: MA Experiment 20000071 PARAMETER Experiment Name: At_100uM_ABA_Mutants_cDNA_P Parameter: Plant Line Value: CS8104
  misc_feature: MA Experiment 20000071 PARAMETER Experiment Name: At_100uM_ABA_Mutants_cDNA_P Parameter: Timepoint (hr) Value: 6
  misc_feature: MA Experiment 20000071 PARAMETER Experiment Name: At_100uM_ABA_Mutants_cDNA_P Parameter: Tissue Value: Aerial
  misc_feature: MA Experiment 20000071 PARAMETER Experiment Name: At_100uM_ABA_Mutants_cDNA_P Parameter: Treatment Value: 100uM ABA vs. No Treatment
  misc_feature: MA Experiment ID: 20000072 Result: Down-regulated in Transcription
  misc_feature: MA Experiment 20000072 PARAMETER Experiment Name: At_100uM_ABA_Mutants_cDNA_P Parameter: Plant Line Value: CS8105
  misc_feature: MA Experiment 20000072 PARAMETER Experiment Name: At_100uM_ABA_Mutants_cDNA_P Parameter: Timepoint (hr) Value: 6
  misc_feature: MA Experiment 20000072 PARAMETER Experiment Name: At_100uM_ABA_Mutants_cDNA_P Parameter: Tissue Value: Aerial
  misc_feature: MA Experiment 20000072 PARAMETER Experiment Name: At_100uM_ABA_Mutants_cDNA_P Parameter: Treatment Value: 100uM ABA vs. No Treatment
  misc_feature: MA Experiment ID: 20000089 Result: Down-regulated in Transcription
  misc_feature: MA Experiment ID: 20000112 Result: Down-regulated in Transcription
  misc_feature: MA Experiment 20000112 PARAMETER Experiment Name: At_42deg_Heat_cDNA_P Parameter: Temperature (deg C) Value: 42 vs. 22
  misc_feature: MA Experiment 20000112 PARAMETER Experiment Name: At_42deg_Heat_cDNA_P Parameter: Timepoint (hr) Value: 2
  misc_feature: MA Experiment 20000112 PARAMETER Experiment Name: At_42deg_Heat_cDNA_P Parameter: Tissue Value: Aerial
  misc_feature: MA Experiment ID: 20000113 Result: Down-regulated in Transcription
  misc_feature: MA Experiment 20000113 PARAMETER Experiment Name: At_42deg_Heat_cDNA_P Parameter: Temperature (deg C) Value: 42 vs. 22
  misc_feature: MA Experiment 20000113 PARAMETER Experiment Name: At_42deg_Heat_cDNA_P Parameter: Timepoint (hr) Value: 8
  misc_feature: MA Experiment 20000113 PARAMETER Experiment Name: At_42deg_Heat_cDNA_P Parameter: Tissue Value: Aerial
  misc_feature: MA Experiment ID: 20000117 Result: Down-regulated in Transcription
  misc_feature: MA Experiment 20000117 PARAMETER Experiment Name: At_100uM_ABA_Mutants_cDNA_P Parameter: Plant Line Value: Columbia
  misc_feature: MA Experiment 20000117 PARAMETER Experiment Name: At_100uM_ABA_Mutants_cDNA_P Parameter: Timepoint (hr) Value: 6
  misc_feature: MA Experiment 20000117 PARAMETER Experiment Name: At_100uM_ABA_Mutants_cDNA_P Parameter: Tissue Value: Aerial
  misc_feature: MA Experiment 20000117 PARAMETER Experiment Name: At_100uM_ABA_Mutants_cDNA_P Parameter: Treatment Value: 100uM ABA vs. No Treatment
  misc_feature: MA Experiment ID: 20000180 Result: Up-regulated in Transcription
  misc_feature: MA Experiment 20000180 PARAMETER Experiment Name: At_Germinating_Seeds_P Parameter: Age (hr) Value: 24 vs. 0
  misc_feature: MA Experiment 20000180 PARAMETER Experiment Name: At_Germinating_Seeds_P Parameter: Tissue Value: Germinating Seeds
  misc_feature: MA Experiment ID: 20000184 Result: Up-regulated in Transcription
  misc_feature: MA Experiment 20000184 PARAMETER Experiment Name: At_Shoots__P Parameter: Age (day) Value: 7
  misc_feature: MA Experiment 20000184 PARAMETER Experiment Name: At_Shoots__P Parameter: Tissue Value: Shoots vs. Whole Plant
  misc_feature: MA Experiment ID: 20000235 Result: Up-regulated in Transcription
  misc_feature: MA Experiment 20000235 PARAMETER Experiment Name: At_Siliques_P Parameter: Age (day) Value: 21
  misc_feature: MA Experiment 20000235 PARAMETER Experiment Name: At_Siliques_P Parameter: Organism Value: A. thaliana
  misc_feature: MA Experiment 20000235 PARAMETER Experiment Name: At_Siliques_P Parameter: Plant Line Value: WS
  misc_feature: MA Experiment 20000235 PARAMETER Experiment Name: At_Siliques_P Parameter: Tissue Value: 5-10mm Siliques vs. Whole Plant
  misc_feature: MA Experiment ID: 20000437 Result: Down-regulated in Transcription
  misc_feature: MA Experiment 20000437 PARAMETER Experiment Name: At_Drought_P Parameter: Age (day) Value: 8
  misc_feature: MA Experiment 20000437 PARAMETER Experiment Name: At_Drought_P Parameter: Organism Value: A. thaliana
  misc_feature: MA Experiment 20000437 PARAMETER Experiment Name: At_Drought_P Parameter: Plant Line Value: WS
  misc_feature: MA Experiment 20000437 PARAMETER Experiment Name: At_Drought_P Parameter: Timepoint (hr) Value: 24
  misc_feature: MA Experiment 20000437 PARAMETER Experiment Name: At_Drought_P Parameter: Tissue Value: Whole Plant
  misc_feature: MA Experiment 20000437 PARAMETER Experiment Name: At_Drought_P Parameter: Treatment Value: Drought vs. No Drought
  misc_feature: MA Experiment ID: 20000495 Result: Up-regulated in Transcription
  misc_feature: MA Experiment 20000495 PARAMETER Experiment Name: At_Guard_Cells_P Parameter: Harvest Date Value: 8/2/2002
  misc_feature: MA Experiment 20000495 PARAMETER Experiment Name: At_Guard_Cells_P Parameter: Organism Value: A. thaliana
  misc_feature: MA Experiment 20000495 PARAMETER Experiment Name: At_Guard_Cells_P Parameter: Tissue Value: Guard Cells vs. Leaves
  misc_feature: MA Experiment ID: 20001248 Result: Down-regulated in Transcription
  misc_feature: MA Experiment 20001248 PARAMETER Experiment Name: At_Far-red-induction_P Parameter: Age (day) Value: 7
  misc_feature: MA Experiment 20001248 PARAMETER Experiment Name: At_Far-red-induction_P Parameter: Light Value: Far-red vs. White
  misc_feature: MA Experiment 20001248 PARAMETER Experiment Name: At_Far-red-induction_P Parameter: Organism Value: A. thaliana
  misc_feature: MA Experiment 20001248 PARAMETER Experiment Name: At_Far-red-induction_P Parameter: Plant Line Value: Columbia
  misc_feature: MA Experiment 20001248 PARAMETER Experiment Name: At_Far-red-induction_P Parameter: Timepoint (hr) Value: 4
  misc_feature: MA Experiment 20001248 PARAMETER Experiment Name: At_Far-red-induction_P Parameter: Tissue Value: Whole Plant
atggccaagaagatgagttctctcatcatcatcttcaacattctccttctcctcacaactcaaacccacgcgcacaacgtcacgcgcctcctagcaaaccacccatcattctcttccttcagccatttcctaacacaaacacacctcgccgacgaaatcaaccggagaagaaccataaccgtttgcgcagtagataacgccgccatgtcagcattaacctctaaaggctatacactctcaactctcaaaaacattctctccctccacgtccttttagattacttcggaaccaaaaaactccaccagatccgtgacggctctgctctcgccgctactctgtttcaagccaccggagctgctcctggaacctcaggattcgttaacataacggatctgagaggtggtaaagttgggtttggtcctgacggtggagatctgtcttctttctttgttaaatctattgaagaagttccgtataacatctccattattcagatcagtagagttttaccgtcggagactgcggcggctccgactcctgctccggcggagatgaatcttaccggaataatgtcggctcatggatgcaaagtgtttgctgagactcttctcactaaccctggagcttcaaaaacctatcaggagagtttagaaggaggcatgacagtgttctgtccaggagatgatgcaatgaaaggtttcttgcccaaatacaagaacttgacagctccaaagaaagaagcatttctcgatttcctcgctgtcccgacatattactcaatggcgatgctcaaatccaacaatggtccgatgaacacacttgcgacagatggagctaacaagtttgagcttactgtacagaacgatggagagaaggttaccctcaagacaaggatcaacactgtcaagatcgttgatactcttattgatgagcagcctttagctatatatgcgactgataaggttttgttgcctaaagagttgtttaaggcttcggctgttgaagctccggctcctgctccggcaccagaggatggtgatgttgcggattctccaaaagcggctaaagggaaagcgaaaggaaagaagaagaaggctgcaccgtcgccagataatgatccttttggtgactcggattcgcctgccgaagggcctgacggagaggccgatgatgcgacggcagatgatgctggtgcggttaggatcatcggaggagctaaggctggtttggtggtgagcttgctctgcttgtttgcttcttcttggcttctatagtttcacttcgtttcttctattcttccatgtttttttttttgtgaatcttttatttatggtttttgggggaaagtaaatgaggattatttatttccctctattgttgagttttttttatttatttaaaagttggttgtcgaattaaatagtcggtagtttatatatttgtgtgttcttgtttcacgtgtttgtttagttgatgatgtaaacaagtcctgattttggtg

SEQ ID NO: 78602 - protein, 424 aa, Arabidopsis thaliana
  peptide (1)..(424): Ceres Seq. ID no. 12642996
  misc_feature (183)..(325): Pfam Name: Fasciclin domain Pfam Description: Fasciclin domain
  misc_feature (1)..(424): Homolog of NCBI NO: 15240570 NR Description: fasciclin-like arabinogalactan-protein (FLA1); id: At5g55730.1, supported by cDNA: gi_13377775 [Arabidopsis >gi|9758607|dbj|BAB09240.1| gene_id:MDF20.17~pir||T06631~similar
  misc_feature (6)..(382): Homolog of NCBI NO: 21593810 NR Description: putative pollen surface protein [Arabidopsis
  misc_feature (1)..(382): Homolog of NCBI NO: 15235459 NR Description: fasciclin-like arabinogalactan-protein (FLA2); id: At4g12730.1, supported by cDNA: 4620., supported by cDNA: supported by cDNA: gi_16974608 [Arabidopsis thaliana] putative
  misc_feature (6)..(382): Homolog of NCBI NO: 13377778 NR Description: fasciclin-like arabinogalactan-protein 2
  misc_feature (232)..(424): Homolog of NCBI NO: 21618321 NR Description: unknown [Arabidopsis thaliana]
  misc_feature (9)..(399): Homolog of NCBI NO: 38424037 NR Description: putative fasciclin-like arabinogalactan-protein
  misc_feature (2)..(400): Homolog of NCBI NO: 18406799 NR Description: fasciclin-like arabinogalactan-protein (FLA8); id: At2g45470.1, supported by cDNA: 7709., supported by cDNA: [Arabidopsis thaliana] >gi|25349350|pir||H84890 hypothetical
  misc_feature (2)..(400): Homolog of NCBI NO: 21595125 NR Description: endosperm-specific protein-like protein
  misc_feature (1)..(392): Homolog of NCBI NO: 14190409 NR Description: AT3g60900/T4C21_310 [Arabidopsis thaliana]
  misc_feature (1)..(392): Homolog of NCBI NO: 15232973 NR Description: fasciclin-like arabinogalactan-protein (FLA10);
MAKKMSSLIIIFNILLLLTTQTHAHNVTRLLANHPSFSSFSHFLTQTHLADEINRRRTITVCAVDNAAMSALTSKGYTLSTLKNILSLHVLLDYFGTKKLHQIRDGSALAATLFQATGAAPGTSGFVNITDLRGGKVGFGPDGGDLSSFFVKSIEEVPYNISIIQISRVLPSETAAAPTPAPAEMNLTGIMSAHGCKVFAETLLTNPGASKTYQESLEGGMTVFCPGDDAMKGFLPKYKNLTAPKKEAFLDFLAVPTYYSMAMLKSNNGPMNTLATDGANKFELTVQNDGEKVTLKTRINTVKIVDTLIDEQPLAIYATDKVLLPKELFKASAVEAPAPAPAPEDGDVADSPKAAKGKAKGKKKKAAPSPDNDPFGDSDSPAEGPDGEADDATADDAGAVRIIGGAKAGLVVSLLCLFASSWLL

SEQ ID NO: 78603 - protein, 420 aa, Arabidopsis thaliana
  peptide (1)..(420): Ceres Seq. ID no. 12642997
  misc_feature (179)..(321): Pfam Name: Fasciclin domain Pfam Description: Fasciclin domain
  misc_feature (1)..(420): Homolog of NCBI NO: 15240570 NR Description: fasciclin-like arabinogalactan-protein (FLA1); id: At5g55730.1, supported by cDNA: gi_13377775 [Arabidopsis >gi|9758607|dbj|BAB09240.1| gene_id:MDF20.17~pir||T06631~similar
  misc_feature (2)..(378): Homolog of NCBI NO: 21593810 NR Description: putative pollen surface protein [Arabidopsis
  misc_feature (1)..(378): Homolog of NCBI NO: 15235459 NR Description: fasciclin-like arabinogalactan-protein (FLA2); id: At4g12730.1, supported by cDNA: 4620., supported by cDNA: supported by cDNA: gi_16974608 [Arabidopsis thaliana] putative
  misc_feature (2)..(378): Homolog of NCBI NO: 13377778 NR Description: fasciclin-like arabinogalactan-protein 2
  misc_feature (228)..(420): Homolog of NCBI NO: 21618321 NR Description: unknown [Arabidopsis thaliana]
  misc_feature (5)..(395): Homolog of NCBI NO: 38424037 NR Description: putative fasciclin-like arabinogalactan-protein
  misc_feature (1)..(396): Homolog of NCBI NO: 18406799 NR Description: fasciclin-like arabinogalactan-protein (FLA8); id: At2g45470.1, supported by cDNA: 7709., supported by cDNA: [Arabidopsis thaliana] >gi|25349350|pir||H84890 hypothetical
  misc_feature (1)..(396): Homolog of NCBI NO: 21595125 NR Description: endosperm-specific protein-like protein
  misc_feature (1)..(388): Homolog of NCBI NO: 14190409 NR Description: AT3g60900/T4C21_310 [Arabidopsis thaliana]
  misc_feature (1)..(388): Homolog of NCBI NO: 15232973 NR Description: fasciclin-like arabinogalactan-protein (FLA10);
MSSLIIIFNILLLLTTQTHAHNVTRLLANHPSFSSFSHFLTQTHLADEINRRRTITVCAVDNAAMSALTSKGYTLSTLKNILSLHVLLDYFGTKKLHQIRDGSALAATLFQATGAAPGTSGFVNITDLRGGKVGFGPDGGDLSSFFVKSIEEVPYNISIIQISRVLPSETAAAPTPAPAEMNLTGIMSAHGCKVFAETLLTNPGASKTYQESLEGGMTVFCPGDDAMKGFLPKYKNLTAPKKEAFLDFLAVPTYYSMAMLKSNNGPMNTLATDGANKFELTVQNDGEKVTLKTRINTVKIVDTLIDEQPLAIYATDKVLLPKELFKASAVEAPAPAPAPEDGDVADSPKAAKGKAKGKKKKAAPSPDNDPFGDSDSPAEGPDGEADDATADDAGAVRIIGGAKAGLVVSLLCLFASSWLL

SEQ ID NO: 78604 - protein, 356 aa, Arabidopsis thaliana
  peptide (1)..(356): Ceres Seq. ID no. 12642998
  misc_feature (115)..(257): Pfam Name: Fasciclin domain Pfam Description: Fasciclin domain
  misc_feature (1)..(356): Homolog of NCBI NO: 15240570 NR Description: fasciclin-like arabinogalactan-protein (FLA1); id: At5g55730.1, supported by cDNA: gi_13377775 [Arabidopsis >gi|9758607|dbj|BAB09240.1| gene_id:MDF20.17~pir||T06631~similar
  misc_feature (1)..(314): Homolog of NCBI NO: 21593810 NR Description: putative pollen surface protein [Arabidopsis
  misc_feature (1)..(314): Homolog of NCBI NO: 15235459 NR Description: fasciclin-like arabinogalactan-protein (FLA2); id: At4g12730.1, supported by cDNA: 4620., supported by cDNA: supported by cDNA: gi_16974608 [Arabidopsis thaliana] putative
  misc_feature (1)..(314): Homolog of NCBI NO: 13377778 NR Description: fasciclin-like arabinogalactan-protein 2
  misc_feature (164)..(356): Homolog of NCBI NO: 21618321 NR Description: unknown [Arabidopsis thaliana]
  misc_feature (1)..(331): Homolog of NCBI NO: 38424037 NR Description: putative fasciclin-like arabinogalactan-protein
  misc_feature (1)..(332): Homolog of NCBI NO: 18406799 NR Description: fasciclin-like arabinogalactan-protein (FLA8); id: At2g45470.1, supported by cDNA: 7709., supported by cDNA: [Arabidopsis thaliana] >gi|25349350|pir||H84890 hypothetical
  misc_feature (1)..(332): Homolog of NCBI NO: 21595125 NR Description: endosperm-specific protein-like protein
  misc_feature (1)..(324): Homolog of NCBI NO: 14190409 NR Description: AT3g60900/T4C21_310 [Arabidopsis thaliana]
  misc_feature (1)..(324): Homolog of NCBI NO: 15232973 NR Description: fasciclin-like arabinogalactan-protein (FLA10);
MSALTSKGYTLSTLKNILSLHVLLDYFGTKKLHQIRDGSALAATLFQATGAAPGTSGFVNITDLRGGKVGFGPDGGDLSSFFVKSIEEVPYNISIIQISRVLPSETAAAPTPAPAEMNLTGIMSAHGCKVFAETLLTNPGASKTYQESLEGGMTVFCPGDDAMKGFLPKYKNLTAPKKEAFLDFLAVPTYYSMAMLKSNNGPMNTLATDGANKFELTVQNDGEKVTLKTRINTVKIVDTLIDEQPLAIYATDKVLLPKELFKASAVEAPAPAPAPEDGDVADSPKAAKGKAKGKKKKAAPSPDNDPFGDSDSPAEGPDGEADDATADDAGAVRIIGGAKAGLVVSLLCLFASSWLL

SEQ ID NO: 78605 - DNA, 2547 bp, Arabidopsis thaliana
  misc_feature (1)..(2547): Ceres Seq. ID no. 12642999
  misc_feature: MA Experiment ID: 20000180 Result: Up-regulated in Transcription
  misc_feature: MA Experiment 20000180 PARAMETER Experiment Name: At_Germinating_Seeds_P Parameter: Age (hr) Value: 24 vs. 0
  misc_feature: MA Experiment 20000180 PARAMETER Experiment Name: At_Germinating_Seeds_P Parameter: Tissue Value: Germinating Seeds
  misc_feature: MA Experiment ID: 20000182 Result: Down-regulated in Transcription
  misc_feature: MA Experiment 20000182 PARAMETER Experiment Name: At_2mM_SA_P Parameter: Age (day) Value: 14
  misc_feature: MA Experiment 20000182 PARAMETER Experiment Name: At_2mM_SA_P Parameter: Organism Value: A. thaliana
  misc_feature: MA Experiment 20000182 PARAMETER Experiment Name: At_2mM_SA_P Parameter: Plant Line Value: WS
  misc_feature: MA Experiment 20000182 PARAMETER Experiment Name: At_2mM_SA_P Parameter: Timepoint (hr) Value: 6
  misc_feature: MA Experiment 20000182 PARAMETER Experiment Name: At_2mM_SA_P Parameter: Tissue Value: Aerial
  misc_feature: MA Experiment 20000182 PARAMETER Experiment Name: At_2mM_SA_P Parameter: Treatment Value: 2mM SA vs. No Treatment
  misc_feature: MA Experiment ID: 20000185 Result: Down-regulated in Transcription
  misc_feature: MA Experiment 20000185 PARAMETER Experiment Name: At_Roots__P Parameter: Age (day) Value: 7 vs. 21
  misc_feature: MA Experiment 20000185 PARAMETER Experiment Name: At_Roots__P Parameter: Organism Value: A. thaliana
  misc_feature: MA Experiment 20000185 PARAMETER Experiment Name: At_Roots__P Parameter: Tissue Value: Roots vs. Whole Plant
  misc_feature: MA Experiment ID: 20000439 Result: Down-regulated in Transcription
  misc_feature: MA Experiment 20000439 PARAMETER Experiment Name: At_Roots__P Parameter: Age (day) Value: 14 vs. 21
  misc_feature: MA Experiment 20000439 PARAMETER Experiment Name: At_Roots__P Parameter: Organism Value: A. thaliana
  misc_feature: MA Experiment 20000439 PARAMETER Experiment Name: At_Roots__P Parameter: Tissue Value: Roots vs. Whole Plant
  misc_feature: MA Experiment ID: 20001248 Result: Down-regulated in Transcription
  misc_feature: MA Experiment 20001248 PARAMETER Experiment Name: At_Far-red-induction_P Parameter: Age (day) Value: 7
  misc_feature: MA Experiment 20001248 PARAMETER Experiment Name: At_Far-red-induction_P Parameter: Light Value: Far-red vs. White
  misc_feature: MA Experiment 20001248 PARAMETER Experiment Name: At_Far-red-induction_P Parameter: Organism Value: A. thaliana
  misc_feature: MA Experiment 20001248 PARAMETER Experiment Name: At_Far-red-induction_P Parameter: Plant Line Value: Columbia
  misc_feature: MA Experiment 20001248 PARAMETER Experiment Name: At_Far-red-induction_P Parameter: Timepoint (hr) Value: 4
  misc_feature: MA Experiment 20001248 PARAMETER Experiment Name: At_Far-red-induction_P Parameter: Tissue Value: Whole Plant
  misc_feature: MA Experiment ID: 20001450 Result: Down-regulated in Transcription
  misc_feature: MA Experiment 20001450 PARAMETER Experiment Name: At_Far-red-induction_P Parameter: Age (day) Value: 7
  misc_feature: MA Experiment 20001450 PARAMETER Experiment Name: At_Far-red-induction_P Parameter: Light Value: Far-red vs. White
  misc_feature: MA Experiment 20001450 PARAMETER Experiment Name: At_Far-red-induction_P Parameter: Organism Value: A. thaliana
  misc_feature: MA Experiment 20001450 PARAMETER Experiment Name: At_Far-red-induction_P Parameter: Plant Line Value: Columbia
  misc_feature: MA Experiment 20001450 PARAMETER Experiment Name: At_Far-red-induction_P Parameter: Timepoint (hr) Value: 8
  misc_feature: MA Experiment 20001450 PARAMETER Experiment Name: At_Far-red-induction_P Parameter: Tissue Value: Whole Plant
atggcttctcttcctttcaacactatcccgaataaagttccattttcagtatcatcgaaaccttcttctaaacaccacgatgaacaagctcattctccttcttccacatcttactttcatcgcgtttcgtctctttgtaagaacggtgagatcaaagaagctctgagtttagttacagagatggatttcagaaacttacgcattggtcctgagatatacggtgaaatcctccaaggatgcgtttacgagagagatttaagtacagggaagcaaattcatgctcggattttaaagaacggtgatttctacgcgaggaatgagtacatcgagactaaattggtgatattctacgccaagtgcgatgctttggagattgctgaagttcttttctcgaaattgagggttcgtaatgttttctcttgggcagctattattggtgtgaaatgtaggattgggttatgtgaaggagctttaatgggttttgttgagatgcttgaaaatgagatttttcctgataattttgtggttccgaatgtttgtaaagcgtgtggtgcgttgaaatggagtagatttgggagaggggttcatgggtatgtggtaaaatctggtcttgaggattgtgtgtttgtggctagtagtttagctgatatgtatgggaaatgtggtgttttggatgatgcgagtaaggtgtttgatgaaattcctgacagaaatgctgttgcttggaatgcgttgatggttggttatgtacaaaatggtaagaatgaggaagcgattcggcttttttctgatatgaggaagcaaggtgttgagcctactcgtgtcactgtctcgacttgcttatctgcttctgctaatatgggtggggttgaagaggggaaacagtcgcatgccattgctattgtaaatggaatggagctggataatatcttggggacatctttattgaatttctattgcaaagtgggtttgatagagtatgctgagatggtttttgatcggatgtttgaaaaggatgtggttacatggaatctgattatttctgggtatgttcaacaagggctagttgaagatgctatctacatgtgtcaattaatgagactagagaagctgaaatatgattgtgtcactttagcgacattaatgtctgctgctgcacgtactgagaatctaaagctcgggaaagaggtgcagtgttattgcattagacatagttttgaatctgatatcgttttagccagcactgtgatggatatgtatgccaagtgtggcagcattgttgatgctaagaaagtgtttgattctacagtagagaaagacttgatactgtggaatacgttacttgcagcctatgcagaatctggtcttagtggagaggctttgagattgttctatgggatgcagctagaaggtgtacctccaaatgtgataacatggaatttgatcattctaagtcttctaaggaatggtcaggtagatgaggccaaggatatgttcttgcagatgcaatcctcagggataattccaaatcttatctcatggacgactatgatgaatggtatggttcaaaatggttgcagtgaggaggcaattctgtttcttagaaagatgcaagaatcgggcctgagaccaaatgcatttagcatcactgtcgctctctctgcttgcgcacatctagcatcattgcatatcggaagaacaatccacggatacatcataagaaatctacagcattcctctttggtttctattgaaacttctttggttgacatgtatgctaaatgtggagatataaacaaagcagagaaggttttcggaagtaagctatacagcgagttgcctctctccaatgccatgatctcggcgtatgcattatatggtaacttaaaagaagcaatcgctctatacagaagcttagaaggtgtaggtcttaaaccagacaacatcacaatcacaaatgtcttatcagcatgtaaccacgcaggggatattaaccaggctatcgagattttcactgatatcgtttcaaagcgtagtatgaaaccatgcttggaacattatggacttatggtagatcttcttgcatcagctggagaaacagaaaaagctttaaggttaatcgaggaaatgccattcaagccagatgcacgaatgatccaatctttggttgcttcttgcaacaaacagcgtaagactgagcttgtggactacttatcaaggaaattgcttgaatccgagcctgaaaactccggtaactatgtgacgatatcgaatgcttatgcggttgaaggaagttgggatgaagttgtgaagatgagagagatgatgaaagctaagggtttgaagaaaaaacctggatgtagttggatacagattacaggagaagaaggagtccatgtgtttgttgccaatgataagacacatactaggatcaatgagatacaaatgatgttccaaatgataattatgtgtatgaaatattataaatttgatcatgtatatttagactctcaagaattgagaagctttgtgattactgttgtttaa

SEQ ID NO: 78606 - protein, 848 aa, Arabidopsis thaliana
  peptide (1)..(848): Ceres Seq. ID no. 12643000
  misc_feature (139)..(173): Pfam Name: PPR repeat Pfam Description: PPR repeat
  misc_feature (9)..(604): Homolog of NCBI NO: 34912504 NR Description: selenium-binding protein-like [Oryza sativa
  misc_feature (18)..(478): Homolog of NCBI NO: 18394615 NR Description: hypothetical protein; protein id: At1g18485.1
  misc_feature (481)..(823): Homolog of NCBI NO: 18394615 NR Description: hypothetical protein; protein id: At1g18485.1
  misc_feature (18)..(478): Homolog of NCBI NO: 25402861 NR Description: protein F15H18.4 [imported] - Arabidopsis >gi|6714305|gb|AAF26001.1|AC013354_20 F15H18.4 [Arabidopsis
  misc_feature (481)..(823): Homolog of NCBI NO: 25402861 NR Description: protein F15H18.4 [imported] - Arabidopsis >gi|6714305|gb|AAF26001.1|AC013354_20 F15H18.4 [Arabidopsis
  misc_feature (111)..(822): Homolog of NCBI NO: 21741755 NR Description: OSJNBa0060B20.9 [Oryza sativa (japonica
  misc_feature (407)..(821): Homolog of NCBI NO: 38423978 NR Description: PPR-repeat protein-like [Oryza sativa (japonica
  misc_feature (180)..(475): Homolog of NCBI NO: 38423978 NR Description: PPR-repeat protein-like [Oryza sativa (japonica
  misc_feature (80)..(788): Homolog of NCBI NO: 22329268 NR Description: hypothetical protein; protein id: At4g39952.1
  misc_feature (414)..(826): Homolog of NCBI NO: 18483237 NR Description: putative vegetative storage protein [Sorghum
MASLPFNTIPNKVPFSVSSKPSSKHHDEQAHSPSSTSYFHRVSSLCKNGEIKEALSLVTEMDFRNLRIGPEIYGEILQGCVYERDLSTGKQIHARILKNGDFYARNEYIETKLVIFYAKCDALEIAEVLFSKLRVRNVFSWAAIIGVKCRIGLCEGALMGFVEMLENEIFPDNFVVPNVCKACGALKWSRFGRGVHGYVVKSGLEDCVFVASSLADMYGKCGVLDDASKVFDEIPDRNAVAWNALMVGYVQNGKNEEAIRLFSDMRKQGVEPTRVTVSTCLSASANMGGVEEGKQSHAIAIVNGMELDNILGTSLLNFYCKVGLIEYAEMVFDRMFEKDVVTWNLIISGYVQQGLVEDAIYMCQLMRLEKLKYDCVTLATLMSAAARTENLKLGKEVQCYCIRHSFESDIVLASTVMDMYAKCGSIVDAKKVFDSTVEKDLILWNTLLAAYAESGLSGEALRLFYGMQLEGVPPNVITWNLIILSLLRNGQVDEAKDMFLQMQSSGIIPNLISWTTMMNGMVQNGCSEEAILFLRKMQESGLRPNAFSITVALSACAHLASLHIGRTIHGYIIRNLQHSSLVSIETSLVDMYAKCGDINKAEKVFGSKLYSELPLSNAMISAYALYGNLKEAIALYRSLEGVGLKPDNITITNVLSACNHAGDINQAIEIFTDIVSKRSMKPCLEHYGLMVDLLASAGETEKALRLIEEMPFKPDARMIQSLVASCNKQRKTELVDYLSRKLLESEPENSGNYVTISNAYAVEGSWDEVVKMREMMKAKGLKKKPGCSWIQITGEEGVHVFVANDKTHTRINEIQMMFQMIIMCMKYYKFDHVYLDSQELRSFVITVV

SEQ ID NO: 78607 - protein, 788 aa, Arabidopsis thaliana
  peptide (1)..(788): Ceres Seq. ID no. 12643001
  misc_feature (79)..(113): Pfam Name: PPR repeat Pfam Description: PPR repeat
  misc_feature (1)..(544): Homolog of NCBI NO: 34912504 NR Description: selenium-binding protein-like [Oryza sativa
  misc_feature (1)..(418): Homolog of NCBI NO: 18394615 NR Description: hypothetical protein; protein id: At1g18485.1
  misc_feature (421)..(763): Homolog of NCBI NO: 18394615 NR Description: hypothetical protein; protein id: At1g18485.1
  misc_feature (1)..(418): Homolog of NCBI NO: 25402861 NR Description: protein F15H18.4 [imported] - Arabidopsis >gi|6714305|gb|AAF26001.1|AC013354_20 F15H18.4 [Arabidopsis
  misc_feature (421)..(763): Homolog of NCBI NO: 25402861 NR Description: protein F15H18.4 [imported] - Arabidopsis >gi|6714305|gb|AAF26001.1|AC013354_20 F15H18.4 [Arabidopsis
  misc_feature (51)..(762): Homolog of NCBI NO: 21741755 NR Description: OSJNBa0060B20.9 [Oryza sativa (japonica
  misc_feature (347)..(761): Homolog of NCBI NO: 38423978 NR Description: PPR-repeat protein-like [Oryza sativa (japonica
  misc_feature (120)..(415): Homolog of NCBI NO: 38423978 NR Description: PPR-repeat protein-like [Oryza sativa (japonica
  misc_feature (20)..(728): Homolog of NCBI NO: 22329268 NR Description: hypothetical protein; protein id: At4g39952.1
  misc_feature (354)..(766): Homolog of NCBI NO: 18483237 NR Description: putative vegetative storage protein [Sorghum
MDFRNLRIGPEIYGEILQGCVYERDLSTGKQIHARILKNGDFYARNEYIETKLVIFYAKCDALEIAEVLFSKLRVRNVFSWAAIIGVKCRIGLCEGALMGFVEMLENEIFPDNFVVPNVCKACGALKWSRFGRGVHGYVVKSGLEDCVFVASSLADMYGKCGVLDDASKVFDEIPDRNAVAWNALMVGYVQNGKNEEAIRLFSDMRKQGVEPTRVTVSTCLSASANMGGVEEGKQSHAIAIVNGMELDNILGTSLLNFYCKVGLIEYAEMVFDRMFEKDVVTWNLIISGYVQQGLVEDAIYMCQLMRLEKLKYDCVTLATLMSAAARTENLKLGKEVQCYCIRHSFESDIVLASTVMDMYAKCGSIVDAKKVFDSTVEKDLILWNTLLAAYAESGLSGEALRLFYGMQLEGVPPNVITWNLIILSLLRNGQVDEAKDMFLQMQSSGIIPNLISWTTMMNGMVQNGCSEEAILFLRKMQESGLRPNAFSITVALSACAHLASLHIGRTIHGYIIRNLQHSSLVSIETSLVDMYAKCGDINKAEKVFGSKLYSELPLSNAMISAYALYGNLKEAIALYRSLEGVGLKPDNITITNVLSACNHAGDINQAIEIFTDIVSKRSMKPCLEHYGLMVDLLASAGETEKALRLIEEMPFKPDARMIQSLVASCNKQRKTELVDYLSRKLLESEPENSGNYVTISNAYAVEGSWDEVVKMREMMKAKGLKKKPGCSWIQITGEEGVHVFVANDKTHTRINEIQMMFQMIIMCMKYYKFDHVYLDSQELRSFVITVV

SEQ ID NO: 78608 - protein, 690 aa, Arabidopsis thaliana
  peptide (1)..(690): Ceres Seq. ID no. 12643002
  misc_feature (1)..(446): Homolog of NCBI NO: 34912504 NR Description: selenium-binding protein-like [Oryza sativa
  misc_feature (1)..(320): Homolog of NCBI NO: 18394615 NR Description: hypothetical protein; protein id: At1g18485.1
  misc_feature (323)..(665): Homolog of NCBI NO: 18394615 NR Description: hypothetical protein; protein id: At1g18485.1
  misc_feature (1)..(320): Homolog of NCBI NO: 25402861 NR Description: protein F15H18.4 [imported] - Arabidopsis >gi|6714305|gb|AAF26001.1|AC013354_20 F15H18.4 [Arabidopsis
  misc_feature (323)..(665): Homolog of NCBI NO: 25402861 NR Description: protein F15H18.4 [imported] - Arabidopsis >gi|6714305|gb|AAF26001.1|AC013354_20 F15H18.4 [Arabidopsis
  misc_feature (1)..(664): Homolog of NCBI NO: 21741755 NR Description: OSJNBa0060B20.9 [Oryza sativa (japonica
  misc_feature (249)..(663): Homolog of NCBI NO: 38423978 NR Description: PPR-repeat protein-like [Oryza sativa (japonica
  misc_feature (22)..(317): Homolog of NCBI NO: 38423978 NR Description: PPR-repeat protein-like [Oryza sativa (japonica
  misc_feature (1)..(630): Homolog of NCBI NO: 22329268 NR Description: hypothetical protein; protein id: At4g39952.1
  misc_feature (256)..(668): Homolog of NCBI NO: 18483237 NR Description: putative vegetative storage protein [Sorghum
MGFVEMLENEIFPDNFVVPNVCKACGALKWSRFGRGVHGYVVKSGLEDCVFVASSLADMYGKCGVLDDASKVFDEIPDRNAVAWNALMVGYVQNGKNEEAIRLFSDMRKQGVEPTRVTVSTCLSASANMGGVEEGKQSHAIAIVNGMELDNILGTSLLNFYCKVGLIEYAEMVFDRMFEKDVVTWNLIISGYVQQGLVEDAIYMCQLMRLEKLKYDCVTLATLMSAAARTENLKLGKEVQCYCIRHSFESDIVLASTVMDMYAKCGSIVDAKKVFDSTVEKDLILWNTLLAAYAESGLSGEALRLFYGMQLEGVPPNVITWNLIILSLLRNGQVDEAKDMFLQMQSSGIIPNLISWTTMMNGMVQNGCSEEAILFLRKMQESGLRPNAFSITVALSACAHLASLHIGRTIHGYIIRNLQHSSLVSIETSLVDMYAKCGDINKAEKVFGSKLYSELPLSNAMISAYALYGNLKEAIALYRSLEGVGLKPDNITITNVLSACNHAGDINQAIEIFTDIVSKRSMKPCLEHYGLMVDLLASAGETEKALRLIEEMPFKPDARMIQSLVASCNKQRKTELVDYLSRKLLESEPENSGNYVTISNAYAVEGSWDEVVKMREMMKAKGLKKKPGCSWIQITGEEGVHVFVANDKTHTRINEIQMMFQMIIMCMKYYKFDHVYLDSQELRSFVITVV

SEQ ID NO: 78609 - DNA, 717 bp, Arabidopsis thaliana
  misc_feature (1)..(717): Ceres Seq. ID no. 12643013
  misc_feature: MA Experiment ID: 20001557 Result: Down-regulated in Transcription
  misc_feature: MA Experiment 20001557 PARAMETER Experiment Name: At_Drought_Soil_Dry_P Parameter: Age (day) Value: 27
  misc_feature: MA Experiment 20001557 PARAMETER Experiment Name: At_Drought_Soil_Dry_P Parameter: Organism Value: A. thaliana
  misc_feature: MA Experiment 20001557 PARAMETER Experiment Name: At_Drought_Soil_Dry_P Parameter: Plant Line Value: WS
  misc_feature: MA Experiment 20001557 PARAMETER Experiment Name: At_Drought_Soil_Dry_P Parameter: Post Timepoint (hr) Value: 3
  misc_feature: MA Experiment 20001557 PARAMETER Experiment Name: At_Drought_Soil_Dry_P Parameter: Post-Treatment Value: Re-Water vs. No Drought
  misc_feature: MA Experiment 20001557 PARAMETER Experiment Name: At_Drought_Soil_Dry_P Parameter: Timepoint (day) Value: 13
  misc_feature: MA Experiment 20001557 PARAMETER Experiment Name: At_Drought_Soil_Dry_P Parameter: Treatment Value: Drought vs. No Drought
  misc_feature: MA Experiment ID: 20001558 Result: Down-regulated in Transcription
  misc_feature: MA Experiment 20001558 PARAMETER Experiment Name: At_Drought_Soil_Dry_P Parameter: Age (day) Value: 27
  misc_feature: MA Experiment 20001558 PARAMETER Experiment Name: At_Drought_Soil_Dry_P Parameter: Organism Value: A. thaliana
  misc_feature: MA Experiment 20001558 PARAMETER Experiment Name: At_Drought_Soil_Dry_P Parameter: Plant Line Value: WS
  misc_feature: MA Experiment 20001558 PARAMETER Experiment Name: At_Drought_Soil_Dry_P Parameter: Post Timepoint (hr) Value: 6
  misc_feature: MA Experiment 20001558 PARAMETER Experiment Name: At_Drought_Soil_Dry_P Parameter: Post-Treatment Value: Re-Water vs. No Drought
  misc_feature: MA Experiment 20001558 PARAMETER Experiment Name: At_Drought_Soil_Dry_P Parameter: Timepoint (day) Value: 13
  misc_feature: MA Experiment 20001558 PARAMETER Experiment Name: At_Drought_Soil_Dry_P Parameter: Treatment Value: Drought vs. No Drought
atggatgtcccgttaccagtcgagaaattatcttatggatcaaacactgaggacaaaacttgtgtagtgcttgtggcaactgggagtttcaatcctcctactttcatgcatttacgcatgtttgagctggcgagagatgaattacgctcaaaaggatttcatgttcttggaggatatatgtctcctgttaatgatgcatataagaagaagggccttttatctgcagaacatcgtttagagatgtgtaatgtatcatgtcaaagctctgactttgtaatggttgatccgtgggaggcatctcaaagcaactaccaacgaactttgacggttttatcaagggtcaagactttcttaacaacaaatcgacatgtacccgaggaatctctcaaagtcatgctactatgtggctcggatttactgctatctttctgcactcccggtgtttggatccctgaacagttaagaactatttgcaaagattatggcattgtgtgcatccgtagagaaggacaagatgttgaaaatatgatctctggtgacgaaatcttaaacgaaaactgtgctaacgtcaaaatcgttgacaatactgttcctaatcaaatcagttcgagtagattaaggcaatgcatttcgcgagggttatcggttaaatacttgactgaagatggagtaatagattatatcagacaacatcaactatacactgagctcacatga

SEQ ID NO: 78610 - protein, 238 aa, Arabidopsis thaliana
  peptide (1)..(238): Ceres Seq. ID no. 12643014
  misc_feature (81)..(238): Homolog of NCBI NO: 22327861 NR Description: putative protein; protein id: At5g55810.1, by cDNA: gi_17473554 [Arabidopsis thaliana] unknown protein [Arabidopsis thaliana]
  misc_feature (127)..(238): Homolog of NCBI NO: 9758615 NR Description: gene_id:MDF20.25~ref|NP_011524.1~similar to
  misc_feature (130)..(235): Homolog of NCBI NO: 20070321 NR Description: nicotinamide nucleotide adenylyltransferase; NMN [Homo sapiens] >gi|28373465|pdb|1KQN|A Chain A, Crystal Structure NmnNAMN ADENYLYLTRANSFERASE COMPLEXED With Nad NmnNAMN
  misc_feature (15)..(111): Homolog of NCBI NO: 20070321 NR Description: nicotinamide nucleotide adenylyltransferase; NMN [Homo sapiens] >gi|28373465|pdb|1KQN|A Chain A, Crystal Structure NmnNAMN ADENYLYLTRANSFERASE COMPLEXED With Nad NmnNAMN
  misc_feature (130)..(235): Homolog of NCBI NO: 18652051 NR Description: nicotinamide mononucleotide adenylyl transferase sapiens] >gi|18652057|gb|AAL76935.1| nicotinamide mononucleotide
  misc_feature (15)..(111): Homolog of NCBI NO: 18652051 NR Description: nicotinamide mononucleotide adenylyl transferase sapiens] >gi|18652057|gb|AAL76935.1| nicotinamide mononucleotide
  misc_feature (130)..(235): Homolog of NCBI NO: 10438792 NR Description: unnamed protein product [Homo sapiens]
  misc_feature (15)..(111): Homolog of NCBI NO: 10438792 NR Description: unnamed protein product [Homo sapiens]
  misc_feature (130)..(235): Homolog of NCBI NO: 21730493 NR Description: Chain A, Crystal Structure Of Nuclear Human Mononucleotide Adenylyltransferase
  misc_feature (130)..(235): Homolog of NCBI NO: 22218688 NR Description: Chain A, Crystal Structure Of Human Nicotinamide Adenylyltransferase In Complex With Nmn >gi|22218689|pdb|1GZU|B B, Crystal Structure Of Human Nicotinamide Mononucleotide
MDVPLPVEKLSYGSNTEDKTCVVLVATGSFNPPTFMHLRMFELARDELRSKGFHVLGGYMSPVNDAYKKKGLLSAEHRLEMCNVSCQSSDFVMVDPWEASQSNYQRTLTVLSRVKTFLTTNRHVPEESLKVMLLCGSDLLLSFCTPGVWIPEQLRTICKDYGIVCIRREGQDVENMISGDEILNENCANVKIVDNTVPNQISSSRLRQCISRGLSVKYLTEDGVIDYIRQHQLYTELT

SEQ ID NO: 78611 - protein, 203 aa, Arabidopsis thaliana
  peptide (1)..(203): Ceres Seq. ID no. 12643015
  misc_feature (46)..(203): Homolog of NCBI NO: 22327861 NR Description: putative protein; protein id: At5g55810.1, by cDNA: gi_17473554 [Arabidopsis thaliana] unknown protein [Arabidopsis thaliana]
  misc_feature (92)..(203): Homolog of NCBI NO: 9758615 NR Description: gene_id:MDF20.25~ref|NP_011524.1~similar to
  misc_feature (95)..(200): Homolog of NCBI NO: 20070321 NR Description: nicotinamide nucleotide adenylyltransferase; NMN [Homo sapiens] >gi|28373465|pdb|1KQN|A Chain A, Crystal Structure NmnNAMN ADENYLYLTRANSFERASE COMPLEXED With Nad NmnNAMN
  misc_feature (1)..(76): Homolog of NCBI NO: 20070321 NR Description: nicotinamide nucleotide adenylyltransferase; NMN [Homo sapiens] >gi|28373465|pdb|1KQN|A Chain A, Crystal Structure NmnNAMN ADENYLYLTRANSFERASE COMPLEXED With Nad NmnNAMN
  misc_feature (95)..(200): Homolog of NCBI NO: 18652051 NR Description: nicotinamide mononucleotide adenylyl transferase sapiens] >gi|18652057|gb|AAL76935.1| nicotinamide mononucleotide
  misc_feature (1)..(76): Homolog of NCBI NO: 18652051 NR Description: nicotinamide mononucleotide adenylyl transferase sapiens] >gi|18652057|gb|AAL76935.1| nicotinamide mononucleotide
  misc_feature (95)..(200): Homolog of NCBI NO: 10438792 NR Description: unnamed protein product [Homo sapiens]
  misc_feature (1)..(76): Homolog of NCBI NO: 10438792 NR Description: unnamed protein product [Homo sapiens]
  misc_feature (95)..(200): Homolog of NCBI NO: 21730493 NR Description: Chain A, Crystal Structure Of Nuclear Human Mononucleotide Adenylyltransferase
  misc_feature (95)..(200): Homolog of NCBI NO: 22218688 NR Description: Chain A, Crystal Structure Of Human Nicotinamide Adenylyltransferase In Complex With Nmn >gi|22218689|pdb|1GZU|B B, Crystal Structure Of Human Nicotinamide Mononucleotide
MHLRMFELARDELRSKGFHVLGGYMSPVNDAYKKKGLLSAEHRLEMCNVSCQSSDFVMVDPWEASQSNYQRTLTVLSRVKTFLTTNRHVPEESLKVMLLCGSDLLLSFCTPGVWIPEQLRTICKDYGIVCIRREGQDVENMISGDEILNENCANVKIVDNTVPNQISSSRLRQCISRGLSVKYLTEDGVIDYIRQHQLYTELT

SEQ ID NO: 78612 - protein, 199 aa, Arabidopsis thaliana
  peptide (1)..(199): Ceres Seq. ID no. 12643016
  misc_feature (42)..(199): Homolog of NCBI NO: 22327861 NR Description: putative protein; protein id: At5g55810.1, by cDNA: gi_17473554 [Arabidopsis thaliana] unknown protein [Arabidopsis thaliana]
  misc_feature (88)..(199): Homolog of NCBI NO: 9758615 NR Description: gene_id:MDF20.25~ref|NP_011524.1~similar to
  misc_feature (91)..(196): Homolog of NCBI NO: 20070321 NR Description: nicotinamide nucleotide adenylyltransferase; NMN [Homo sapiens] >gi|28373465|pdb|1KQN|A Chain A, Crystal Structure NmnNAMN ADENYLYLTRANSFERASE COMPLEXED With Nad NmnNAMN
  misc_feature (1)..(72): Homolog of NCBI NO: 20070321 NR Description: nicotinamide nucleotide adenylyltransferase; NMN [Homo sapiens] >gi|28373465|pdb|1KQN|A Chain A, Crystal Structure NmnNAMN ADENYLYLTRANSFERASE COMPLEXED With Nad NmnNAMN
  misc_feature (91)..(196): Homolog of NCBI NO: 18652051 NR Description: nicotinamide mononucleotide adenylyl transferase sapiens] >gi|18652057|gb|AAL76935.1| nicotinamide mononucleotide
  misc_feature (1)..(72): Homolog of NCBI NO: 18652051 NR Description: nicotinamide mononucleotide adenylyl transferase sapiens] >gi|18652057|gb|AAL76935.1| nicotinamide mononucleotide
  misc_feature (91)..(196): Homolog of NCBI NO: 10438792 NR Description: unnamed protein product [Homo sapiens]
  misc_feature (1)..(72): Homolog of NCBI NO: 10438792 NR Description: unnamed protein product [Homo sapiens]
  misc_feature (91)..(196): Homolog of NCBI NO: 21730493 NR Description: Chain A, Crystal Structure Of Nuclear Human Mononucleotide Adenylyltransferase
  misc_feature (91)..(196): Homolog of NCBI NO: 22218688 NR Description: Chain A, Crystal Structure Of Human Nicotinamide Adenylyltransferase In Complex With Nmn >gi|22218689|pdb|1GZU|B B, Crystal Structure Of Human Nicotinamide Mononucleotide
MFELARDELRSKGFHVLGGYMSPVNDAYKKKGLLSAEHRLEMCNVSCQSSDFVMVDPWEASQSNYQRTLTVLSRVKTFLTTNRHVPEESLKVMLLCGSDLLLSFCTPGVWIPEQLRTICKDYGIVCIRREGQDVENMISGDEILNENCANVKIVDNTVPNQISSSRLRQCISRGLSVKYLTEDGVIDYIRQHQLYTELT

SEQ ID NO: 78613 - DNA, 1002 bp, Arabidopsis thaliana
  misc_feature (1)..(1002): Ceres Seq. ID no. 12643027
  misc_feature: MA Experiment ID: 20000182 Result: Up-regulated in Transcription
  misc_feature: MA Experiment 20000182 PARAMETER Experiment Name: At_2mM_SA_P Parameter: Age (day) Value: 14
  misc_feature: MA Experiment 20000182 PARAMETER Experiment Name: At_2mM_SA_P Parameter: Organism Value: A. thaliana
  misc_feature: MA Experiment 20000182 PARAMETER Experiment Name: At_2mM_SA_P Parameter: Plant Line Value: WS
  misc_feature: MA Experiment 20000182 PARAMETER Experiment Name: At_2mM_SA_P Parameter: Timepoint (hr) Value: 6
  misc_feature: MA Experiment 20000182 PARAMETER Experiment Name: At_2mM_SA_P Parameter: Tissue Value: Aerial
  misc_feature: MA Experiment 20000182 PARAMETER Experiment Name: At_2mM_SA_P Parameter: Treatment Value: 2mM SA vs. No Treatment
atggatgatgaagagagtaacaacgttgaaagatatgacgacgtcgtattgccagggtttaggttccatcccactgatgaagaactcgtaagtttctacttgaaacggaaggttttacacaaatctcttccctttgatctcatcaagaaagtcgacatttacaaatacgatccatgggacctcccaaagcttgcagcgatgggggaaaaagagtggtacttttattgtcctagagacaggaaataccgcaacagcacaagacctaaccgagtaactggaggtggcttctggaaagcaaccggaacagaccggcctatatactcattggactccactcgatgcatcggtttgaagaaatcacttgtgttctaccgtggtcgagctgctaaaggagtcaaaaccgattggatgatgcatgaatttcgtctcccttctctctctgactctcatcactcatcatatcccaattacaataacaagaagcaacaccttaacaataacaacaacagcaaggagcttccttcaaacgatgcttgggcgatatgtagaatatttaagaagacaaatgcagtatcctcacaaagatcaatcccacaatcttgggtttatccaacgattcctgacaacaatcaacagtcacacaacaacaccgcaactctcttagcttcatcagacgttctcagccacatatcaacaagacaaaactttattccttctccagtcaacgaacccgcaagcttcacagaatcagctgcttcttacttcgcgtctcagatgctcggagtcacgtacaatacagccagaaacaacggaacaggggatgctctgtttctgagaaacaatggaacaggggatgctctggttctgagcaacaatgagaataactacttcaacaacttgactggagggttgactcatgaggttccgaatgtaagatcaatggtgatggaggagactacggggagtgagatgtcggcgacgtcgtattccactaacaattaa

SEQ ID NO: 78614 - protein, 333 aa, Arabidopsis thaliana
  peptide (1)..(333): Ceres Seq. ID no. 12643028
  misc_feature (16)..(144): Pfam Name: No apical meristem (NAM) protein Pfam Description: No apical meristem (NAM) protein
  misc_feature (1)..(333): Homolog of NCBI NO: 10177980 NR Description: NAM (no apical meristem)-like protein
  misc_feature (1)..(333): Homolog of NCBI NO: 15242479 NR Description: NAC domain/ NAM like protein; protein id:
  misc_feature (1)..(253): Homolog of NCBI NO: 15223376 NR Description: putative NAM protein; protein id: At1g26870.1
  misc_feature (1)..(253): Homolog of NCBI NO: 25518578 NR Description: hypothetical protein T2P11.6 - Arabidopsis
  misc_feature (10)..(204): Homolog of NCBI NO: 34897020 NR Description: putative NAM (no apical meristem) protein [Oryza
  misc_feature (10)..(145): Homolog of NCBI NO: 15224202 NR Description: NAM (no apical meristem)-like protein; protein At2g43000.1 [Arabidopsis thaliana] >gi|25408827|pir||G84860 NAM
  misc_feature (13)..(272): Homolog of NCBI NO: 27260923 NR Description: OJ1417_E01.2 [Oryza sativa (japonica
  misc_feature (18)..(225): Homolog of NCBI NO: 34899790 NR Description: OJ1773_H01.21 [Oryza sativa (japonica >gi|24417196|dbj|BAC22555.1| putative OsNAC5 protein [Oryza
  misc_feature (18)..(190): Homolog of NCBI NO: 15232606 NR Description: putative jasmonic acid regulatory protein; id: At3g15510.1, supported by cDNA: gi_12060425 [Arabidopsis
  misc_feature (4)..(220): Homolog of NCBI NO: 30678000 NR Description: No apical meristem (NAM) protein family thaliana] >gi|24030186|gb|AAN41274.1| putative NAM (no apical
MDDEESNNVERYDDVVLPGFRFHPTDEELVSFYLKRKVLHKSLPFDLIKKVDIYKYDPWDLPKLAAMGEKEWYFYCPRDRKYRNSTRPNRVTGGGFWKATGTDRPIYSLDSTRCIGLKKSLVFYRGRAAKGVKTDWMMHEFRLPSLSDSHHSSYPNYNNKKQHLNNNNNSKELPSNDAWAICRIFKKTNAVSSQRSIPQSWVYPTIPDNNQQSHNNTATLLASSDVLSHISTRQNFIPSPVNEPASFTESAASYFASQMLGVTYNTARNNGTGDALFLRNNGTGDALVLSNNENNYFNNLTGGLTHEVPNVRSMVMEETTGSEMSATSYSTNN

SEQ ID NO: 78615 - protein, 267 aa, Arabidopsis thaliana
  peptide (1)..(267): Ceres Seq. ID no. 12643029
  misc_feature (1)..(78): Pfam Name: No apical meristem (NAM) protein Pfam Description: No apical meristem (NAM) protein
  misc_feature (1)..(267): Homolog of NCBI NO: 10177980 NR Description: NAM (no apical meristem)-like protein
  misc_feature (1)..(267): Homolog of NCBI NO: 15242479 NR Description: NAC domain/ NAM like protein; protein id:
  misc_feature (1)..(187): Homolog of NCBI NO: 15223376 NR Description: putative NAM protein; protein id: At1g26870.1
  misc_feature (1)..(187): Homolog of NCBI NO: 25518578 NR Description: hypothetical protein T2P11.6 - Arabidopsis
  misc_feature (1)..(138): Homolog of NCBI NO: 34897020 NR Description: putative NAM (no apical meristem) protein [Oryza
  misc_feature (1)..(79): Homolog of NCBI NO: 15224202 NR Description: NAM (no apical meristem)-like protein; protein At2g43000.1 [Arabidopsis thaliana] >gi|25408827|pir||G84860 NAM
  misc_feature (1)..(206): Homolog of NCBI NO: 27260923 NR Description: OJ1417_E01.2 [Oryza sativa (japonica
  misc_feature (1)..(159): Homolog of NCBI NO: 34899790 NR Description: OJ1773_H01.21 [Oryza sativa (japonica >gi|24417196|dbj|BAC22555.1| putative OsNAC5 protein [Oryza
  misc_feature (1)..(124): Homolog of NCBI NO: 15232606 NR Description: putative jasmonic acid regulatory protein; id: At3g15510.1, supported by cDNA: gi_12060425 [Arabidopsis
  misc_feature (1)..(154): Homolog of NCBI NO: 30678000 NR Description: No apical meristem (NAM) protein family thaliana] >gi|24030186|gb|AAN41274.1| putative NAM (no apical
MGEKEWYFYCPRDRKYRNSTRPNRVTGGGFWKATGTDRPIYSLDSTRCIGLKKSLVFYRGRAAKGVKTDWMMHEFRLPSLSDSHHSSYPNYNNKKQHLNNNNNSKELPSNDAWAICRIFKKTNAVSSQRSIPQSWVYPTIPDNNQQSHNNTATLLASSDVLSHISTRQNFIPSPVNEPASFTESAASYFASQMLGVTYNTARNNGTGDALFLRNNGTGDALVLSNNENNYFNNLTGGLTHEVPNVRSMVMEETTGSEMSATSYSTNN

SEQ ID NO: 78616 - protein, 197 aa, Arabidopsis thaliana
  peptide (1)..(197): Ceres Seq. ID no. 12643030
  misc_feature (1)..(197): Homolog of NCBI NO: 10177980 NR Description: NAM (no apical meristem)-like protein
  misc_feature (1)..(197): Homolog of NCBI NO: 15242479 NR Description: NAC domain/ NAM like protein; protein id:
  misc_feature (1)..(117): Homolog of NCBI NO: 15223376 NR Description: putative NAM protein; protein id: At1g26870.1
  misc_feature (1)..(117): Homolog of NCBI NO: 25518578 NR Description: hypothetical protein T2P11.6 - Arabidopsis
  misc_feature (1)..(68): Homolog of NCBI NO: 34897020 NR Description: putative NAM (no apical meristem) protein [Oryza
  misc_feature (1)..(136): Homolog of NCBI NO: 27260923 NR Description: OJ1417_E01.2 [Oryza sativa (japonica
  misc_feature (1)..(89): Homolog of NCBI NO: 34899790 NR Description: OJ1773_H01.21 [Oryza sativa (japonica >gi|24417196|dbj|BAC22555.1| putative OsNAC5 protein [Oryza
  misc_feature (1)..(54): Homolog of NCBI NO: 15232606 NR Description: putative jasmonic acid regulatory protein; id: At3g15510.1, supported by cDNA: gi_12060425 [Arabidopsis
  misc_feature (1)..(84): Homolog of NCBI NO: 30678000 NR Description: No apical meristem (NAM) protein family thaliana] >gi|24030186|gb|AAN41274.1| putative NAM (no apical
  misc_feature (1)..(84): Homolog of NCBI NO: 30678002 NR Description: No apical meristem (NAM) protein family
MMHEFRLPSLSDSHHSSYPNYNNKKQHLNNNNNSKELPSNDAWAICRIFKKTNAVSSQRSIPQSWVYPTIPDNNQQSHNNTATLLASSDVLSHISTRQNFIPSPVNEPASFTESAASYFASQMLGVTYNTARNNGTGDALFLRNNGTGDALVLSNNENNYFNNLTGGLTHEVPNVRSMVMEETTGSEMSATSYSTNN

SEQ ID NO: 78617 - DNA, 723 bp, Arabidopsis thaliana
  misc_feature (1)..(723): Ceres Seq. ID no. 12643105
  misc_feature: MA Experiment ID: 20000495 Result: Down-regulated in Transcription
  misc_feature: MA Experiment 20000495 PARAMETER Experiment Name: At_Guard_Cells_P Parameter: Harvest Date Value: 8/2/2002
  misc_feature: MA Experiment 20000495 PARAMETER Experiment Name: At_Guard_Cells_P Parameter: Organism Value: A. thaliana
  misc_feature: MA Experiment 20000495 PARAMETER Experiment Name: At_Guard_Cells_P Parameter: Tissue Value: Guard Cells vs. Leaves
  misc_feature: MA Experiment ID: 20001451 Result: Down-regulated in Transcription
  misc_feature: MA Experiment 20001451 PARAMETER Experiment Name: At_Far-red-induction_P Parameter: Age (day) Value: 7
  misc_feature: MA Experiment 20001451 PARAMETER Experiment Name: At_Far-red-induction_P Parameter: Light Value: Far-red vs. White
  misc_feature: MA Experiment 20001451 PARAMETER Experiment Name: At_Far-red-induction_P Parameter: Organism Value: A. thaliana
  misc_feature: MA Experiment 20001451 PARAMETER Experiment Name: At_Far-red-induction_P Parameter: Plant Line Value: Columbia
  misc_feature: MA Experiment 20001451 PARAMETER Experiment Name: At_Far-red-induction_P Parameter: Timepoint (hr) Value: 24
  misc_feature: MA Experiment 20001451 PARAMETER Experiment Name: At_Far-red-induction_P Parameter: Tissue Value: Whole Plant
  misc_feature: MA Experiment ID: 20001560 Result: Down-regulated in Transcription
  misc_feature: MA Experiment 20001560 PARAMETER Experiment Name: At_Drought_Soil_Dry_P Parameter: Age (day) Value: 28
  misc_feature: MA Experiment 20001560 PARAMETER Experiment Name: At_Drought_Soil_Dry_P Parameter: Organism Value: A. thaliana
  misc_feature: MA Experiment 20001560 PARAMETER Experiment Name: At_Drought_Soil_Dry_P Parameter: Plant Line Value: WS
  misc_feature: MA Experiment 20001560 PARAMETER Experiment Name: At_Drought_Soil_Dry_P Parameter: Post Timepoint (hr) Value: None
  misc_feature: MA Experiment 20001560 PARAMETER Experiment Name: At_Drought_Soil_Dry_P Parameter: Post-Treatment Value: None
  misc_feature: MA Experiment 20001560 PARAMETER Experiment Name: At_Drought_Soil_Dry_P Parameter: Timepoint (day) Value: 14
  misc_feature: MA Experiment 20001560 PARAMETER Experiment Name: At_Drought_Soil_Dry_P Parameter: Treatment Value: Drought vs. No Drought
atgtcttcaagatcatcacttcattcattaccacaaacaacgattgaatcacctcctgattcaccaaccctctcttcaatccccgatagccatggatcttctcctcacacgattattccaactccttctgtggccaagacggagactccttttagggttactaacggagaggaggagaagaaagtcagcgagagtaggagacaattgagaccgagcttttcttcttcttcttctactccgcgtgaatcgaaatgggcaagtttgattaggaaagctctacttggatttagggttattgcgtttgtttcgtgtcttgtttcgttctctgtaatggtttctgatagagataaaggatgggctcatgattctttctacaactacaaagaattcaggttctgtttggctgcgaatgtgattggttttgtctactctggttttatgatatgtgatcttgtatacctgttatctactagcatccgaagatcacgacataacctgcgacatttcttggaatttggtcttgatcaaatgctagcttatcttcttgcatcagcttcaacttcagcttcgatccgcgtagatgattggcaatcaaactggggagcagacaagttcccagacttagctagagcatctgtcgcactgtcttacgtctcctttgtcgcattcgccttctgctcattggcttccggttatgctctatgtgcactccggtccatctaa

SEQ ID NO: 78618 - protein, 240 aa, Arabidopsis thaliana; identical to SEQ ID NO: 37753
  peptide (1)..(240): Ceres Seq. ID no. 12643106
  misc_feature (86)..(222): Pfam Name: Domain of unknown function (DUF588) Pfam Description: Domain of unknown function (DUF588)
  misc_feature (1)..(240): Homolog of NCBI NO: 15242642 NR Description: putative protein; protein id: At5g40300.1 thaliana] >gi|10178139|dbj|BAB11584.1| gene_id:MPO12.1~unknown
  misc_feature (2)..(234): Homolog of NCBI NO: 27754604 NR Description: unknown protein [Arabidopsis thaliana]
  misc_feature (75)..(234): Homolog of NCBI NO: 15241975 NR Description: putative protein; protein id: At5g62820.1
  misc_feature (81)..(235): Homolog of NCBI NO: 2598569 NR Description: putative start codon [Medicago truncatula]
  misc_feature (75)..(136): Homolog of NCBI NO: 10177460 NR Description: gene_id:MQB2.14~unknown protein [Arabidopsis
  misc_feature (180)..(234): Homolog of NCBI NO: 10177460 NR Description: gene_id:MQB2.14~unknown protein [Arabidopsis
  misc_feature (143)..(234): Homolog of NCBI NO: 15227628 NR Description: hypothetical protein; protein id: At2g36330.1
  misc_feature (91)..(234): Homolog of NCBI NO: 28876007 NR Description: hypothetical protein [Oryza sativa (japonica
  misc_feature (2)..(179): Homolog of NCBI NO: 15227628 NR Description: hypothetical protein; protein id: At2g36330.1

SEQ ID NO: 78619 - protein, 130 aa, Arabidopsis thaliana
  peptide (1)..(130): Ceres Seq. ID no. 12643107
  misc_feature (1)..(112): Pfam Name: Domain of unknown function (DUF588) Pfam Description: Domain of unknown function (DUF588)
  misc_feature (1)..(130): Homolog of NCBI NO: 15242642 NR Description: putative protein; protein id: At5g40300.1 thaliana] >gi|10178139|dbj|BAB11584.1| gene_id:MPO12.1~unknown
  misc_feature (1)..(124): Homolog of NCBI NO: 27754604 NR Description: unknown protein [Arabidopsis thaliana]
  misc_feature (1)..(124): Homolog of NCBI NO: 15241975 NR Description: putative protein; protein id: At5g62820.1
  misc_feature (1)..(125): Homolog of NCBI NO: 2598569 NR Description: putative start codon [Medicago truncatula]
  misc_feature (1)..(26): Homolog of NCBI NO: 10177460 NR Description: gene_id:MQB2.14~unknown protein [Arabidopsis
  misc_feature (70)..(124): Homolog of NCBI NO: 10177460 NR Description: gene_id:MQB2.14~unknown protein [Arabidopsis
  misc_feature (33)..(124): Homolog of NCBI NO: 15227628 NR Description: hypothetical protein; protein id: At2g36330.1
  misc_feature (1)..(124): Homolog of NCBI NO: 28876007 NR Description: hypothetical protein [Oryza sativa (japonica
  misc_feature (1)..(69): Homolog of NCBI NO: 15227628 NR Description: hypothetical protein; protein id: At2g36330.1
MVSDRDKGWAHDSFYNYKEFRFCLAANVIGFVYSGFMICDLVYLLSTSIRRSRHNLRHFLEFGLDQMLAYLLASASTSASIRVDDWQSNWGADKFPDLARASVALSYVSFVAFAFCSLASGYALCALRSI

SEQ ID NO: 78620 - DNA, 1391 bp, Arabidopsis thaliana
  misc_feature (1)..(1391): Ceres Seq. ID no. 12643137
  misc_feature: MA Experiment ID: 20000180 Result: Up-regulated in Transcription
  misc_feature: MA Experiment 20000180 PARAMETER Experiment Name: At_Germinating_Seeds_P Parameter: Age (hr) Value: 24 vs. 0
  misc_feature: MA Experiment 20000180 PARAMETER Experiment Name: At_Germinating_Seeds_P Parameter: Tissue Value: Germinating Seeds
  misc_feature: MA Experiment ID: 20000184 Result: Up-regulated in Transcription
  misc_feature: MA Experiment 20000184 PARAMETER Experiment Name: At_Shoots__P Parameter: Age (day) Value: 7
  misc_feature: MA Experiment 20000184 PARAMETER Experiment Name: At_Shoots__P Parameter: Tissue Value: Shoots vs. Whole Plant
  misc_feature: MA Experiment ID: 20000185 Result: Up-regulated in Transcription
  misc_feature: MA Experiment 20000185 PARAMETER Experiment Name: At_Roots__P Parameter: Age (day) Value: 7 vs. 21
  misc_feature: MA Experiment 20000185 PARAMETER Experiment Name: At_Roots__P Parameter: Organism Value: A. thaliana
  misc_feature: MA Experiment 20000185 PARAMETER Experiment Name: At_Roots__P Parameter: Tissue Value: Roots vs. Whole Plant
  misc_feature: MA Experiment ID: 20000439 Result: Up-regulated in Transcription
  misc_feature: MA Experiment 20000439 PARAMETER Experiment Name: At_Roots__P Parameter: Age (day) Value: 14 vs. 21
  misc_feature: MA Experiment 20000439 PARAMETER Experiment Name: At_Roots__P Parameter: Organism Value: A. thaliana
  misc_feature: MA Experiment 20000439 PARAMETER Experiment Name: At_Roots__P Parameter: Tissue Value: Roots vs. Whole Plant
  misc_feature: MA Experiment ID: 20000527 Result: Down-regulated in Transcription
  misc_feature: MA Experiment 20000527 PARAMETER Experiment Name: At_10percent_PEG_P Parameter: Age (day) Value: 20
  misc_feature: MA Experiment 20000527 PARAMETER Experiment Name: At_10percent_PEG_P Parameter: Organism Value: A. thaliana
  misc_feature: MA Experiment 20000527 PARAMETER Experiment Name: At_10percent_PEG_P Parameter: Plant Line Value: WS
  misc_feature: MA Experiment 20000527 PARAMETER Experiment Name: At_10percent_PEG_P Parameter: Timepoint (day) Value: 20
  misc_feature: MA Experiment 20000527 PARAMETER Experiment Name: At_10percent_PEG_P Parameter: Tissue Value: Whole Plant
  misc_feature: MA Experiment 20000527 PARAMETER Experiment Name: At_10percent_PEG_P Parameter: Treatment Value: 10percent PEG vs. No Treatment
attgcactcttcctccattttttgattacttccatttcctcaaaagtcaaagctctctttcttctctctcgagatttgctaacttgtcaatggcggatgttgagaatctgaactctgttccggcgtcggaagacacagagtatggatttaaacggccggagatgtacagcacaaacatagccaattccataacttcctacgctcgtcatgtttttgttctttacaaaactcctgaagcttggctctctcacgtcgaagaagaaggtttacctcaacgtttcgctacgttgcttaaagatcgcaaatctgatcttcttgttcagacgaagctcaatgtatgtgaaggtggtggatctgacggtgatgttttgatttttcccgatatgatcagatacaagggggttaaggatacggatgtggaaggtttctttgaagatgttcttgtgaatgggaagccatggagttctgggatacaagaagagatatctggaacatttgtatttgtgtgtactcatgctagtcgtgacaagagatgtggtgtttgtggaccagtgatcttggagaggtttaagcaagagattggttctcgaggactgtcggaccagattacactgaaacgttgttctcatgttggacagcacaagtatgctggtaatttgatcatcttctgtcctgattcagctggaaagattactggcaattggtatggctatgtaacacctgatgatgtacctgaattgcttgatcaacatattgcaaaaggagaaatcatacaaaggatttggagggggcaaatgggtctacctggaggtgaagctgagaaagtgcatgaacagaaagttataccaaatggtcacggtgtagtgaaagaggagagcaaaggattcacaggaggatgttgtcagggatcaaacggtgtttcgtgttgccaagacgaaactccaaagccagagccaatcaagaaagaagtaaaaaagtgtaccatatggttccagcctcttgacaaagaagagctttacattggagctgctgtggttggagccattgcaactatagccatggctttcacctttttcaagaggtcaggttaagaacctaaccttacttacttaccaatagaagtttttccttggagattgccatgagacaatagaaaaagaaaacctccattgattcgaccacaaaacagaagcgaagaattatgtttttgtctttgattttaccattaaagaaacatataaactttttggtttctgtgagcgtttttttgccttgctatcttctcacattatgtgtttttgttgtaatggccataacttctgtgattggtctaaactctctcactttggtgcattaacaaaactttgatttggtttggtttggcttatgtt

SEQ ID NO: 78621 - protein, 362 aa, Arabidopsis thaliana
  peptide (1)..(362): Ceres Seq. ID no. 12643138
  misc_feature (30)..(362): Homolog of NCBI NO: 15237439 NR Description: sucrose cleavage protein -like; protein id: supported by cDNA: 148108., supported by cDNA: gi_17979495, by cDNA: gi_20147290 [Arabidopsis thaliana]
  misc_feature (30)..(362): Homolog of NCBI NO: 21553503 NR Description: sucrose cleavage protein-like [Arabidopsis
  misc_feature (54)..(362): Homolog of NCBI NO: 9758077 NR Description: sucrose cleavage protein-like [Arabidopsis
  misc_feature (9)..(362): Homolog of NCBI NO: 30688845 NR Description: sucrose cleavage protein -related [Arabidopsis
  misc_feature (34)..(362): Homolog of NCBI NO: 16604338 NR Description: AT3g27570/MMJ24_12 [Arabidopsis thaliana]
  misc_feature (54)..(362): Homolog of NCBI NO: 11994184 NR Description: sucrose cleavage protein-like [Arabidopsis
  misc_feature (54)..(361): Homolog of NCBI NO: 1086252 NR Description: sucrose cleavage protein - potato
  misc_feature (44)..(316): Homolog of NCBI NO: 16604384 NR Description: AT4g26620/T15N24_70 [Arabidopsis thaliana]
  misc_feature (44)..(316): Homolog of NCBI NO: 18416788 NR Description: sucrase-like protein; protein id: At4g26620.1, by cDNA: 111209., supported by cDNA: gi_16604383 [Arabidopsis
  misc_feature (59)..(311): Homolog of NCBI NO: 15241075 NR Description: sucrose cleavage protein-like; protein id: supported by cDNA: 43010. [Arabidopsis thaliana]
CTLPPFFDYFHFLKSQSSLSSLSRFANLSMADVENLNSVPASEDTEYGFKRPEMYSTNIANSITSYARHVFVLYKTPEAWLSHVEEEGLPQRFATLLKDRKSDLLVQTKLNVCEGGGSDGDVLIFPDMIRYKGVKDTDVEGFFEDVLVNGKPWSSGIQEEISGTFVFVCTHASRDKRCGVCGPVILERFKQEIGSRGLSDQITLKRCSHVGQHKYAGNLIIFCPDSAGKITGNWYGYVTPDDVPELLDQHIAKGEIIQRIWRGQMGLPGGEAEKVHEQKVIPNGHGVVKEESKGFTGGCCQGSNGVSCCQDETPKPEPIKKEVKKCTIWFQPLDKEELYIGAAVVGAIATIAMAFTFFKRSG

SEQ ID NO: 78622 - protein, 333 aa, Arabidopsis thaliana; identical to SEQ ID NO: 42513
  peptide (1)..(333): Ceres Seq. ID no. 12643139
  misc_feature (1)..(333): Homolog of NCBI NO: 15237439 NR Description: sucrose cleavage protein -like; protein id: supported by cDNA: 148108., supported by cDNA: gi_17979495, by cDNA: gi_20147290 [Arabidopsis thaliana]
  misc_feature (1)..(333): Homolog of NCBI NO: 21553503 NR Description: sucrose cleavage protein-like [Arabidopsis
  misc_feature (25)..(333): Homolog of NCBI NO: 9758077 NR Description: sucrose cleavage protein-like [Arabidopsis
  misc_feature (1)..(333): Homolog of NCBI NO: 30688845 NR Description: sucrose cleavage protein -related [Arabidopsis
  misc_feature (5)..(333): Homolog of NCBI NO: 16604338 NR Description: AT3g27570/MMJ24_12 [Arabidopsis thaliana]
  misc_feature (25)..(333): Homolog of NCBI NO: 11994184 NR Description: sucrose cleavage protein-like [Arabidopsis
  misc_feature (25)..(332): Homolog of NCBI NO: 1086252 NR Description: sucrose cleavage protein - potato
  misc_feature (15)..(287): Homolog of NCBI NO: 16604384 NR Description: AT4g26620/T15N24_70 [Arabidopsis thaliana]
  misc_feature (15)..(287): Homolog of NCBI NO: 18416788 NR Description: sucrase-like protein; protein id: At4g26620.1, by cDNA: 111209., supported by cDNA: gi_16604383 [Arabidopsis
  misc_feature (30)..(282): Homolog of NCBI NO: 15241075 NR Description: sucrose cleavage protein-like; protein id: supported by cDNA: 43010. [Arabidopsis thaliana]

SEQ ID NO: 78623 - protein, 309 aa, Arabidopsis thaliana; identical to SEQ ID NO: 42514
  peptide (1)..(309): Ceres Seq. ID no. 12643140
  misc_feature (1)..(309): Homolog of NCBI NO: 15237439 NR Description: sucrose cleavage protein -like; protein id: supported by cDNA: 148108., supported by cDNA: gi_17979495, by cDNA: gi_20147290 [Arabidopsis thaliana]
  misc_feature (1)..(309): Homolog of NCBI NO: 21553503 NR Description: sucrose cleavage protein-like [Arabidopsis
  misc_feature (1)..(309): Homolog of NCBI NO: 9758077 NR Description: sucrose cleavage protein-like [Arabidopsis
  misc_feature (1)..(309): Homolog of NCBI NO: 30688845 NR Description: sucrose cleavage protein -related [Arabidopsis
  misc_feature (1)..(309): Homolog of NCBI NO: 16604338 NR Description: AT3g27570/MMJ24_12 [Arabidopsis thaliana]
  misc_feature (1)..(309): Homolog of NCBI NO: 11994184 NR Description: sucrose cleavage protein-like [Arabidopsis
  misc_feature (1)..(308): Homolog of NCBI NO: 1086252 NR Description: sucrose cleavage protein - potato
  misc_feature (1)..(263): Homolog of NCBI NO: 16604384 NR Description: AT4g26620/T15N24_70 [Arabidopsis thaliana]
  misc_feature (1)..(263): Homolog of NCBI NO: 18416788 NR Description: sucrase-like protein; protein id: At4g26620.1, by cDNA: 111209., supported by cDNA: gi_16604383 [Arabidopsis
  misc_feature (6)..(258): Homolog of NCBI NO: 15241075 NR Description: sucrose cleavage protein-like; protein id: supported by cDNA: 43010. [Arabidopsis thaliana]

SEQ ID NO: 78624 - DNA, 1086 bp, Arabidopsis thaliana
  misc_feature (1)..(1086): Ceres Seq. ID no. 12643192
  misc_feature: MA Experiment ID: 108434 Result: Up-regulated in Transcription
  misc_feature: MA Experiment 108434 PARAMETER Experiment Name: At_Root_Tips_cDNA_P Parameter: Tissue Value: Root Tips
  misc_feature: MA Experiment ID: 108573 Result: Up-regulated in Transcription
  misc_feature: MA Experiment 108573 PARAMETER Experiment Name: At_Drought_cDNA_P Parameter: Timepoint (hr) Value: 6
  misc_feature: MA Experiment 108573 PARAMETER Experiment Name: At_Drought_cDNA_P Parameter: Tissue Value: Aerial
  misc_feature: MA Experiment 108573 PARAMETER Experiment Name: At_Drought_cDNA_P Parameter: Treatment Value: Drought vs. No Drought
  misc_feature: MA Experiment ID: 108594 Result: Down-regulated in Transcription
  misc_feature: MA Experiment 108594 PARAMETER Experiment Name: At_Ler-rhl_Root_cDNA_P Parameter: Plant Line Value: null
  misc_feature: MA Experiment ID: 108595 Result: Down-regulated in Transcription
  misc_feature: MA Experiment 108595 PARAMETER Experiment Name: At_Ler-pi_Ovule_cDNA_P Parameter: Plant Line Value: null
  misc_feature: MA Experiment ID: 20000087 Result: Down-regulated in Transcription
  misc_feature: MA Experiment 20000087 PARAMETER Experiment Name: At_100uM_ABA_Mutants_cDNA_P Parameter: Plant Line Value: WS
  misc_feature: MA Experiment 20000087 PARAMETER Experiment Name: At_100uM_ABA_Mutants_cDNA_P Parameter: Timepoint (hr) Value: 6
  misc_feature: MA Experiment 20000087 PARAMETER Experiment Name: At_100uM_ABA_Mutants_cDNA_P Parameter: Tissue Value: Aerial
  misc_feature: MA Experiment 20000087 PARAMETER Experiment Name: At_100uM_ABA_Mutants_cDNA_P Parameter: Treatment Value: 100uM ABA vs. No Treatment
  misc_feature: MA Experiment ID: 20000224 Result: Down-regulated in Transcription
atgacccataagtccagtcgcgtcatccggagacatccattttctctggtagctgtttacttcttcttcttcttcttcttcttcttcctcctcctctgttcgtcaatcgccgatctcgttgcttcattttccttgagatcgattggtacaagtgttcatccaatggttggaggaggagttatccggcagcttcttagaaggaaacttcattcccaatcagtcgcaactccggtattgtcatggttgtcttcgaagaaagcgaatgaagatgctgggtctgctggtttaagagcatttgctctcatgggtgctggtattaccggattattgagtttttctactgttgcatctgctgatgaggctgaacatggtctggagtgtcctaactacccttggccacatgagggcattctcagctcatatgaccatgcttcgatccgtcgtggtcaccaagtttatcagcaagtttgtgcgtcttgccattcgatgtctctgatctcataccgagacttggtgggtgttgcctacacagaggaagaggcgaaggccatggcagctgaaatcgaggttgttgatggaccaaatgatgagggtgagatgttcacccgacctggtaaactcagtgatcggcttcctgaaccatactcaaatgaatcggctgctaggttcgccaatggaggagcgtatccaccggatctaagtcttgtaactaaggcacgtcacaatggccaaaattatgtctttgctctgttgactggttatcgtgatcctcctgctggaatttcgatcagagaggggctacactacaatccttatttccctggtggagcaatcgctatgccaaaaatgctcaacgatgaagctgtggaatatgaagatggaactcctgcaacagaagcacagatgggtaaagatgttgtatccttcttgtcctgggcagctgaaccagagatggaagagaggaaattgatggggttcaaatggatattcttactgtctttggctctgcttcaagctgcgtattacaggagactgaaatggtcagtactcaaatcccgtaagcttgttctcgacgttgttaactaa

SEQ ID NO: 78625 - protein, 361 aa, Arabidopsis thaliana
  peptide (1)..(361): Ceres Seq. ID no. 12643193
  misc_feature (126)..(351): Pfam Name: Cytochrome C1 family Pfam Description: Cytochrome C1 family
  misc_feature (55)..(361): Homolog of NCBI NO: 15237497 NR Description: cytochrome c1 precursor; protein id: At5g40810.1, by cDNA: gi_15215623 [Arabidopsis thaliana]
  misc_feature (55)..(361): Homolog of NCBI NO: 15215624 NR Description: AT5g40810/MHK7_4 [Arabidopsis thaliana]
  misc_feature (55)..(361): Homolog of NCBI NO: 15232125 NR Description: cytochrome c, putative; protein id: At3g27240.1, by cDNA: 41320., supported by cDNA: gi_15809955, supported by gi_17981652 [Arabidopsis thaliana] >gi|9294217|dbj|BAB02119.1|
  misc_feature (55)..(361): Homolog of NCBI NO: 21593678 NR Description: cytochrome c, putative [Arabidopsis thaliana]
  misc_feature (55)..(361): Homolog of NCBI NO: 15809956 NR Description: AT3g27240/K17E12_6 [Arabidopsis thaliana]
  misc_feature (91)..(361): Homolog of NCBI NO: 82263 NR Description: ubiquinol-cytochrome-c reductase (EC 1.10.2.2)
  misc_feature (91)..(361): Homolog of NCBI NO: 7547401 NR Description: cytochrome c1 precursor [Solanum tuberosum]
  misc_feature (91)..(361): Homolog of NCBI NO: 117765 NR Description: Cytochrome c1, heme protein, mitochondrial (Clone PC13III) >gi|21439|emb|CAA44055.1| cytochrome c1 [Solanum
  misc_feature (102)..(361): Homolog of NCBI NO: 82264 NR Description: ubiquinol-cytochrome-c reductase (EC 1.10.2.2)
  misc_feature (45)..(361): Homolog of NCBI NO: 12005507 NR Description: cytochrome c1 [Chlamydomonas reinhardtii]
MTHKSSRVIRRHPFSLVAVYFFFFFFFFFLLLCSSIADLVASFSLRSIGTSVHPMVGGGVIRQLLRRKLHSQSVATPVLSWLSSKKANEDAGSAGLRAFALMGAGITGLLSFSTVASADEAEHGLECPNYPWPHEGILSSYDHASIRRGHQVYQQVCASCHSMSLISYRDLVGVAYTEEEAKAMAAEIEVVDGPNDEGEMFTRPGKLSDRLPEPYSNESAARFANGGAYPPDLSLVTKARHNGQNYVFALLTGYRDPPAGISIREGLHYNPYFPGGAIAMPKMLNDEAVEYEDGTPATEAQMGKDVVSFLSWAAEPEMEERKLMGFKWIFLLSLALLQAAYYRRLKWSVLKSRKLVLDVVN

SEQ ID NO: 78626 - protein, 307 aa, Arabidopsis thaliana; identical to SEQ ID NO: 40157
  peptide (1)..(307): Ceres Seq. ID no. 12643194
  misc_feature (72)..(297): Pfam Name: Cytochrome C1 family Pfam Description: Cytochrome C1 family
  misc_feature (1)..(307): Homolog of NCBI NO: 15237497 NR Description: cytochrome c1 precursor; protein id: At5g40810.1, by cDNA: gi_15215623 [Arabidopsis thaliana]
  misc_feature (1)..(307): Homolog of NCBI NO: 15215624 NR Description: AT5g40810/MHK7_4 [Arabidopsis thaliana]
  misc_feature (1)..(307): Homolog of NCBI NO: 15232125 NR Description: cytochrome c, putative; protein id: At3g27240.1, by cDNA: 41320., supported by cDNA: gi_15809955, supported by gi_17981652 [Arabidopsis thaliana] >gi|9294217|dbj|BAB02119.1|
  misc_feature (1)..(307): Homolog of NCBI NO: 21593678 NR Description: cytochrome c, putative [Arabidopsis thaliana]
  misc_feature (1)..(307): Homolog of NCBI NO: 15809956 NR Description: AT3g27240/K17E12_6 [Arabidopsis thaliana]
  misc_feature (37)..(307): Homolog of NCBI NO: 82263 NR Description: ubiquinol-cytochrome-c reductase (EC 1.10.2.2)
  misc_feature (37)..(307): Homolog of NCBI NO: 7547401 NR Description: cytochrome c1 precursor [Solanum tuberosum]
  misc_feature (37)..(307): Homolog of NCBI NO: 117765 NR Description: Cytochrome c1, heme protein, mitochondrial (Clone PC13III) >gi|21439|emb|CAA44055.1| cytochrome c1 [Solanum
  misc_feature (48)..(307): Homolog of NCBI NO: 82264 NR Description: ubiquinol-cytochrome-c reductase (EC 1.10.2.2)
  misc_feature (1)..(307): Homolog of NCBI NO: 12005507 NR Description: cytochrome c1 [Chlamydomonas reinhardtii]

SEQ ID NO: 78627 - protein, 260 aa, Arabidopsis thaliana; identical to SEQ ID NO: 23964
  peptide (1)..(260): Ceres Seq. ID no. 12643195
  misc_feature (25)..(250): Pfam Name: Cytochrome C1 family Pfam Description: Cytochrome C1 family
  misc_feature (1)..(260): Homolog of NCBI NO: 15237497 NR Description: cytochrome c1 precursor; protein id: At5g40810.1, by cDNA: gi_15215623 [Arabidopsis thaliana]
  misc_feature (1)..(260): Homolog of NCBI NO: 15215624 NR Description: AT5g40810/MHK7_4 [Arabidopsis thaliana]
  misc_feature (1)..(260): Homolog of NCBI NO: 15232125 NR Description: cytochrome c, putative; protein id: At3g27240.1, by cDNA: 41320., supported by cDNA: gi_15809955, supported by gi_17981652 [Arabidopsis thaliana] >gi|9294217|dbj|BAB02119.1|
  misc_feature (1)..(260): Homolog of NCBI NO: 21593678 NR Description: cytochrome c, putative [Arabidopsis thaliana]
  misc_feature (1)..(260): Homolog of NCBI NO: 15809956 NR Description: AT3g27240/K17E12_6 [Arabidopsis thaliana]
  misc_feature (1)..(260): Homolog of NCBI NO: 82263 NR Description: ubiquinol-cytochrome-c reductase (EC 1.10.2.2)
  misc_feature (1)..(260): Homolog of NCBI NO: 7547401 NR Description: cytochrome c1 precursor [Solanum tuberosum]
  misc_feature (1)..(260): Homolog of NCBI NO: 117765 NR Description: Cytochrome c1, heme protein, mitochondrial (Clone PC13III) >gi|21439|emb|CAA44055.1| cytochrome c1 [Solanum
  misc_feature (1)..(260): Homolog of NCBI NO: 82264 NR Description: ubiquinol-cytochrome-c reductase (EC 1.10.2.2)
  misc_feature (1)..(260): Homolog of NCBI NO: 12005507 NR Description: cytochrome c1 [Chlamydomonas reinhardtii]

SEQ ID NO: 78628 - DNA, 906 bp, Arabidopsis thaliana
  misc_feature (1)..(906): Ceres Seq. ID no. 12643383
  misc_feature: MA Experiment ID: 20000173 Result: Down-regulated in Transcription
  misc_feature: MA Experiment 20000173 PARAMETER Experiment Name: At_42deg_Heat_P Parameter: Age (day) Value: 14
  misc_feature: MA Experiment 20000173 PARAMETER Experiment Name: At_42deg_Heat_P Parameter: Organism Value: A. thaliana
  misc_feature: MA Experiment 20000173 PARAMETER Experiment Name: At_42deg_Heat_P Parameter: Plant Line Value: WS
  misc_feature: MA Experiment 20000173 PARAMETER Experiment Name: At_42deg_Heat_P Parameter: Temperature (deg C) Value: 42 vs. 22
  misc_feature: MA Experiment 20000173 PARAMETER Experiment Name: At_42deg_Heat_P Parameter: Timepoint (hr) Value: 6
  misc_feature: MA Experiment 20000173 PARAMETER Experiment Name: At_42deg_Heat_P Parameter: Tissue Value: Aerial
  misc_feature: MA Experiment ID: 20000185 Result: Up-regulated in Transcription
  misc_feature: MA Experiment 20000185 PARAMETER Experiment Name: At_Roots__P Parameter: Age (day) Value: 7 vs. 21
  misc_feature: MA Experiment 20000185 PARAMETER Experiment Name: At_Roots__P Parameter: Organism Value: A. thaliana
  misc_feature: MA Experiment 20000185 PARAMETER Experiment Name: At_Roots__P Parameter: Tissue Value: Roots vs. Whole Plant
  misc_feature: MA Experiment ID: 20000234 Result: Down-regulated in Transcription
  misc_feature: MA Experiment 20000234 PARAMETER Experiment Name: At_Siliques_P Parameter: Age (day) Value: 21
  misc_feature: MA Experiment 20000234 PARAMETER Experiment Name: At_Siliques_P Parameter: Organism Value: A. thaliana
  misc_feature: MA Experiment 20000234 PARAMETER Experiment Name: At_Siliques_P Parameter: Plant Line Value: WS
  misc_feature: MA Experiment 20000234 PARAMETER Experiment Name: At_Siliques_P Parameter: Tissue Value: Less Than 5mm Siliques vs. Whole Plant
  misc_feature: MA Experiment ID: 20000265 Result: Down-regulated in Transcription
  misc_feature: MA Experiment 20000265 PARAMETER Experiment Name: At_Open_Flower_P Parameter: Age (day) Value: 21
  misc_feature: MA Experiment 20000265 PARAMETER Experiment Name: At_Open_Flower_P Parameter: Plant Line Value: WS
  misc_feature: MA Experiment 20000265 PARAMETER Experiment Name: At_Open_Flower_P Parameter: Tissue Value: Closed Flower vs. Whole Plant
  misc_feature: MA Experiment ID: 20000288 Result: Down-regulated in Transcription
  misc_feature: MA Experiment 20000288 PARAMETER Experiment Name: At_Drought_P Parameter: Age (day) Value: 7
  misc_feature: MA Experiment 20000288 PARAMETER Experiment Name: At_Drought_P Parameter: Organism Value: A. thaliana
  misc_feature: MA Experiment 20000288 PARAMETER Experiment Name: At_Drought_P Parameter: Plant Line Value: WS
  misc_feature: MA Experiment 20000288 PARAMETER Experiment Name: At_Drought_P Parameter: Timepoint (hr) Value: 1
  misc_feature: MA Experiment 20000288 PARAMETER Experiment Name: At_Drought_P Parameter: Tissue Value: Whole Plant
  misc_feature: MA Experiment 20000288 PARAMETER Experiment Name: At_Drought_P Parameter: Treatment Value: Drought vs. No Drought
  misc_feature: MA Experiment ID: 20000438 Result: Down-regulated in Transcription
  misc_feature: MA Experiment 20000438 PARAMETER Experiment Name: At_Shoots__P Parameter: Age (day) Value: 14
  misc_feature: MA Experiment 20000438 PARAMETER Experiment Name: At_Shoots__P Parameter: Tissue Value: Shoots vs. Whole Plant
  misc_feature: MA Experiment ID: 20000439 Result: Up-regulated in Transcription
  misc_feature: MA Experiment 20000439 PARAMETER Experiment Name: At_Roots__P Parameter: Age (day) Value: 14 vs. 21
  misc_feature: MA Experiment 20000439 PARAMETER Experiment Name: At_Roots__P Parameter: Organism Value: A. thaliana
  misc_feature: MA Experiment 20000439 PARAMETER Experiment Name: At_Roots__P Parameter: Tissue Value: Roots vs. Whole Plant
  misc_feature: MA Experiment ID: 20001248 Result: Down-regulated in Transcription
  misc_feature: MA Experiment 20001248 PARAMETER Experiment Name: At_Far-red-induction_P Parameter: Age (day) Value: 7
  misc_feature: MA Experiment 20001248 PARAMETER Experiment Name: At_Far-red-induction_P Parameter: Light Value: Far-red vs. White
  misc_feature: MA Experiment 20001248 PARAMETER Experiment Name: At_Far-red-induction_P Parameter: Organism Value: A. thaliana
  misc_feature: MA Experiment 20001248 PARAMETER Experiment Name: At_Far-red-induction_P Parameter: Plant Line Value: Columbia
  misc_feature: MA Experiment 20001248 PARAMETER Experiment Name: At_Far-red-induction_P Parameter: Timepoint (hr) Value: 4
  misc_feature: MA Experiment 20001248 PARAMETER Experiment Name: At_Far-red-induction_P Parameter: Tissue Value: Whole Plant
  misc_feature: MA Experiment ID: 20001450 Result: Down-regulated in Transcription
  misc_feature: MA Experiment 20001450 PARAMETER Experiment Name: At_Far-red-induction_P Parameter: Age (day) Value: 7
  misc_feature: MA Experiment 20001450 PARAMETER Experiment Name: At_Far-red-induction_P Parameter: Light Value: Far-red vs. White
  misc_feature: MA Experiment 20001450 PARAMETER Experiment Name: At_Far-red-induction_P Parameter: Organism Value: A. thaliana
  misc_feature: MA Experiment 20001450 PARAMETER Experiment Name: At_Far-red-induction_P Parameter: Plant Line Value: Columbia
  misc_feature: MA Experiment 20001450 PARAMETER Experiment Name: At_Far-red-induction_P Parameter: Timepoint (hr) Value: 8
  misc_feature: MA Experiment 20001450 PARAMETER Experiment Name: At_Far-red-induction_P Parameter: Tissue Value: Whole Plant
  misc_feature: MA Experiment ID: 20001911 Result: Up-regulated in Transcription
  misc_feature: MA Experiment 20001911 PARAMETER Experiment Name: At_Drought_Reproduction_P Parameter: Age (day) Value: 40
  misc_feature: MA Experiment 20001911 PARAMETER Experiment Name: At_Drought_Reproduction_P Parameter: Organism Value: A. thaliana
  misc_feature: MA Experiment 20001911 PARAMETER Experiment Name: At_Drought_Reproduction_P Parameter: Plant Line Value: WS
  misc_feature: MA Experiment 20001911 PARAMETER Experiment Name: At_Drought_Reproduction_P Parameter: Timepoint (day) Value: 10
  misc_feature: MA Experiment 20001911 PARAMETER Experiment Name: At_Drought_Reproduction_P Parameter: Tissue Value: Flowers
  misc_feature: MA Experiment 20001911 PARAMETER Experiment Name: At_Drought_Reproduction_P Parameter: Treatment Value: Drought vs. No Drought
atggctaattcctcctccttctccccctctaccaccgtaacagatttaatctccaccgtccatgacgacatcatagagtctcacatcttgacacgtctcgacggcgcaaccttagcatccgtctcttgcgcctcctcacatcttcatcatctcgcttccaatgagatcctctggtccaaaatctgccgatccacgtggccttcttgctccggtggttctcgttctttcttctccgacgcttattctatggtggaaaccgccggtacagtctctgatctcgaccgtccgtttccggaattgatctccgccgtggatcttcactacagagggaagttgatttttagtagagtcgtgaagacggagactacgacggcgtggtttaagagttcgccgttgaggattgatctggtggatacaaaggatacggtggcgacgccgattaagagaagacagaggacggaagacacgtgtcgtgatctagagaaggatttgactttgagctggatcgtgattgatccgatcgggaaacgagcggcgaatatttcgagtcaccggccggtgtcggtgcagaggaactggataagcggagaagtggaggcgcaattcgcgacggtggtgggggcggtggagtgtgtgatcacggtggtcacgtgcggtgaggaggagatgcacgtgagggaagtgagtctcaaggtagagaagatggagggaacgcatttaaacgggagggacagtttggttattttaaggagtgtcatggagggtaaaagggtaaatggaagtaggagggaagtagaatcgaagaagagacacgaagagtttatggagaagaagagagagatgaaggagaagaagatgagggtagaatcggtatttgacattttgactgtacttttggtattttag

SEQ ID NO: 78629 - protein, 301 aa, Arabidopsis thaliana
  peptide (1)..(301): Ceres Seq. ID no. 12643384
  misc_feature (1)..(297): Homolog of NCBI NO: 15227574 NR Description: hypothetical protein; protein id: At2g36090.1
  misc_feature (15)..(301): Homolog of NCBI NO: 15225867 NR Description: unknown protein; protein id: At2g27310.1, by cDNA: gi_13877666 [Arabidopsis thaliana]
  misc_feature (10)..(294): Homolog of NCBI NO: 32479726 NR Description: OJ991214_12.2 [Oryza sativa (japonica
MANSSSFSPSTTVTDLISTVHDDIIESHILTRLDGATLASVSCASSHLHHLASNEILWSKICRSTWPSCSGGSRSFFSDAYSMVETAGTVSDLDRPFPELISAVDLHYRGKLIFSRVVKTETTTAWFKSSPLRIDLVDTKDTVATPIKRRQRTEDTCRDLEKDLTLSWIVIDPIGKRAANISSHRPVSVQRNWISGEVEAQFATVVGAVECVITVVTCGEEEMHVREVSLKVEKMEGTHLNGRDSLVILRSVMEGKRVNGSRREVESKKRHEEFMEKKREMKEKKMRVESVFDILTVLLVF

SEQ ID NO: 78630 - protein, 219 aa, Arabidopsis thaliana
  peptide (1)..(219): Ceres Seq. ID no. 12643385
  misc_feature (1)..(215): Homolog of NCBI NO: 15227574 NR Description: hypothetical protein; protein id: At2g36090.1
  misc_feature (1)..(219): Homolog of NCBI NO: 15225867 NR Description: unknown protein; protein id: At2g27310.1, by cDNA: gi_13877666 [Arabidopsis thaliana]
  misc_feature (1)..(212): Homolog of NCBI NO: 32479726 NR Description: OJ991214_12.2 [Oryza sativa (japonica
MVETAGTVSDLDRPFPELISAVDLHYRGKLIFSRVVKTETTTAWFKSSPLRIDLVDTKDTVATPIKRRQRTEDTCRDLEKDLTLSWIVIDPIGKRAANISSHRPVSVQRNWISGEVEAQFATVVGAVECVITVVTCGEEEMHVREVSLKVEKMEGTHLNGRDSLVILRSVMEGKRVNGSRREVESKKRHEEFMEKKREMKEKKMRVESVFDILTVLLVF

SEQ ID NO: 78631 - DNA, 984 bp, Arabidopsis thaliana
  misc_feature (1)..(984): Ceres Seq. ID no. 12643444
  misc_feature: MA Experiment ID: 20000184 Result: Down-regulated in Transcription
  misc_feature: MA Experiment 20000184 PARAMETER Experiment Name: At_Shoots__P Parameter: Age (day) Value: 7
  misc_feature: MA Experiment 20000184 PARAMETER Experiment Name: At_Shoots__P Parameter: Tissue Value: Shoots vs. Whole Plant
  misc_feature: MA Experiment ID: 20000227 Result: Down-regulated in Transcription
  misc_feature: MA Experiment 20000227 PARAMETER Experiment Name: At_Root-Tips-vs-Tops_P Parameter: Tissue Value: Root Tips vs. Root Tops
  misc_feature: MA Experiment ID: 20001248 Result: Up-regulated in Transcription
  misc_feature: MA Experiment 20001248 PARAMETER Experiment Name: At_Far-red-induction_P Parameter: Age (day) Value: 7
  misc_feature: MA Experiment 20001248 PARAMETER Experiment Name: At_Far-red-induction_P Parameter: Light Value: Far-red vs. White
  misc_feature: MA Experiment 20001248 PARAMETER Experiment Name: At_Far-red-induction_P Parameter: Organism Value: A. thaliana
  misc_feature: MA Experiment 20001248 PARAMETER Experiment Name: At_Far-red-induction_P Parameter: Plant Line Value: Columbia
  misc_feature: MA Experiment 20001248 PARAMETER Experiment Name: At_Far-red-induction_P Parameter: Timepoint (hr) Value: 4
  misc_feature: MA Experiment 20001248 PARAMETER Experiment Name: At_Far-red-induction_P Parameter: Tissue Value: Whole Plant
  misc_feature: MA Experiment ID: 20001554 Result: Down-regulated in Transcription
  misc_feature: MA Experiment 20001554 PARAMETER Experiment Name: At_Drought_Soil_Dry_P Parameter: Age (day) Value: 21
  misc_feature: MA Experiment 20001554 PARAMETER Experiment Name: At_Drought_Soil_Dry_P Parameter: Organism Value: A. thaliana
  misc_feature: MA Experiment 20001554 PARAMETER Experiment Name: At_Drought_Soil_Dry_P Parameter: Plant Line Value: WS
  misc_feature: MA Experiment 20001554 PARAMETER Experiment Name: At_Drought_Soil_Dry_P Parameter: Post Timepoint (hr) Value: None
  misc_feature: MA Experiment 20001554 PARAMETER Experiment Name: At_Drought_Soil_Dry_P Parameter: Post-Treatment Value: None
  misc_feature: MA Experiment 20001554 PARAMETER Experiment Name: At_Drought_Soil_Dry_P Parameter: Timepoint (day) Value: 7
  misc_feature: MA Experiment 20001554 PARAMETER Experiment Name: At_Drought_Soil_Dry_P Parameter: Treatment Value: Drought vs. No Drought
  misc_feature: MA Experiment ID: 20001556 Result: Down-regulated in Transcription
  misc_feature: MA Experiment 20001556 PARAMETER Experiment Name: At_Drought_Soil_Dry_P Parameter: Age (day) Value: 26
  misc_feature: MA Experiment 20001556 PARAMETER Experiment Name: At_Drought_Soil_Dry_P Parameter: Organism Value: A. thaliana
  misc_feature: MA Experiment 20001556 PARAMETER Experiment Name: At_Drought_Soil_Dry_P Parameter: Plant Line Value: WS
  misc_feature: MA Experiment 20001556 PARAMETER Experiment Name: At_Drought_Soil_Dry_P Parameter: Post Timepoint (hr) Value: None
  misc_feature: MA Experiment 20001556 PARAMETER Experiment Name: At_Drought_Soil_Dry_P Parameter: Post-Treatment Value: None
  misc_feature: MA Experiment 20001556 PARAMETER Experiment Name: At_Drought_Soil_Dry_P Parameter: Timepoint (day) Value: 12
  misc_feature: MA Experiment 20001556 PARAMETER Experiment Name: At_Drought_Soil_Dry_P Parameter: Treatment Value: Drought vs. No Drought
  misc_feature: MA Experiment ID: 20001559 Result: Down-regulated in Transcription
  misc_feature: MA Experiment 20001559 PARAMETER Experiment Name: At_Drought_Soil_Dry_P Parameter: Age (day) Value: 28
  misc_feature: MA Experiment 20001559 PARAMETER Experiment Name: At_Drought_Soil_Dry_P Parameter: Organism Value: A. thaliana
  misc_feature: MA Experiment 20001559 PARAMETER Experiment Name: At_Drought_Soil_Dry_P Parameter: Plant Line Value: WS
  misc_feature: MA Experiment 20001559 PARAMETER Experiment Name: At_Drought_Soil_Dry_P Parameter: Post Timepoint (hr) Value: 29
  misc_feature: MA Experiment 20001559 PARAMETER Experiment Name: At_Drought_Soil_Dry_P Parameter: Post-Treatment Value: Re-Water vs. No Drought
  misc_feature: MA Experiment 20001559 PARAMETER Experiment Name: At_Drought_Soil_Dry_P Parameter: Timepoint (day) Value: 14
  misc_feature: MA Experiment 20001559 PARAMETER Experiment Name: At_Drought_Soil_Dry_P Parameter: Treatment Value: Drought vs. No Drought
  misc_feature: MA Experiment ID: 20001560 Result: Down-regulated in Transcription
  misc_feature: MA Experiment 20001560 PARAMETER Experiment Name: At_Drought_Soil_Dry_P Parameter: Age (day) Value: 28
  misc_feature: MA Experiment 20001560 PARAMETER Experiment Name: At_Drought_Soil_Dry_P Parameter: Organism Value: A. thaliana
  misc_feature: MA Experiment 20001560 PARAMETER Experiment Name: At_Drought_Soil_Dry_P Parameter: Plant Line Value: WS
  misc_feature: MA Experiment 20001560 PARAMETER Experiment Name: At_Drought_Soil_Dry_P Parameter: Post Timepoint (hr) Value: None
  misc_feature: MA Experiment 20001560 PARAMETER Experiment Name: At_Drought_Soil_Dry_P Parameter: Post-Treatment Value: None
  misc_feature: MA Experiment 20001560 PARAMETER Experiment Name: At_Drought_Soil_Dry_P Parameter: Timepoint (day) Value: 14
  misc_feature: MA Experiment 20001560 PARAMETER Experiment Name: At_Drought_Soil_Dry_P Parameter: Treatment Value: Drought vs. No Drought
  misc_feature: MA Experiment ID: 20001904 Result: Down-regulated in Transcription
  misc_feature: MA Experiment 20001904 PARAMETER Experiment Name: At_Drought_Reproduction_P Parameter: Age (day) Value: 37
  misc_feature: MA Experiment 20001904 PARAMETER Experiment Name: At_Drought_Reproduction_P Parameter: Organism Value: A. thaliana
  misc_feature: MA Experiment 20001904 PARAMETER Experiment Name: At_Drought_Reproduction_P Parameter: Plant Line Value: WS
  misc_feature: MA Experiment 20001904 PARAMETER Experiment Name: At_Drought_Reproduction_P Parameter: Timepoint (day) Value: 7
  misc_feature: MA Experiment 20001904 PARAMETER Experiment Name: At_Drought_Reproduction_P Parameter: Tissue Value: Rosettes
  misc_feature: MA Experiment 20001904 PARAMETER Experiment Name: At_Drought_Reproduction_P Parameter: Treatment Value: Drought vs. No Drought
atgagaggtctcgcggcttgttacagtgaacacgccattaaagtatcagatacatattgttcaggtccatcgaatcattcctatatatctccgacattacctccttcaatccccgacacagtaaccaccacttatagatccaatctcccatcttccgacaaacccgtctctgtttcactcacctggtcggataatctcaccgtcgtcatctcaacgccgccgaaatcatactctgtttcactcagaaaacctaaaggatcaagaaagttgacttcttcctccggttcactcaacgccgagatcctctgggatctatcggaagcagagtacgaaaacaacggacctgaaccaataagaagattcttcgtcgtcgtcgttgtaaattccgagattaccctcggagtcggcgacgttgaccacgagcgagacacgtcatcatcgtcgtcgtggcgagtctcaaaaacggagagattctctggaacttgttggctcacgacgaaagctcaattctccgacgtcggaaggaaacacgagatacagattcaatgcggcggaggaggaggaggaggaggagaggaagggtatttatggaaagtgaaaagtcctgaaacgatgtcggtttatgttgataagaggaaagtgttttcggtgaagaagcttaagtggaactttagagggaatcaaaccatgtttttcgatggaatgcttatagacatgatgtgggatttacacgactggttctacaaagaaacgttgtcgtctgtttcgactagttcatcgtctaaaacggcgtcgtcgtcatcgtcttcttcaacttcatcgtctactcctccgtgtgctgtgtttatgtttaggaggaggagtggtttggatagtagattatggattgatgaagatgaacaagagagtgagatgaagaagaatattggttctagagatgagaaacattcgttttcacttatcatttgtgcctctaaaaagtga

SEQ ID NO: 78632 - protein, 327 aa, Arabidopsis thaliana
  peptide (1)..(327): Ceres Seq. ID no. 12643445
  misc_feature (34)..(327): Pfam Name: Plant protein of unknown function (DUF868) Pfam Description: Plant protein of unknown function (DUF868)
  misc_feature (1)..(327): Homolog of NCBI NO: 18404143 NR Description: expressed protein; protein id: At2g36470.1, by cDNA: 109103. [Arabidopsis thaliana] >gi|25408477|pir||B84781
  misc_feature (1)..(327): Homolog of NCBI NO: 21536715 NR Description: unknown [Arabidopsis thaliana]
  misc_feature (12)..(248): Homolog of NCBI NO: 15226242 NR Description: hypothetical protein; protein id: At2g27770.1
  misc_feature (12)..(248): Homolog of NCBI NO: 21805715 NR Description: hypothetical protein [Arabidopsis thaliana]
  misc_feature (1)..(248): Homolog of NCBI NO: 34394221 NR Description: unknown protein [Oryza sativa (japonica
  misc_feature (1)..(254): Homolog of NCBI NO: 30102999 NR Description: hypothetical protein [Oryza sativa (japonica
  misc_feature (1)..(275): Homolog of NCBI NO: 15241702 NR Description: putative protein; protein id: At5g28150.1, by cDNA: gi_19699076 [Arabidopsis thaliana] AT5g28150/T24G3_80 [Arabidopsis thaliana]
  misc_feature (1)..(248): Homolog of NCBI NO: 21593854 NR Description: unknown [Arabidopsis thaliana]
  misc_feature (1)..(248): Homolog of NCBI NO: 18397034 NR Description: expressed protein; protein id: At3g04860.1, by cDNA: 5170., supported by cDNA: gi_16612260 [Arabidopsis
  misc_feature (86)..(248): Homolog of NCBI NO: 14719318 NR Description: hypothetical protein [Oryza sativa]
MRGLAACYSEHAIKVSDTYCSGPSNHSYISPTLPPSIPDTVTTTYRSNLPSSDKPVSVSLTWSDNLTVVISTPPKSYSVSLRKPKGSRKLTSSSGSLNAEILWDLSEAEYENNGPEPIRRFFVVVVVNSEITLGVGDVDHERDTSSSSSWRVSKTERFSGTCWLTTKAQFSDVGRKHEIQIQCGGGGGGGGEEGYLWKVKSPETMSVYVDKRKVFSVKKLKWNFRGNQTMFFDGMLIDMMWDLHDWFYKETLSSVSTSSSSKTASSSSSSSTSSSTPPCAVFMFRRRSGLDSRLWIDEDEQESEMKKNIGSRDEKHSFSLIICASKK

SEQ ID NO: 78633 - DNA, 1651 bp, Arabidopsis thaliana
  misc_feature (1)..(1651): Ceres Seq. ID no. 12643452
  misc_feature: MA Experiment ID: 108434 Result: Up-regulated in Transcription
  misc_feature: MA Experiment 108434 PARAMETER Experiment Name: At_Root_Tips_cDNA_P Parameter: Tissue Value: Root Tips
  misc_feature: MA Experiment ID: 108462 Result: Down-regulated in Transcription
  misc_feature: MA Experiment 108462 PARAMETER Experiment Name: At_Germinating_Seeds_cDNA_P Parameter: Age (day) Value: 2 vs. 0
  misc_feature: MA Experiment 108462 PARAMETER Experiment Name: At_Germinating_Seeds_cDNA_P Parameter: Tissue Value: Germinating Seeds
  misc_feature: MA Experiment ID: 108463 Result: Down-regulated in Transcription
  misc_feature: MA Experiment 108463 PARAMETER Experiment Name: At_Germinating_Seeds_cDNA_P Parameter: Age (day) Value: 3 vs. 0
  misc_feature: MA Experiment 108463 PARAMETER Experiment Name: At_Germinating_Seeds_cDNA_P Parameter: Tissue Value: Germinating Seeds
  misc_feature: MA Experiment ID: 108464 Result: Down-regulated in Transcription
  misc_feature: MA Experiment 108464 PARAMETER Experiment Name: At_Germinating_Seeds_cDNA_P Parameter: Age (day) Value: 4 vs. 0
  misc_feature: MA Experiment 108464 PARAMETER Experiment Name: At_Germinating_Seeds_cDNA_P Parameter: Tissue Value: Germinating Seeds
  misc_feature: MA Experiment ID: 20000093 Result: Up-regulated in Transcription
  misc_feature: MA Experiment 20000093 PARAMETER Experiment Name: At_42deg_Heat_cDNA_P Parameter: Temperature (deg C) Value: 42 vs. 22
  misc_feature: MA Experiment 20000093 PARAMETER Experiment Name: At_42deg_Heat_cDNA_P Parameter: Timepoint (hr) Value: 0.5
  misc_feature: MA Experiment 20000093 PARAMETER Experiment Name: At_42deg_Heat_cDNA_P Parameter: Tissue Value: Aerial
  misc_feature: MA Experiment ID: 20000437 Result: Down-regulated in Transcription
  misc_feature: MA Experiment 20000437 PARAMETER Experiment Name: At_Drought_P Parameter: Age (day) Value: 8
  misc_feature: MA Experiment 20000437 PARAMETER Experiment Name: At_Drought_P Parameter: Organism Value: A. thaliana
  misc_feature: MA Experiment 20000437 PARAMETER Experiment Name: At_Drought_P Parameter: Plant Line Value: WS
  misc_feature: MA Experiment 20000437 PARAMETER Experiment Name: At_Drought_P Parameter: Timepoint (hr) Value: 24
  misc_feature: MA Experiment 20000437 PARAMETER Experiment Name: At_Drought_P Parameter: Tissue Value: Whole Plant
  misc_feature: MA Experiment 20000437 PARAMETER Experiment Name: At_Drought_P Parameter: Treatment Value: Drought vs. No Drought
  misc_feature: MA Experiment ID: 20001557 Result: Up-regulated in Transcription
  misc_feature: MA Experiment 20001557 PARAMETER Experiment Name: At_Drought_Soil_Dry_P Parameter: Age (day) Value: 27
  misc_feature: MA Experiment 20001557 PARAMETER Experiment Name: At_Drought_Soil_Dry_P Parameter: Organism Value: A. thaliana
  misc_feature: MA Experiment 20001557 PARAMETER Experiment Name: At_Drought_Soil_Dry_P Parameter: Plant Line Value: WS
  misc_feature: MA Experiment 20001557 PARAMETER Experiment Name: At_Drought_Soil_Dry_P Parameter: Post Timepoint (hr) Value: 3
  misc_feature: MA Experiment 20001557 PARAMETER Experiment Name: At_Drought_Soil_Dry_P Parameter: Post-Treatment Value: Re-Water vs. No Drought
  misc_feature: MA Experiment 20001557 PARAMETER Experiment Name: At_Drought_Soil_Dry_P Parameter: Timepoint (day) Value: 13
  misc_feature: MA Experiment 20001557 PARAMETER Experiment Name: At_Drought_Soil_Dry_P Parameter: Treatment Value: Drought vs. No Drought
agctactactgttgaagcgattctcactaaaaccctcgaacacatcgcctttatctctttctctagatctactcgctatggctactatcaccgttgttaaggctagacagatcttcgacagtcgtggtaatcccaccgttgaggttgatatccacacgtcaaatggtattaaggttacagcagctgttccaagtggagcttccactggtatctatgaggctcttgagctgagggatggaggatctgactaccttggaaagggtgtatctaaggctgttggcaatgtgaacaacatcatcgggccagcacttattggaaaggacccaactcagcagactgctattgacaacttcatggtccatgaacttgacggaacccaaaacgagtgggggtggtgcaagcaaaagcttggagccaatgcgattcttgctgtgtctcttgctgtctgcaaagctggggctgttgtcagcggcattcctctatacaagcacattgccaaccttgctggtaaccccaagattgtgctaccagttcctgccttcaacgtcatcaatggtggatcccatgccggaaacaagcttgctatgcaggagtttatgatcctccctgttggagctgcttctttcaaggaagccatgaagatgggtgtggaagtttaccaccacttgaagtctgtgattaagaagaagtacggccaggatgccacaaatgttggtgatgaaggtgggtttgcaccaaacattcaggagaacaaggagggtcttgaattgctcaagactgctatcgagaaggctggatacactggaaaggttgtcattggaatggatgttgccgcttcagagttctactcagaagacaagacctacgacttgaacttcaaagaagagaacaacaatggctctcagaagatttctggtgatgctctaaaggacctgtacaagtcctttgtcgctgagtacccaatcgtgtccattgaggacccatttgaccaagatgactgggagcactatgctaagatgaccactgagtgtggaaccgaggttcagattgtcggtgatgatttgttggtcactaaccccaagagagttgctaaggcaatcgcagagaagtcttgcaatgctcttcttttgaaggttaaccaaatcggatctgtaaccgagagtatcgaggcagttaagatgtcgaagaaagcaggttggggagtgatgaccagccacagaagtggtgaaaccgaggacacattcattgctgacttagccgttggcttgtccactggacaaatcaaaaccggtgctccttgcagatccgagcgtcttgccaagtacaaccagcttttgcgtattgaggaggagttgggatcagaggcaatttacgctggagtcaacttccgcaaacctgtggaaccctactaaatggagcttttagaagcaaagtggtcttctttgtgacgaggagaagatgacctgagtttgatcatttgctttaattaaataaaacgttctgtttttgtttcttctttgtttggtttcttacgtcttttgttgaaccctttttgggaaaagttactcatttttgtaagggaaacatgagaatgctctgcctttgtcgaggacggtagccccttatttcaatctaatttcggctttactct

SEQ ID NO: 78634 - protein, 469 aa, Arabidopsis thaliana; identical to SEQ ID NO: 28966
  peptide (1)..(469): Ceres Seq. ID no. 12643453
  misc_feature (172)..(466): Pfam Name: Enolase, C-terminal TIM barrel domain Pfam Description: Enolase, C-terminal TIM barrel domain
  misc_feature (26)..(469): Homolog of NCBI NO: 15227987 NR Description: enolase (2-phospho-D-glycerate hydroylase); id: At2g36530.1, supported by cDNA: gi_15809969, supported by
  misc_feature (26)..(469): Homolog of NCBI NO: 15809970 NR Description: At2g36530/F1O11.16 [Arabidopsis thaliana]
  misc_feature (26)..(469): Homolog of NCBI NO: 18175728 NR Description: putative enolase (2-phospho-D-glycerate
  misc_feature (26)..(469): Homolog of NCBI NO: 20260174 NR Description: enolase (2-phospho-D-glycerate hydroylase)
  misc_feature (26)..(469): Homolog of NCBI NO: 119354 NR Description: Enolase (2-phosphoglycerate dehydratase)
  misc_feature (28)..(469): Homolog of NCBI NO: 14423688 NR Description: Enolase 1 (2-phosphoglycerate dehydratase 1)
  misc_feature (26)..(469): Homolog of NCBI NO: 7436883 NR Description: phosphopyruvate hydratase (EC 4.2.1.11) - common
  misc_feature (28)..(469): Homolog of NCBI NO: 14423687 NR Description: Enolase 2 (2-phosphoglycerate dehydratase 2)
  misc_feature (26)..(469): Homolog of NCBI NO: 3023714 NR Description: Enolase (2-phosphoglycerate dehydratase)
  misc_feature (28)..(469): Homolog of NCBI NO: 1169534 NR Description: Enolase (2-phosphoglycerate dehydratase)

SEQ ID NO: 78635 - protein, 444 aa, Arabidopsis thaliana; identical to SEQ ID NO: 28967
  peptide (1)..(444): Ceres Seq. ID no. 12643454
  misc_feature (147)..(441): Pfam Name: Enolase, C-terminal TIM barrel domain Pfam Description: Enolase, C-terminal TIM barrel domain
  misc_feature (1)..(444): Homolog of NCBI NO: 15227987 NR Description: enolase (2-phospho-D-glycerate hydroylase); id: At2g36530.1, supported by cDNA: gi_15809969, supported by
  misc_feature (1)..(444): Homolog of NCBI NO: 15809970 NR Description: At2g36530/F1O11.16 [Arabidopsis thaliana]
  misc_feature (1)..(444): Homolog of NCBI NO: 18175728 NR Description: putative enolase (2-phospho-D-glycerate
  misc_feature (1)..(444): Homolog of NCBI NO: 20260174 NR Description: enolase (2-phospho-D-glycerate hydroylase)
  misc_feature (1)..(444): Homolog of NCBI NO: 119354 NR Description: Enolase (2-phosphoglycerate dehydratase)
  misc_feature (3)..(444): Homolog of NCBI NO: 14423688 NR Description: Enolase 1 (2-phosphoglycerate dehydratase 1)
  misc_feature (1)..(444): Homolog of NCBI NO: 7436883 NR Description: phosphopyruvate hydratase (EC 4.2.1.11) - common
  misc_feature (3)..(444): Homolog of NCBI NO: 14423687 NR Description: Enolase 2 (2-phosphoglycerate dehydratase 2)
  misc_feature (1)..(444): Homolog of NCBI NO: 3023714 NR Description: Enolase (2-phosphoglycerate dehydratase)
  misc_feature (3)..(444): Homolog of NCBI NO: 1169534 NR Description: Enolase (2-phosphoglycerate dehydratase)

SEQ ID NO: 78636 - protein, 352 aa, Arabidopsis thaliana; identical to SEQ ID NO: 15479
  peptide (1)..(352): Ceres Seq. ID no. 12643455
  misc_feature (55)..(349): Pfam Name: Enolase, C-terminal TIM barrel domain Pfam Description: Enolase, C-terminal TIM barrel domain
  misc_feature (1)..(352): Homolog of NCBI NO: 15227987 NR Description: enolase (2-phospho-D-glycerate hydroylase); id: At2g36530.1, supported by cDNA: gi_15809969, supported by
  misc_feature (1)..(352): Homolog of NCBI NO: 15809970 NR Description: At2g36530/F1O11.16 [Arabidopsis thaliana]
  misc_feature (1)..(352): Homolog of NCBI NO: 18175728 NR Description: putative enolase (2-phospho-D-glycerate
  misc_feature (1)..(352): Homolog of NCBI NO: 20260174 NR Description: enolase (2-phospho-D-glycerate hydroylase)
  misc_feature (1)..(352): Homolog of NCBI NO: 119354 NR Description: Enolase (2-phosphoglycerate dehydratase)
  misc_feature (1)..(352): Homolog of NCBI NO: 14423688 NR Description: Enolase 1 (2-phosphoglycerate dehydratase 1)
  misc_feature (1)..(352): Homolog of NCBI NO: 7436883 NR Description: phosphopyruvate hydratase (EC 4.2.1.11) - common
  misc_feature (1)..(352): Homolog of NCBI NO: 14423687 NR Description: Enolase 2 (2-phosphoglycerate dehydratase 2)
  misc_feature (1)..(352): Homolog of NCBI NO: 3023714 NR Description: Enolase (2-phosphoglycerate dehydratase)
  misc_feature (1)..(352): Homolog of NCBI NO: 1169534 NR Description: Enolase (2-phosphoglycerate dehydratase)

SEQ ID NO: 78637 - DNA, 657 bp, Arabidopsis thaliana
  misc_feature (1)..(657): Ceres Seq. ID no. 12643466
  misc_feature: MA Experiment ID: 20000182 Result: Up-regulated in Transcription
  misc_feature: MA Experiment 20000182 PARAMETER Experiment Name: At_2mM_SA_P Parameter: Age (day) Value: 14
  misc_feature: MA Experiment 20000182 PARAMETER Experiment Name: At_2mM_SA_P Parameter: Organism Value: A. thaliana
  misc_feature: MA Experiment 20000182 PARAMETER Experiment Name: At_2mM_SA_P Parameter: Plant Line Value: WS
  misc_feature: MA Experiment 20000182 PARAMETER Experiment Name: At_2mM_SA_P Parameter: Timepoint (hr) Value: 6
  misc_feature: MA Experiment 20000182 PARAMETER Experiment Name: At_2mM_SA_P Parameter: Tissue Value: Aerial
  misc_feature: MA Experiment 20000182 PARAMETER Experiment Name: At_2mM_SA_P Parameter: Treatment Value: 2mM SA vs. No Treatment
  misc_feature: MA Experiment ID: 20000184 Result: Down-regulated in Transcription
  misc_feature: MA Experiment 20000184 PARAMETER Experiment Name: At_Shoots__P Parameter: Age (day) Value: 7
  misc_feature: MA Experiment 20000184 PARAMETER Experiment Name: At_Shoots__P Parameter: Tissue Value: Shoots vs. Whole Plant
  misc_feature: MA Experiment ID: 20000437 Result: Up-regulated in Transcription
  misc_feature: MA Experiment 20000437 PARAMETER Experiment Name: At_Drought_P Parameter: Age (day) Value: 8
  misc_feature: MA Experiment 20000437 PARAMETER Experiment Name: At_Drought_P Parameter: Organism Value: A. thaliana
  misc_feature: MA Experiment 20000437 PARAMETER Experiment Name: At_Drought_P Parameter: Plant Line Value: WS
  misc_feature: MA Experiment 20000437 PARAMETER Experiment Name: At_Drought_P Parameter: Timepoint (hr) Value: 24
  misc_feature: MA Experiment 20000437 PARAMETER Experiment Name: At_Drought_P Parameter: Tissue Value: Whole Plant
  misc_feature: MA Experiment 20000437 PARAMETER Experiment Name: At_Drought_P Parameter: Treatment Value: Drought vs. No Drought
atgttcaatttctggggatcaaaagaacagcaacaaggacaatctcgtccttctccagaagcttctgcaacaccgtggtattcgccgtctcttgtcacctctcctagctcatcccggcctcaaacctcagggcagattccatcacatgtttcaccaggtgaagccgccggcattattgccattttaaaagacaaaagtgtggatgagcttaggaagcttctctctgacaaggatgcgtatcaacagtttctgcactcgcttgaccaggtcactattcaaaacaatatcagagaagagcttcgcaaagaaacgttacatctagctagagaaaacttggagaaggaaccacagatagtggagctcagaaaccaatgcagaataatccgtacatccgagcttgcgactgctcaagagaagctcaatgagcttgagaatcaaagagaagagatcctcaaattctactctccaggttctcttcttcatagacttcaagatgctatgaaccaggtggatgaagaatcagaggagctgcaacagaagtttatggagaaggatattgacacagctgcatttgtgcagaaatacaaaaagctaagaagcaagtatcatcgacgggctttgattcatctcgctgctaaaacttcatctattggctga

SEQ ID NO: 78638 - protein, 218 aa, Arabidopsis thaliana
  peptide (1)..(218): Ceres Seq. ID no. 12643467
  misc_feature (1)..(217): Homolog of NCBI NO: 15231750 NR Description: putative protein; protein id: At3g53120.1
  misc_feature (1)..(133): Homolog of NCBI NO: 30686871 NR Description: expressed protein [Arabidopsis thaliana]
  misc_feature (1)..(124): Homolog of NCBI NO: 30686868 NR Description: expressed protein [Arabidopsis thaliana] At2g36680/F13K3.8 [Arabidopsis thaliana]
  misc_feature (1)..(133): Homolog of NCBI NO: 25408498 NR Description: hypothetical protein At2g36680 [imported] - thaliana >gi|4415913|gb|AAD20144.1| unknown protein [Arabidopsis
  misc_feature (9)..(206): Homolog of NCBI NO: 39645505 NR Description: Unknown (protein for MGC:77637) [Danio rerio]
  misc_feature (9)..(206): Homolog of NCBI NO: 37590372 NR Description: Unknown (protein for MGC:73244) [Danio rerio]
  misc_feature (57)..(205): Homolog of NCBI NO: 21739818 NR Description: hypothetical protein [Homo sapiens]
  misc_feature (62)..(205): Homolog of NCBI NO: 31088908 NR Description: RIKEN cDNA 5730409F24 [Mus musculus]
MFNFWGSKEQQQGQSRPSPEASATPWYSPSLVTSPSSSRPQTSGQIPSHVSPGEAAGIIAILKDKSVDELRKLLSDKDAYQQFLHSLDQVTIQNNIREELRKETLHLARENLEKEPQIVELRNQCRIIRTSELATAQEKLNELENQREEILKFYSPGSLLHRLQDAMNQVDEESEELQQKFMEKDIDTAAFVQKYKKLRSKYHRRALIHLAAKTSSIG

SEQ ID NO: 78639 - DNA, 1011 bp, Arabidopsis thaliana
  misc_feature (1)..(1011): Ceres Seq. ID no. 12643468
  misc_feature: MA Experiment ID: 20000185 Result: Up-regulated in Transcription
  misc_feature: MA Experiment 20000185 PARAMETER Experiment Name: At_Roots__P Parameter: Age (day) Value: 7 vs. 21
  misc_feature: MA Experiment 20000185 PARAMETER Experiment Name: At_Roots__P Parameter: Organism Value: A. thaliana
  misc_feature: MA Experiment 20000185 PARAMETER Experiment Name: At_Roots__P Parameter: Tissue Value: Roots vs. Whole Plant
  misc_feature: MA Experiment ID: 20000227 Result: Down-regulated in Transcription
  misc_feature: MA Experiment 20000227 PARAMETER Experiment Name: At_Root-Tips-vs-Tops_P Parameter: Tissue Value: Root Tips vs. Root Tops
  misc_feature: MA Experiment ID: 20000438 Result: Up-regulated in Transcription
  misc_feature: MA Experiment 20000438 PARAMETER Experiment Name: At_Shoots__P Parameter: Age (day) Value: 14
  misc_feature: MA Experiment 20000438 PARAMETER Experiment Name: At_Shoots__P Parameter: Tissue Value: Shoots vs. Whole Plant
  misc_feature: MA Experiment ID: 20000439 Result: Up-regulated in Transcription
  misc_feature: MA Experiment 20000439 PARAMETER Experiment Name: At_Roots__P Parameter: Age (day) Value: 14 vs. 21
  misc_feature: MA Experiment 20000439 PARAMETER Experiment Name: At_Roots__P Parameter: Organism Value: A. thaliana
  misc_feature: MA Experiment 20000439 PARAMETER Experiment Name: At_Roots__P Parameter: Tissue Value: Roots vs. Whole Plant
  misc_feature: MA Experiment ID: 20000452 Result: Up-regulated in Transcription
  misc_feature: MA Experiment 20000452 PARAMETER Experiment Name: At_CS6879_Shoots-Roots_P Parameter: Age (day) Value: 14
  misc_feature: MA Experiment 20000452 PARAMETER Experiment Name: At_CS6879_Shoots-Roots_P Parameter: Organism Value: A. thaliana
  misc_feature: MA Experiment 20000452 PARAMETER Experiment Name: At_CS6879_Shoots-Roots_P Parameter: Plant Line Value: CS6879 vs. WS
  misc_feature: MA Experiment 20000452 PARAMETER Experiment Name: At_CS6879_Shoots-Roots_P Parameter: Tissue Value: Shoots
  misc_feature: MA Experiment ID: 20000709 Result: Down-regulated in Transcription
  misc_feature: MA Experiment 20000709 PARAMETER Experiment Name: At_15mM_NH4NO3_L-to-H_P Parameter: Age (hr) Value: 14
  misc_feature: MA Experiment 20000709 PARAMETER Experiment Name: At_15mM_NH4NO3_L-to-H_P Parameter: Organism Value: A. thaliana
  misc_feature: MA Experiment 20000709 PARAMETER Experiment Name: At_15mM_NH4NO3_L-to-H_P Parameter: Plant Line Value: WS
  misc_feature: MA Experiment 20000709 PARAMETER Experiment Name: At_15mM_NH4NO3_L-to-H_P Parameter: Timepoint (hr) Value: 4
  misc_feature: MA Experiment 20000709 PARAMETER Experiment Name: At_15mM_NH4NO3_L-to-H_P Parameter: Tissue Value: Aerial
  misc_feature: MA Experiment 20000709 PARAMETER Experiment Name: At_15mM_NH4NO3_L-to-H_P Parameter: Treatment Value: 15mM NH4NO3 vs. 30mM Mannitol
  misc_feature: MA Experiment ID: 20001451 Result: Down-regulated in Transcription
  misc_feature: MA Experiment 20001451 PARAMETER Experiment Name: At_Far-red-induction_P Parameter: Age (day) Value: 7
  misc_feature: MA Experiment 20001451 PARAMETER Experiment Name: At_Far-red-induction_P Parameter: Light Value: Far-red vs. White
  misc_feature: MA Experiment 20001451 PARAMETER Experiment Name: At_Far-red-induction_P Parameter: Organism Value: A. thaliana
  misc_feature: MA Experiment 20001451 PARAMETER Experiment Name: At_Far-red-induction_P Parameter: Plant Line Value: Columbia
  misc_feature: MA Experiment 20001451 PARAMETER Experiment Name: At_Far-red-induction_P Parameter: Timepoint (hr) Value: 24
  misc_feature: MA Experiment 20001451 PARAMETER Experiment Name: At_Far-red-induction_P Parameter: Tissue Value: Whole Plant
atgtcgccgtcaatgatagctccggtgatggaagaagagaacaagaaataccaaaaaggcgtgaaacatctttgtgaaaatggtctgaccaaagtaccaaccaagtatatatggcctgaacctgaccgacccatcttgacaaaatcggacaagctcatcaaaccaaacaaaaacctaaagctccccctcatagatttcgctgagctccttggacctaaccggcctcatgttctacgaaccatagccgaggcctgcaaaacctacggcttctttcaggttgtgaatcatgggatggaaggagacgtgagcaagaatatgatagacgtgtgtaagagattctttgagcttccgtacgaggagagatccaagtacatgtcgtcggacatgtcggctccagtacgatacggcacgagtttcaaccagatcaaagacaatgtcttttgttggagagacttcttgaaactctatgcacatccactccctgactatcttcctcattggccttcttctccttctgacttcagtgatgaggcggctaaggagttggaagagggaagtcaggtggtggtggtgaactgttatccaccgtgtccggagccagagctgacgctagggatgccaccgcactcagactacggcttcttgacgcttctacttcaagacgaagtcgaaggtcttcaaattctgtatcgtgacgagtgggtcaccgttgatcccatccctggctcttttgttgtcaacgtaggcgatcatctcgagatatttagcaatgggaggtataaaagcgtgctacatagggtattggtgaactctacaaaacctaggatatcggtggcgtcgctacacagcttccctttgacttctgtcgtaaagccatcgccgaaactcgtcgataaacataatccatcacagtatatggacactgattttaccacttttcttcagtatataacttctcgtgaacccaaatggaagaattttcttgaatcacgcaagattcaccatgtatga

SEQ ID NO: 78640 - protein, 336 aa, Arabidopsis thaliana
  peptide (1)..(336): Ceres Seq. ID no. 12643469
  misc_feature (185)..(284): Pfam Name: 2OG-Fe(II) oxygenase superfamily Pfam Description: 2OG-Fe(II) oxygenase superfamily
  misc_feature (173)..(336): Homolog of NCBI NO: 15228020 NR Description: putative giberellin beta-hydroxylase; protein id: [Arabidopsis thaliana] >gi|25285698|pir||E84783 probable
  misc_feature (1)..(93): Homolog of NCBI NO: 15228020 NR Description: putative giberellin beta-hydroxylase; protein id: [Arabidopsis thaliana] >gi|25285698|pir||E84783 probable
  misc_feature (70)..(190): Homolog of NCBI NO: 15228020 NR Description: putative giberellin beta-hydroxylase; protein id: [Arabidopsis thaliana] >gi|25285698|pir||E84783 probable
  misc_feature (24)..(183): Homolog of NCBI NO: 7433240 NR Description: probable flavonol synthase [imported] - thaliana >gi|20197022|gb|AAM14878.1| putative flavonol synthase
  misc_feature (24)..(183): Homolog of NCBI NO: 30689834 NR Description: flavonol synthase family [Arabidopsis thaliana]
  misc_feature (180)..(332): Homolog of NCBI NO: 7433240 NR Description: probable flavonol synthase [imported] - thaliana >gi|20197022|gb|AAM14878.1| putative flavonol synthase
  misc_feature (180)..(332): Homolog of NCBI NO: 30689834 NR Description: flavonol synthase family [Arabidopsis thaliana]
  misc_feature (32)..(180): Homolog of NCBI NO: 15235126 NR Description: putative Fe(II)/ascorbate oxidase; protein id:
  misc_feature (175)..(301): Homolog of NCBI NO: 15235126 NR Description: putative Fe(II)/ascorbate oxidase; protein id:
  misc_feature (182)..(329): Homolog of NCBI NO: 37536444 NR Description: unknown protein [Oryza sativa (japonica
MSPSMIAPVMEEENKKYQKGVKHLCENGLTKVPTKYIWPEPDRPILTKSDKLIKPNKNLKLPLIDFAELLGPNRPHVLRTIAEACKTYGFFQVVNHGMEGDVSKNMIDVCKRFFELPYEERSKYMSSDMSAPVRYGTSFNQIKDNVFCWRDFLKLYAHPLPDYLPHWPSSPSDFSDEAAKELEEGSQVVVVNCYPPCPEPELTLGMPPHSDYGFLTLLLQDEVEGLQILYRDEWVTVDPIPGSFVVNVGDHLEIFSNGRYKSVLHRVLVNSTKPRISVASLHSFPLTSVVKPSPKLVDKHNPSQYMDTDFTTFLQYITSREPKWKNFLESRKIHHV

SEQ ID NO: 78641 - protein, 332 aa, Arabidopsis thaliana
  peptide (1)..(332): Ceres Seq. ID no. 12643470
  misc_feature (181)..(280): Pfam Name: 2OG-Fe(II) oxygenase superfamily Pfam Description: 2OG-Fe(II) oxygenase superfamily
  misc_feature (169)..(332): Homolog of NCBI NO: 15228020 NR Description: putative giberellin beta-hydroxylase; protein id: [Arabidopsis thaliana] >gi|25285698|pir||E84783 probable
  misc_feature (1)..(89): Homolog of NCBI NO: 15228020 NR Description: putative giberellin beta-hydroxylase; protein id: [Arabidopsis thaliana] >gi|25285698|pir||E84783 probable
  misc_feature (66)..(186): Homolog of NCBI NO: 15228020 NR Description: putative giberellin beta-hydroxylase; protein id: [Arabidopsis thaliana] >gi|25285698|pir||E84783 probable
  misc_feature (20)..(179): Homolog of NCBI NO: 7433240 NR Description: probable flavonol synthase [imported] - thaliana >gi|20197022|gb|AAM14878.1| putative flavonol synthase
  misc_feature (20)..(179): Homolog of NCBI NO: 30689834 NR Description: flavonol synthase family [Arabidopsis thaliana]
  misc_feature (176)..(328): Homolog of NCBI NO: 7433240 NR Description: probable flavonol synthase [imported] - thaliana >gi|20197022|gb|AAM14878.1| putative flavonol synthase
  misc_feature (176)..(328): Homolog of NCBI NO: 30689834 NR Description: flavonol synthase family [Arabidopsis thaliana]
  misc_feature (28)..(176): Homolog of NCBI NO: 15235126 NR Description: putative Fe(II)/ascorbate oxidase; protein id:
  misc_feature (171)..(297): Homolog of NCBI NO: 15235126 NR Description: putative Fe(II)/ascorbate oxidase; protein id:
  misc_feature (178)..(325): Homolog of NCBI NO: 37536444 NR Description: unknown protein [Oryza sativa (japonica
MIAPVMEEENKKYQKGVKHLCENGLTKVPTKYIWPEPDRPILTKSDKLIKPNKNLKLPLIDFAELLGPNRPHVLRTIAEACKTYGFFQVVNHGMEGDVSKNMIDVCKRFFELPYEERSKYMSSDMSAPVRYGTSFNQIKDNVFCWRDFLKLYAHPLPDYLPHWPSSPSDFSDEAAKELEEGSQVVVVNCYPPCPEPELTLGMPPHSDYGFLTLLLQDEVEGLQILYRDEWVTVDPIPGSFVVNVGDHLEIFSNGRYKSVLHRVLVNSTKPRISVASLHSFPLTSVVKPSPKLVDKHNPSQYMDTDFTTFLQYITSREPKWKNFLESRKIHHV

SEQ ID NO: 78642 - protein, 327 aa, Arabidopsis thaliana
  peptide (1)..(327): Ceres Seq. ID no. 12643471
  misc_feature (176)..(275): Pfam Name: 2OG-Fe(II) oxygenase superfamily Pfam Description: 2OG-Fe(II) oxygenase superfamily
  misc_feature (164)..(327): Homolog of NCBI NO: 15228020 NR Description: putative giberellin beta-hydroxylase; protein id: [Arabidopsis thaliana] >gi|25285698|pir||E84783 probable
  misc_feature (1)..(84): Homolog of NCBI NO: 15228020 NR Description: putative giberellin beta-hydroxylase; protein id: [Arabidopsis thaliana] >gi|25285698|pir||E84783 probable
  misc_feature (61)..(181): Homolog of NCBI NO: 15228020 NR Description: putative giberellin beta-hydroxylase; protein id: [Arabidopsis thaliana] >gi|25285698|pir||E84783 probable
  misc_feature (15)..(174): Homolog of NCBI NO: 7433240 NR Description: probable flavonol synthase [imported] - thaliana >gi|20197022|gb|AAM14878.1| putative flavonol synthase
  misc_feature (15)..(174): Homolog of NCBI NO: 30689834 NR Description: flavonol synthase family [Arabidopsis thaliana]
  misc_feature (171)..(323): Homolog of NCBI NO: 7433240 NR Description: probable flavonol synthase [imported] - thaliana >gi|20197022|gb|AAM14878.1| putative flavonol synthase
  misc_feature (171)..(323): Homolog of NCBI NO: 30689834 NR Description: flavonol synthase family [Arabidopsis thaliana]
  misc_feature (23)..(171): Homolog of NCBI NO: 15235126 NR Description: putative Fe(II)/ascorbate oxidase; protein id:
  misc_feature (166)..(292): Homolog of NCBI NO: 15235126 NR Description: putative Fe(II)/ascorbate oxidase; protein id:
  misc_feature (173)..(320): Homolog of NCBI NO: 37536444 NR Description: unknown protein [Oryza sativa (japonica
MEEENKKYQKGVKHLCENGLTKVPTKYIWPEPDRPILTKSDKLIKPNKNLKLPLIDFAELLGPNRPHVLRTIAEACKTYGFFQVVNHGMEGDVSKNMIDVCKRFFELPYEERSKYMSSDMSAPVRYGTSFNQIKDNVFCWRDFLKLYAHPLPDYLPHWPSSPSDFSDEAAKELEEGSQVVVVNCYPPCPEPELTLGMPPHSDYGFLTLLLQDEVEGLQILYRDEWVTVDPIPGSFVVNVGDHLEIFSNGRYKSVLHRVLVNSTKPRISVASLHSFPLTSVVKPSPKLVDKHNPSQYMDTDFTTFLQYITSREPKWKNFLESRKIHHV

SEQ ID NO: 78643 - DNA, 1422 bp, Arabidopsis thaliana
  misc_feature (1)..(1422): Ceres Seq. ID no. 12643545
  misc_feature: MA Experiment ID: 20000437 Result: Down-regulated in Transcription
  misc_feature: MA Experiment 20000437 PARAMETER Experiment Name: At_Drought_P Parameter: Age (day) Value: 8
  misc_feature: MA Experiment 20000437 PARAMETER Experiment Name: At_Drought_P Parameter: Organism Value: A. thaliana
  misc_feature: MA Experiment 20000437 PARAMETER Experiment Name: At_Drought_P Parameter: Plant Line Value: WS
  misc_feature: MA Experiment 20000437 PARAMETER Experiment Name: At_Drought_P Parameter: Timepoint (hr) Value: 24
  misc_feature: MA Experiment 20000437 PARAMETER Experiment Name: At_Drought_P Parameter: Tissue Value: Whole Plant
  misc_feature: MA Experiment 20000437 PARAMETER Experiment Name: At_Drought_P Parameter: Treatment Value: Drought vs. No Drought
atggactgtggcagacacctcgagaacaaccgactaaccggaaagatcccttcctcgttgacgaaactcccaaacctgaaagaactgtacctgcagaacaatgtgttaacaggaacaataccatcagacctggccaaagatgtgatctcaaacttctctgggaaccttaaccttgaaaaaagtggagataaaggcaagaagctcggtgtcatcatcggtgcatcagttggtgcttttgttctgctaattgcaaccatcatttcttgcatcgtcatgtgcaaaagcaagaagaataacaagttgggaaaaacttcggcagagttaacgaatcgtcccttaccgattcagagagtttcgtctaccttgagtgaagctcatggagacgctgcacattgcttcacactttatgagatcgaggaagccacaaaaaaattcgaaaagagaattgggtcgggaggttttggaatcgtatactatggtaaaacaagggaggggaaagagattgctgtaaaggttcttgcaaataattcatatcagggaaagagagagtttgcaaacgaggttacattactctcaaggatacatcatcggaaccttgtgcagtttcttggttattgccaagaagagggaaaaaacatgcttgtgtatgagttcatgcacaatgggactttgaaggagcatctttatggcgtggtaccacgtgaccggagaatcagttggattaaaaggcttgagatagctgaagatgcagcccgagggatcgagtatcttcacacagggtgtgttccagcaatcatacatagagatctcaagactagtaacatcctacttgacaaacacatgagggcaaaggtttcagatttcggtttgtcgaaattcgcagttgacgggacctcacatgtctccagcattgtccgtggcacagttggatatcttgaccccgagtactatatatcgcagcagttaacagagaagagtgatgtatatagcttcggagtcattcttcttgagctaatgtctggccaagaagccatatcgaatgaaagctttggtgtcaactgccggaacatagtccaatgggctaagatgcatatagacaacggggacatccgagggatcatcgatccagcgctagcggaagatgattacagtctccaatcaatgtggaagattgcggagaaagcgttgctgtgtgtgaaaccgcacgggaacatgagaccttcgatgtccgaggtgcaaaaagatatccaagacgcgattaggatcgagaaggaagcgttggctgcaagaggcggtatatcagacgagttttccaggagctcggctcattcgtcttcgctcaacatgggaatgcttgacctggctggatcacagagttatgtatccattgatgaatcagtattgcagccaacagctcggtag

SEQ ID NO: 78644 - protein, 473 aa, Arabidopsis thaliana
  peptide (1)..(473): Ceres Seq. ID no. 12643546
  misc_feature (6)..(473): Homolog of NCBI NO: 15228078 NR Description: putative receptor-like protein kinase; protein id:
  misc_feature (7)..(46): Homolog of NCBI NO: 15228078 NR Description: putative receptor-like protein kinase; protein id:
  misc_feature (6)..(473): Homolog of NCBI NO: 27754635 NR Description: putative receptor protein kinase [Arabidopsis
  misc_feature (7)..(46): Homolog of NCBI NO: 27754635 NR Description: putative receptor protein kinase [Arabidopsis
  misc_feature (7)..(41): Homolog of NCBI NO: 27754635 NR Description: putative receptor protein kinase [Arabidopsis
  misc_feature (6)..(473): Homolog of NCBI NO: 18408845 NR Description: F12A21.14; protein id: At1g67720.1 [Arabidopsis
  misc_feature (7)..(46): Homolog of NCBI NO: 18408845 NR Description: F12A21.14; protein id: At1g67720.1 [Arabidopsis
  misc_feature (6)..(473): Homolog of NCBI NO: 11072027 NR Description: F12A21.14 [Arabidopsis thaliana]
  misc_feature (6)..(423): Homolog of NCBI NO: 34906098 NR Description: putative receptor-like protein kinase [Oryza
  misc_feature (6)..(45): Homolog of NCBI NO: 34906098 NR Description: putative receptor-like protein kinase [Oryza
MDCGRHLENNRLTGKIPSSLTKLPNLKELYLQNNVLTGTIPSDLAKDVISNFSGNLNLEKSGDKGKKLGVIIGASVGAFVLLIATIISCIVMCKSKKNNKLGKTSAELTNRPLPIQRVSSTLSEAHGDAAHCFTLYEIEEATKKFEKRIGSGGFGIVYYGKTREGKEIAVKVLANNSYQGKREFANEVTLLSRIHHRNLVQFLGYCQEEGKNMLVYEFMHNGTLKEHLYGVVPRDRRISWIKRLEIAEDAARGIEYLHTGCVPAIIHRDLKTSNILLDKHMRAKVSDFGLSKFAVDGTSHVSSIVRGTVGYLDPEYYISQQLTEKSDVYSFGVILLELMSGQEAISNESFGVNCRNIVQWAKMHIDNGDIRGIIDPALAEDDYSLQSMWKIAEKALLCVKPHGNMRPSMSEVQKDIQDAIRIEKEALAARGGISDEFSRSSAHSSSLNMGMLDLAGSQSYVSIDESVLQPTAR

SEQ ID NO: 78645 - protein, 382 aa, Arabidopsis thaliana
  peptide (1)..(382): Ceres Seq. ID no. 12643547
  misc_feature (1)..(382): Homolog of NCBI NO: 15228078 NR Description: putative receptor-like protein kinase; protein id:
  misc_feature (1)..(382): Homolog of NCBI NO: 27754635 NR Description: putative receptor protein kinase [Arabidopsis
  misc_feature (1)..(382): Homolog of NCBI NO: 18408845 NR Description: F12A21.14; protein id: At1g67720.1 [Arabidopsis
  misc_feature (1)..(382): Homolog of NCBI NO: 11072027 NR Description: F12A21.14 [Arabidopsis thaliana]
  misc_feature (1)..(332): Homolog of NCBI NO: 34906098 NR Description: putative receptor-like protein kinase [Oryza
  misc_feature (1)..(382): Homolog of NCBI NO: 21698802 NR Description: nodulation receptor kinase [Melilotus alba]
  misc_feature (1)..(382): Homolog of NCBI NO: 21698787 NR Description: nodulation receptor kinase [Medicago truncatula]
  misc_feature (1)..(382): Homolog of NCBI NO: 21622628 NR Description: receptor-like kinase SYMRK [Lotus japonicus]
  misc_feature (1)..(382): Homolog of NCBI NO: 21698800 NR Description: nodulation receptor kinase [Vicia hirsuta]
  misc_feature (1)..(332): Homolog of NCBI NO: 15231424 NR Description: putative protein; protein id: At3g46400.1
MCKSKKNNKLGKTSAELTNRPLPIQRVSSTLSEAHGDAAHCFTLYEIEEATKKFEKRIGSGGFGIVYYGKTREGKEIAVKVLANNSYQGKREFANEVTLLSRIHHRNLVQFLGYCQEEGKNMLVYEFMHNGTLKEHLYGVVPRDRRISWIKRLEIAEDAARGIEYLHTGCVPAIIHRDLKTSNILLDKHMRAKVSDFGLSKFAVDGTSHVSSIVRGTVGYLDPEYYISQQLTEKSDVYSFGVILLELMSGQEAISNESFGVNCRNIVQWAKMHIDNGDIRGIIDPALAEDDYSLQSMWKIAEKALLCVKPHGNMRPSMSEVQKDIQDAIRIEKEALAARGGISDEFSRSSAHSSSLNMGMLDLAGSQSYVSIDESVLQPTAR

SEQ ID NO: 78646 - protein, 261 aa, Arabidopsis thaliana
  peptide (1)..(261): Ceres Seq. ID no. 12643548
  misc_feature (1)..(261): Homolog of NCBI NO: 15228078 NR Description: putative receptor-like protein kinase; protein id:
  misc_feature (1)..(261): Homolog of NCBI NO: 27754635 NR Description: putative receptor protein kinase [Arabidopsis
  misc_feature (1)..(261): Homolog of NCBI NO: 18408845 NR Description: F12A21.14; protein id: At1g67720.1 [Arabidopsis
  misc_feature (1)..(261): Homolog of NCBI NO: 11072027 NR Description: F12A21.14 [Arabidopsis thaliana]
  misc_feature (1)..(211): Homolog of NCBI NO: 34906098 NR Description: putative receptor-like protein kinase [Oryza
  misc_feature (1)..(261): Homolog of NCBI NO: 21698802 NR Description: nodulation receptor kinase [Melilotus alba]
  misc_feature (1)..(261): Homolog of NCBI NO: 21698787 NR Description: nodulation receptor kinase [Medicago truncatula]
  misc_feature (1)..(261): Homolog of NCBI NO: 21622628 NR Description: receptor-like kinase SYMRK [Lotus japonicus]
  misc_feature (1)..(261): Homolog of NCBI NO: 21698800 NR Description: nodulation receptor kinase [Vicia hirsuta]
  misc_feature (1)..(211): Homolog of NCBI NO: 15231424 NR Description: putative protein; protein id: At3g46400.1
MLVYEFMHNGTLKEHLYGVVPRDRRISWIKRLEIAEDAARGIEYLHTGCVPAIIHRDLKTSNILLDKHMRAKVSDFGLSKFAVDGTSHVSSIVRGTVGYLDPEYYISQQLTEKSDVYSFGVILLELMSGQEAISNESFGVNCRNIVQWAKMHIDNGDIRGIIDPALAEDDYSLQSMWKIAEKALLCVKPHGNMRPSMSEVQKDIQDAIRIEKEALAARGGISDEFSRSSAHSSSLNMGMLDLAGSQSYVSIDESVLQPTAR

SEQ ID NO: 78647 - DNA, 2010 bp, Arabidopsis thaliana
  misc_feature (1)..(2010): Ceres Seq. ID no. 12643552
  misc_feature: MA Experiment ID: 20000180 Result: Up-regulated in Transcription
  misc_feature: MA Experiment 20000180 PARAMETER Experiment Name: At_Germinating_Seeds_P Parameter: Age (hr) Value: 24 vs. 0
  misc_feature: MA Experiment 20000180 PARAMETER Experiment Name: At_Germinating_Seeds_P Parameter: Tissue Value: Germinating Seeds
  misc_feature: MA Experiment ID: 20000495 Result: Up-regulated in Transcription
  misc_feature: MA Experiment 20000495 PARAMETER Experiment Name: At_Guard_Cells_P Parameter: Harvest Date Value: 8/2/2002
  misc_feature: MA Experiment 20000495 PARAMETER Experiment Name: At_Guard_Cells_P Parameter: Organism Value: A. thaliana
  misc_feature: MA Experiment 20000495 PARAMETER Experiment Name: At_Guard_Cells_P Parameter: Tissue Value: Guard Cells vs. Leaves
atggatgaatccttaactccaaaccctaagcaaaagccagcttcaacgacgactcgaatccaggctccgacgagtcccttcttcttgggatctaacgatgacagattggaacgggaacaagctcgagccgcaagagccgctgctagccgtcgtaggtctgtcattttcgctcgtgggtctcagcctgagacggagtctgatccttgtttcgacaaacagcaaattctcgagttgtttcagaactgtatcaaattagccagtgaaaacaaaatcaatcaaaagaatacatgggagttgaatttgatcgaccatctttgtgagattatcaaagttgaagatgagaacaatacagaaacaaattttcaaaaggcaagttgcactcttgaagctggagttaagatttactcaatgcgggtagactctgttcattcagaggcatacaaggtcttgggtggaattacccgagctggccatgatgacggtggagatcacgaggatgctgctggtgccgtagaaaatgcaactaaccaaaagaagcagccagagaaaaagatatcgcctttatcaacactggaaccttcctttgatgcccttaacgtgaagaaatttgatgtggcatttgcagtggatcccctttatcatcagacttcagcacagtttgatgaaggtggagcaaagggcctgctgctaaacaatttaggagtctatggagggtgtcaagttctatttgattcacaagaaatccctggaaagcttgtttcgtctgcaaataagcatgacaaatcagaaacaattgatctatcctttgttaaagaatgtgtggagcaaatggtgctaaacatgcgaaagaaggatgagattgtaccatctcttcgggctataatcaatcaatttgatgaagagaaccaaagaccatctgacacgttttcttgtggtcagcagacgaccgagtcatttgatatttcacatggtaatgatgctagctatgccgacgatgatgaaggatatgagaactttggaacttcttttgattatgagggtcaatccggtgatgttgatgaaaactttggccccaatgaagcagaaccaatatattcaaattttcatgaggaagttgaaccagcctccctgcaagacatggattcagatgacagactggagaatgttgatgactatctctttttgtcgttgggaatttcatctaagcaaaattcttgggcaggtcctgatcactggaagtatcgaaaaacaaaaggtccagatgttcaacctgcttcagaaattaaatcctctccaccagcgaagaaaaccaggaaaaagaagcaagcagagcctgaactagattttgcaaaagctttggaggaagaaatgcctgatatttttgcccctccaaaaaacccaaagactttacttctcccagcaagtagaaccccttgtcaaacgaagcttccagaggattgccattatcaacctgagaatctaataaagctatttctactaccgaatgtgatggtatggcttgccaaacacagaccaagtgaaacttcaagacagcagcctgatgattatgaacatggggaatcctggggaaatgataatgtttatgatgatgatgatggcccattcgatgataatgaaaatgatcaaagtgatgcagaggataccaacacattaatctctcagccacgccaggtcaacaaaattgatgtccaatacgataaagcttcaaaacaagttgatgtgcaagtgctaaaggaaactctttgggagtgtcttcaggaatctcatcaacctccaattcaggatgaggaacatcaacaagaaccacctgaaagtagatctttcaaagtgctattggctagcttcccagatgattgccaagcagccgagagaacccaagacatctcaccacatctatgtttcatctgcttgctgcatttggcgaacgagcacaatctcagcctcattggttctcaaaacttggatgatctaacaatacaccttgcctga

SEQ ID NO: 78648 - protein, 669 aa, Arabidopsis thaliana
  peptide (1)..(669): Ceres Seq. ID no. 12643553
  misc_feature (4)..(668): Homolog of NCBI NO: 34913488 NR Description: putative condensin complex subunit [Oryza sativa
  misc_feature (6)..(586): Homolog of NCBI NO: 21450193 NR Description: RIKEN cDNA A730011O11; hypothetical protein [Mus musculus] >gi|18204543|gb|AAH21499.1| Unknown (protein for [Mus musculus] >gi|19263784|gb|AAH25060.1| Unknown (protein for
  misc_feature (522)..(666): Homolog of NCBI NO: 21450193 NR Description: RIKEN cDNA A730011O11; hypothetical protein [Mus musculus] >gi|18204543|gb|AAH21499.1| Unknown (protein for [Mus musculus] >gi|19263784|gb|AAH25060.1| Unknown (protein for
  misc_feature (6)..(586): Homolog of NCBI NO: 30172806 NR Description: Condensin subunit 2 (Barren homolog protein 1)
  misc_feature (522)..(666): Homolog of NCBI NO: 30172806 NR Description: Condensin subunit 2 (Barren homolog protein 1)
  misc_feature (13)..(544): Homolog of NCBI NO: 30172801 NR Description: Condensin subunit 2 (Barren homolog protein 1)
  misc_feature (556)..(666): Homolog of NCBI NO: 30172801 NR Description: Condensin subunit 2 (Barren homolog protein 1)
  misc_feature (13)..(544): Homolog of NCBI NO: 25121987 NR Description: barren [Homo sapiens]
  misc_feature (556)..(666): Homolog of NCBI NO: 25121987 NR Description: barren [Homo sapiens]
  misc_feature (13)..(544): Homolog of NCBI NO: 559715 NR Description: KIAA0074~The ha1438 gene product is related to a
MDESLTPNPKQKPASTTTRIQAPTSPFFLGSNDDRLEREQARAARAAASRRRSVIFARGSQPETESDPCFDKQQILELFQNCIKLASENKINQKNTWELNLIDHLCEIIKVEDENNTETNFQKASCTLEAGVKIYSMRVDSVHSEAYKVLGGITRAGHDDGGDHEDAAGAVENATNQKKQPEKKISPLSTLEPSFDALNVKKFDVAFAVDPLYHQTSAQFDEGGAKGLLLNNLGVYGGCQVLFDSQEIPGKLVSSANKHDKSETIDLSFVKECVEQMVLNMRKKDEIVPSLRAIINQFDEENQRPSDTFSCGQQTTESFDISHGNDASYADDDEGYENFGTSFDYEGQSGDVDENFGPNEAEPIYSNFHEEVEPASLQDMDSDDRLENVDDYLFLSLGISSKQNSWAGPDHWKYRKTKGPDVQPASEIKSSPPAKKTRKKKQAEPELDFAKALEEEMPDIFAPPKNPKTLLLPASRTPCQTKLPEDCHYQPENLIKLFLLPNVMVWLAKHRPSETSRQQPDDYEHGESWGNDNVYDDDDGPFDDNENDQSDAEDTNTLISQPRQVNKIDVQYDKASKQVDVQVLKETLWECLQESHQPPIQDEEHQQEPPESRSFKVLLASFPDDCQAAERTQDISPHLCFICLLHLANEHNLSLIGSQNLDDLTIHLA

SEQ ID NO: 78649 - protein, 533 aa, Arabidopsis thaliana
  peptide (1)..(533): Ceres Seq. ID no. 12643554
  misc_feature (1)..(532): Homolog of NCBI NO: 34913488 NR Description: putative condensin complex subunit [Oryza sativa
  misc_feature (1)..(450): Homolog of NCBI NO: 21450193 NR Description: RIKEN cDNA A730011O11; hypothetical protein [Mus musculus] >gi|18204543|gb|AAH21499.1| Unknown (protein for [Mus musculus] >gi|19263784|gb|AAH25060.1| Unknown (protein for
  misc_feature (386)..(530): Homolog of NCBI NO: 21450193 NR Description: RIKEN cDNA A730011O11; hypothetical protein [Mus musculus] >gi|18204543|gb|AAH21499.1| Unknown (protein for [Mus musculus] >gi|19263784|gb|AAH25060.1| Unknown (protein for
  misc_feature (1)..(450): Homolog of NCBI NO: 30172806 NR Description: Condensin subunit 2 (Barren homolog protein 1)
  misc_feature (386)..(530): Homolog of NCBI NO: 30172806 NR Description: Condensin subunit 2 (Barren homolog protein 1)
  misc_feature (1)..(408): Homolog of NCBI NO: 30172801 NR Description: Condensin subunit 2 (Barren homolog protein 1)
  misc_feature (420)..(530): Homolog of NCBI NO: 30172801 NR Description: Condensin subunit 2 (Barren homolog protein 1)
  misc_feature (1)..(408): Homolog of NCBI NO: 25121987 NR Description: barren [Homo sapiens]
  misc_feature (420)..(530): Homolog of NCBI NO: 25121987 NR Description: barren [Homo sapiens]
  misc_feature (1)..(408): Homolog of NCBI NO: 559715 NR Description: KIAA0074~The ha1438 gene product is related to a
MRVDSVHSEAYKVLGGITRAGHDDGGDHEDAAGAVENATNQKKQPEKKISPLSTLEPSFDALNVKKFDVAFAVDPLYHQTSAQFDEGGAKGLLLNNLGVYGGCQVLFDSQEIPGKLVSSANKHDKSETIDLSFVKECVEQMVLNMRKKDEIVPSLRAIINQFDEENQRPSDTFSCGQQTTESFDISHGNDASYADDDEGYENFGTSFDYEGQSGDVDENFGPNEAEPIYSNFHEEVEPASLQDMDSDDRLENVDDYLFLSLGISSKQNSWAGPDHWKYRKTKGPDVQPASEIKSSPPAKKTRKKKQAEPELDFAKALEEEMPDIFAPPKNPKTLLLPASRTPCQTKLPEDCHYQPENLIKLFLLPNVMVWLAKHRPSETSRQQPDDYEHGESWGNDNVYDDDDGPFDDNENDQSDAEDTNTLISQPRQVNKIDVQYDKASKQVDVQVLKETLWECLQESHQPPIQDEEHQQEPPESRSFKVLLASFPDDCQAAERTQDISPHLCFICLLHLANEHNLSLIGSQNLDDLTIHLA

SEQ ID NO: 78650 - protein, 393 aa, Arabidopsis thaliana
  peptide (1)..(393): Ceres Seq. ID no. 12643555
  misc_feature (1)..(392): Homolog of NCBI NO: 34913488 NR Description: putative condensin complex subunit [Oryza sativa
  misc_feature (1)..(310): Homolog of NCBI NO: 21450193 NR Description: RIKEN cDNA A730011O11; hypothetical protein [Mus musculus] >gi|18204543|gb|AAH21499.1| Unknown (protein for [Mus musculus] >gi|19263784|gb|AAH25060.1| Unknown (protein for
  misc_feature (246)..(390): Homolog of NCBI NO: 21450193 NR Description: RIKEN cDNA A730011O11; hypothetical protein [Mus musculus] >gi|18204543|gb|AAH21499.1| Unknown (protein for [Mus musculus] >gi|19263784|gb|AAH25060.1| Unknown (protein for
  misc_feature (1)..(310): Homolog of NCBI NO: 30172806 NR Description: Condensin subunit 2 (Barren homolog protein 1)
  misc_feature (246)..(390): Homolog of NCBI NO: 30172806 NR Description: Condensin subunit 2 (Barren homolog protein 1)
  misc_feature (1)..(268): Homolog of NCBI NO: 30172801 NR Description: Condensin subunit 2 (Barren homolog protein 1)
  misc_feature (280)..(390): Homolog of NCBI NO: 30172801 NR Description: Condensin subunit 2 (Barren homolog protein 1)
  misc_feature (1)..(268): Homolog of NCBI NO: 25121987 NR Description: barren [Homo sapiens]
  misc_feature (280)..(390): Homolog of NCBI NO: 25121987 NR Description: barren [Homo sapiens]
  misc_feature (1)..(268): Homolog of NCBI NO: 559715 NR Description: KIAA0074~The ha1438 gene product is related to a
MVLNMRKKDEIVPSLRAIINQFDEENQRPSDTFSCGQQTTESFDISHGNDASYADDDEGYENFGTSFDYEGQSGDVDENFGPNEAEPIYSNFHEEVEPASLQDMDSDDRLENVDDYLFLSLGISSKQNSWAGPDHWKYRKTKGPDVQPASEIKSSPPAKKTRKKKQAEPELDFAKALEEEMPDIFAPPKNPKTLLLPASRTPCQTKLPEDCHYQPENLIKLFLLPNVMVWLAKHRPSETSRQQPDDYEHGESWGNDNVYDDDDGPFDDNENDQSDAEDTNTLISQPRQVNKIDVQYDKASKQVDVQVLKETLWECLQESHQPPIQDEEHQQEPPESRSFKVLLASFPDDCQAAERTQDISPHLCFICLLHLANEHNLSLIGSQNLDDLTIHLA

SEQ ID NO: 78651 - DNA, 1536 bp, Arabidopsis thaliana
  misc_feature (1)..(1536): Ceres Seq. ID no. 12643579
  misc_feature: MA Experiment ID: 20000355 Result: Up-regulated in Transcription
  misc_feature: MA Experiment 20000355 PARAMETER Experiment Name: At_Siliques_Sub_P Parameter: Age (day) Value: 21
  misc_feature: MA Experiment 20000355 PARAMETER Experiment Name: At_Siliques_Sub_P Parameter: Organism Value: A. thaliana
  misc_feature: MA Experiment 20000355 PARAMETER Experiment Name: At_Siliques_Sub_P Parameter: Plant Line Value: WS
  misc_feature: MA Experiment 20000355 PARAMETER Experiment Name: At_Siliques_Sub_P Parameter: Tissue Value: Less Than 5mm Siliques vs. Whole Plant
atgaagatgatgaaaccagttccaaagctttgggttgtcatctcaagtgcctttgtgttctgtcttttagttctgtttcaaatcaataaatcagatttgatcgaagcaaatctccaaatcactcatcaagttaacaacttcctcatctccttcgttgcttcttcaaataatcaaatcctaaatcacaccaaacatgcgaatgagagtgatggaatcagagcgaaacagcttgaggaagaagaaacggatacttgcgccggaagatacatctacatgtacaatcttccaagcacattcaacgacgacatcatcaaagaatgtcgtccactcatcaaatggttcgatatgtgtccattcatggtcaattccgggctcggtccacagattttggtctccgataaaaccacagctcgagtcttaaccgtgaaaaccggttcttggtactcaacgaaccaattcttgctttcggttatcttccgagagaggatgaaacactacgagtgtttgaccaacaactcttctctagcctcagcgatctatgtcccatactacgcaggatttgatgtgagccgtcacctctggggatacaacgtgacggttagagacgaattggcgataaagctggcacaatggctgagagagagacctgaatgggggaagatgtacggccgagatcacttctttgtgaccggacggattggttgggatttcaggaggtttcacgatgaagattcagattggggaagcaaactgatgctattacctgaattctcgaatctgacaatgttaggtatcgaaacgactgcttgggctaacgaatttgcgattccttatcctacttatttccatccaaagagcttaacagagatttggagatggcagaagaaagtgaagagtgtgaagaggaagtatttgttttcgtttgttggaggtccaagacctaaattggatggatctattaggggagagattataaagcagtgccttgcatctcacggtaaatgcaactttcttaactgctttgttaatgactgcgataatccggttaagataatgaaggtgtttgaaaattctgtcttctgtttacaaccttcgggagattcgtacactcggagatcgatattcgattcgattctggcgggttgtataccggttttcttcagcccaggttcgggttacaaccaatatatttggtattttccaaaggattataccaagtactcggtttacataccagagaatgaaatgagaaatggaacggttagtctcaagaatattttgggtatgatcgctaaggagaggattttgaggatgagaaaagaggttgtgaagattataccaaaaatcatatataataaaccagggtttggaccggagaagattgaagatgcgtttgacattgcagtggataggatgcttgagagggtagcaatggttaagaggatgatggaagaagggaaagatgttcaaagtcagtattattcacagacaaaggatttgaaaaaacttgagattatacatgaaaaaactgcttaa

SEQ ID NO: 78652 - protein, 511 aa, Arabidopsis thaliana
  peptide (1)..(511): Ceres Seq. ID no. 12643580
  misc_feature (90)..(442): Pfam Name: Exostosin family Pfam Description: Exostosin family
  misc_feature (3)..(511): Homolog of NCBI NO: 15225735 NR Description: hypothetical protein; protein id: At2g32750.1
  misc_feature (22)..(480): Homolog of NCBI NO: 15225734 NR Description: Exostosin family; protein id: At2g32740.1
  misc_feature (84)..(501): Homolog of NCBI NO: 29824391 NR Description: unknown protein [Arabidopsis thaliana]
  misc_feature (73)..(488): Homolog of NCBI NO: 27497206 NR Description: Unknown protein [Oryza sativa (japonica
  misc_feature (46)..(488): Homolog of NCBI NO: 15227020 NR Description: hypothetical protein; protein id: At2g29040.1
  misc_feature (72)..(501): Homolog of NCBI NO: 25411977 NR Description: hypothetical protein At2g20370 [imported] - thaliana >gi|4512698|gb|AAD21751.1| unknown protein [Arabidopsis
  misc_feature (72)..(501): Homolog of NCBI NO: 30680972 NR Description: expressed protein [Arabidopsis thaliana]
  misc_feature (54)..(481): Homolog of NCBI NO: 15225165 NR Description: Exostosin family; protein id: At2g31990.1
  misc_feature (79)..(480): Homolog of NCBI NO: 27497203 NR Description: Hypothetical protein [Oryza sativa (japonica
  misc_feature (73)..(508): Homolog of NCBI NO: 37535066 NR Description: hypothetical protein [Oryza sativa (japonica group)] >gi|22165082|gb|AAM93699.1| hypothetical protein [Oryza
MKMMKPVPKLWVVISSAFVFCLLVLFQINKSDLIEANLQITHQVNNFLISFVASSNNQILNHTKHANESDGIRAKQLEEEETDTCAGRYIYMYNLPSTFNDDIIKECRPLIKWFDMCPFMVNSGLGPQILVSDKTTARVLTVKTGSWYSTNQFLLSVIFRERMKHYECLTNNSSLASAIYVPYYAGFDVSRHLWGYNVTVRDELAIKLAQWLRERPEWGKMYGRDHFFVTGRIGWDFRRFHDEDSDWGSKLMLLPEFSNLTMLGIETTAWANEFAIPYPTYFHPKSLTEIWRWQKKVKSVKRKYLFSFVGGPRPKLDGSIRGEIIKQCLASHGKCNFLNCFVNDCDNPVKIMKVFENSVFCLQPSGDSYTRRSIFDSILAGCIPVFFSPGSGYNQYIWYFPKDYTKYSVYIPENEMRNGTVSLKNILGMIAKERILRMRKEVVKIIPKIIYNKPGFGPEKIEDAFDIAVDRMLERVAMVKRMMEEGKDVQSQYYSQTKDLKKLEIIHEKTA

SEQ ID NO: 78653 - protein, 509 aa, Arabidopsis thaliana
  peptide (1)..(509): Ceres Seq. ID no. 12643581
  misc_feature (88)..(440): Pfam Name: Exostosin family Pfam Description: Exostosin family
  misc_feature (1)..(509): Homolog of NCBI NO: 15225735 NR Description: hypothetical protein; protein id: At2g32750.1
  misc_feature (20)..(478): Homolog of NCBI NO: 15225734 NR Description: Exostosin family; protein id: At2g32740.1
  misc_feature (82)..(499): Homolog of NCBI NO: 29824391 NR Description: unknown protein [Arabidopsis thaliana]
  misc_feature (71)..(486): Homolog of NCBI NO: 27497206 NR Description: Unknown protein [Oryza sativa (japonica
  misc_feature (44)..(486): Homolog of NCBI NO: 15227020 NR Description: hypothetical protein; protein id: At2g29040.1
  misc_feature (70)..(499): Homolog of NCBI NO: 25411977 NR Description: hypothetical protein At2g20370 [imported] - thaliana >gi|4512698|gb|AAD21751.1| unknown protein [Arabidopsis
  misc_feature (70)..(499): Homolog of NCBI NO: 30680972 NR Description: expressed protein [Arabidopsis thaliana]
  misc_feature (52)..(479): Homolog of NCBI NO: 15225165 NR Description: Exostosin family; protein id: At2g31990.1
  misc_feature (77)..(478): Homolog of NCBI NO: 27497203 NR Description: Hypothetical protein [Oryza sativa (japonica
  misc_feature (71)..(506): Homolog of NCBI NO: 37535066 NR Description: hypothetical protein [Oryza sativa (japonica group)] >gi|22165082|gb|AAM93699.1| hypothetical protein [Oryza
MMKPVPKLWVVISSAFVFCLLVLFQINKSDLIEANLQITHQVNNFLISFVASSNNQILNHTKHANESDGIRAKQLEEEETDTCAGRYIYMYNLPSTFNDDIIKECRPLIKWFDMCPFMVNSGLGPQILVSDKTTARVLTVKTGSWYSTNQFLLSVIFRERMKHYECLTNNSSLASAIYVPYYAGFDVSRHLWGYNVTVRDELAIKLAQWLRERPEWGKMYGRDHFFVTGRIGWDFRRFHDEDSDWGSKLMLLPEFSNLTMLGIETTAWANEFAIPYPTYFHPKSLTEIWRWQKKVKSVKRKYLFSFVGGPRPKLDGSIRGEIIKQCLASHGKCNFLNCFVNDCDNPVKIMKVFENSVFCLQPSGDSYTRRSIFDSILAGCIPVFFSPGSGYNQYIWYFPKDYTKYSVYIPENEMRNGTVSLKNILGMIAKERILRMRKEVVKIIPKIIYNKPGFGPEKIEDAFDIAVDRMLERVAMVKRMMEEGKDVQSQYYSQTKDLKKLEIIHEKTA

SEQ ID NO: 78654 - protein, 508 aa, Arabidopsis thaliana
  peptide (1)..(508): Ceres Seq. ID no. 12643582
  misc_feature (87)..(439): Pfam Name: Exostosin family Pfam Description: Exostosin family
  misc_feature (1)..(508): Homolog of NCBI NO: 15225735 NR Description: hypothetical protein; protein id: At2g32750.1
  misc_feature (19)..(477): Homolog of NCBI NO: 15225734 NR Description: Exostosin family; protein id: At2g32740.1
  misc_feature (81)..(498): Homolog of NCBI NO: 29824391 NR Description: unknown protein [Arabidopsis thaliana]
  misc_feature (70)..(485): Homolog of NCBI NO: 27497206 NR Description: Unknown protein [Oryza sativa (japonica
  misc_feature (43)..(485): Homolog of NCBI NO: 15227020 NR Description: hypothetical protein; protein id: At2g29040.1
  misc_feature (69)..(498): Homolog of NCBI NO: 25411977 NR Description: hypothetical protein At2g20370 [imported] - thaliana >gi|4512698|gb|AAD21751.1| unknown protein [Arabidopsis
  misc_feature (69)..(498): Homolog of NCBI NO: 30680972 NR Description: expressed protein [Arabidopsis thaliana]
  misc_feature (51)..(478): Homolog of NCBI NO: 15225165 NR Description: Exostosin family; protein id: At2g31990.1
  misc_feature (76)..(477): Homolog of NCBI NO: 27497203 NR Description: Hypothetical protein [Oryza sativa (japonica
  misc_feature (70)..(505): Homolog of NCBI NO: 37535066 NR Description: hypothetical protein [Oryza sativa (japonica group)] >gi|22165082|gb|AAM93699.1| hypothetical protein [Oryza
MKPVPKLWVVISSAFVFCLLVLFQINKSDLIEANLQITHQVNNFLISFVASSNNQILNHTKHANESDGIRAKQLEEEETDTCAGRYIYMYNLPSTFNDDIIKECRPLIKWFDMCPFMVNSGLGPQILVSDKTTARVLTVKTGSWYSTNQFLLSVIFRERMKHYECLTNNSSLASAIYVPYYAGFDVSRHLWGYNVTVRDELAIKLAQWLRERPEWGKMYGRDHFFVTGRIGWDFRRFHDEDSDWGSKLMLLPEFSNLTMLGIETTAWANEFAIPYPTYFHPKSLTEIWRWQKKVKSVKRKYLFSFVGGPRPKLDGSIRGEIIKQCLASHGKCNFLNCFVNDCDNPVKIMKVFENSVFCLQPSGDSYTRRSIFDSILAGCIPVFFSPGSGYNQYIWYFPKDYTKYSVYIPENEMRNGTVSLKNILGMIAKERILRMRKEVVKIIPKIIYNKPGFGPEKIEDAFDIAVDRMLERVAMVKRMMEEGKDVQSQYYSQTKDLKKLEIIHEKTA

SEQ ID NO: 78655 - DNA, 942 bp, Arabidopsis thaliana
  misc_feature (1)..(942): Ceres Seq. ID no. 12643627
  misc_feature: MA Experiment ID: 20000171 Result: Up-regulated in Transcription
  misc_feature: MA Experiment 20000171 PARAMETER Experiment Name: At_42deg_Heat_P Parameter: Age (day) Value: 14
  misc_feature: MA Experiment 20000171 PARAMETER Experiment Name: At_42deg_Heat_P Parameter: Organism Value: A. thaliana
  misc_feature: MA Experiment 20000171 PARAMETER Experiment Name: At_42deg_Heat_P Parameter: Plant Line Value: WS
  misc_feature: MA Experiment 20000171 PARAMETER Experiment Name: At_42deg_Heat_P Parameter: Temperature (deg C) Value: 42 vs. 22
  misc_feature: MA Experiment 20000171 PARAMETER Experiment Name: At_42deg_Heat_P Parameter: Timepoint (hr) Value: 1
  misc_feature: MA Experiment 20000171 PARAMETER Experiment Name: At_42deg_Heat_P Parameter: Tissue Value: Aerial
  misc_feature: MA Experiment ID: 20001911 Result: Down-regulated in Transcription
  misc_feature: MA Experiment 20001911 PARAMETER Experiment Name: At_Drought_Reproduction_P Parameter: Age (day) Value: 40
  misc_feature: MA Experiment 20001911 PARAMETER Experiment Name: At_Drought_Reproduction_P Parameter: Organism Value: A. thaliana
  misc_feature: MA Experiment 20001911 PARAMETER Experiment Name: At_Drought_Reproduction_P Parameter: Plant Line Value: WS
  misc_feature: MA Experiment 20001911 PARAMETER Experiment Name: At_Drought_Reproduction_P Parameter: Timepoint (day) Value: 10
  misc_feature: MA Experiment 20001911 PARAMETER Experiment Name: At_Drought_Reproduction_P Parameter: Tissue Value: Flowers
  misc_feature: MA Experiment 20001911 PARAMETER Experiment Name: At_Drought_Reproduction_P Parameter: Treatment Value: Drought vs. No Drought
atgagacacggtgatttggctagctctttgttcaggaaatccgaaaacgaaggtgatggattgaagtctttggattggataacaaggttgaaaattgctcttggtgcagctgagggactctcttatttgcatcatgagtgttcaccgcctctagttcatagggatgtacaagcaagtagcatacttcttgatgataaatttgaggtacgtcttggaagcctaagcgaggcatatgctcaaggtgatgcttatcaaagcagaatttctcgtttacttcgattaccgcaatcgagtgaaccatcttcttcaggtgtaacaaatgcaatatgttcgtatgatgtctactgctttggcaaagtgttacttgagctagtaacggggaagctcgggattagctcgccagacaacgcacttgcaaaagagtacatggaagaagctttgccatacatcagcacaaacgagaaagaactagtaaccaagatcttagacccgtcattaatggtggacgaagaccttctagaagaagtatgggcaatggctatcattgcaaagtcatgcctaaacccaaaaccaacaagaagaccattaatgagacacattgtgaacgcacttgagaacccactgaaagtagtaagagaagataccaactcgggttcaggctcttcccggttaagaacaaactcgtcgagagggtcttggaacgctgctatatttgggagctggaggcagagtgcgtcggatgtaacagctgttcaagcgggagcaacaacaagcggtggtggtggtggtggtggtggtaatggtttgagaaactcggggtcgcaaggaagtagcggaaggaacaataacaacaacgggaattcatcgtcgtcgagaagacggcaatctagtgagattgtaccggaacctgctgcttatggagtagtagaggataatttatga

SEQ ID NO: 78656 - protein, 313 aa, Arabidopsis thaliana
  peptide (1)..(313): Ceres Seq. ID no. 12643628
  misc_feature (1)..(313): Homolog of NCBI NO: 15226721 NR Description: leucine-rich repeat transmembrane protein kinase, protein id: At2g16250.1 [Arabidopsis thaliana]
  misc_feature (1)..(282): Homolog of NCBI NO: 15235005 NR Description: leucine-rich repeat transmembrane protein kinase, protein id: At4g39270.1, supported by cDNA: gi_20466769
  misc_feature (1)..(282): Homolog of NCBI NO: 20466770 NR Description: receptor protein kinase-like protein [Arabidopsis
  misc_feature (1)..(245): Homolog of NCBI NO: 34915200 NR Description: putative receptor-like protein kinase [Oryza
  misc_feature (1)..(263): Homolog of NCBI NO: 34394416 NR Description: putative Systemin receptor SR160 precursor [Oryza
  misc_feature (1)..(219): Homolog of NCBI NO: 11346392 NR Description: hypothetical protein F18L15.120 - Arabidopsis >gi|6522619|emb|CAB62031.1| putative protein [Arabidopsis
  misc_feature (1)..(219): Homolog of NCBI NO: 15231424 NR Description: putative protein; protein id: At3g46400.1
  misc_feature (18)..(291): Homolog of NCBI NO: 29367569 NR Description: putative receptor protein kinase [Oryza sativa
  misc_feature (18)..(248): Homolog of NCBI NO: 15218591 NR Description: protein kinase, putative; protein id: At1g10620.1
  misc_feature (1)..(223): Homolog of NCBI NO: 25387103 NR Description: probable receptor protein kinase [imported] - thaliana >gi|12321669|gb|AAG50871.1|AC025294_9 receptor protein
MRHGDLASSLFRKSENEGDGLKSLDWITRLKIALGAAEGLSYLHHECSPPLVHRDVQASSILLDDKFEVRLGSLSEAYAQGDAYQSRISRLLRLPQSSEPSSSGVTNAICSYDVYCFGKVLLELVTGKLGISSPDNALAKEYMEEALPYISTNEKELVTKILDPSLMVDEDLLEEVWAMAIIAKSCLNPKPTRRPLMRHIVNALENPLKVVREDTNSGSGSSRLRTNSSRGSWNAAIFGSWRQSASDVTAVQAGATTSGGGGGGGGNGLRNSGSQGSSGRNNNNNGNSSSSRRRQSSEIVPEPAAYGVVEDNL

SEQ ID NO: 78657 - protein, 171 aa, Arabidopsis thaliana
  peptide (1)..(171): Ceres Seq. ID no. 12643629
  misc_feature (1)..(171): Homolog of NCBI NO: 15226721 NR Description: leucine-rich repeat transmembrane protein kinase, protein id: At2g16250.1 [Arabidopsis thaliana]
  misc_feature (1)..(140): Homolog of NCBI NO: 15235005 NR Description: leucine-rich repeat transmembrane protein kinase, protein id: At4g39270.1, supported by cDNA: gi_20466769
  misc_feature (1)..(140): Homolog of NCBI NO: 20466770 NR Description: receptor protein kinase-like protein [Arabidopsis
  misc_feature (1)..(103): Homolog of NCBI NO: 34915200 NR Description: putative receptor-like protein kinase [Oryza
  misc_feature (1)..(121): Homolog of NCBI NO: 34394416 NR Description: putative Systemin receptor SR160 precursor [Oryza
  misc_feature (1)..(77): Homolog of NCBI NO: 11346392 NR Description: hypothetical protein F18L15.120 - Arabidopsis >gi|6522619|emb|CAB62031.1| putative protein [Arabidopsis
  misc_feature (1)..(77): Homolog of NCBI NO: 15231424 NR Description: putative protein; protein id: At3g46400.1
  misc_feature (1)..(149): Homolog of NCBI NO: 29367569 NR Description: putative receptor protein kinase [Oryza sativa
  misc_feature (1)..(106): Homolog of NCBI NO: 15218591 NR Description: protein kinase, putative; protein id: At1g10620.1
  misc_feature (1)..(81): Homolog of NCBI NO: 25387103 NR Description: probable receptor protein kinase [imported] - thaliana >gi|12321669|gb|AAG50871.1|AC025294_9 receptor protein
MEEALPYISTNEKELVTKILDPSLMVDEDLLEEVWAMAIIAKSCLNPKPTRRPLMRHIVNALENPLKVVREDTNSGSGSSRLRTNSSRGSWNAAIFGSWRQSASDVTAVQAGATTSGGGGGGGGNGLRNSGSQGSSGRNNNNNGNSSSSRRRQSSEIVPEPAAYGVVEDNL

SEQ ID NO: 78658 - DNA, 1895 bp, Arabidopsis thaliana
  misc_feature (1)..(1895): Ceres Seq. ID no. 12643698
  misc_feature: MA Experiment ID: 108434 Result: Down-regulated in Transcription
  misc_feature: MA Experiment 108434 PARAMETER Experiment Name: At_Root_Tips_cDNA_P Parameter: Tissue Value: Root Tips
  misc_feature: MA Experiment ID: 108462 Result: Down-regulated in Transcription
  misc_feature: MA Experiment 108462 PARAMETER Experiment Name: At_Germinating_Seeds_cDNA_P Parameter: Age (day) Value: 2 vs. 0
  misc_feature: MA Experiment 108462 PARAMETER Experiment Name: At_Germinating_Seeds_cDNA_P Parameter: Tissue Value: Germinating Seeds
  misc_feature: MA Experiment ID: 108463 Result: Down-regulated in Transcription
  misc_feature: MA Experiment 108463 PARAMETER Experiment Name: At_Germinating_Seeds_cDNA_P Parameter: Age (day) Value: 3 vs. 0
  misc_feature: MA Experiment 108463 PARAMETER Experiment Name: At_Germinating_Seeds_cDNA_P Parameter: Tissue Value: Germinating Seeds
  misc_feature: MA Experiment ID: 108464 Result: Down-regulated in Transcription
  misc_feature: MA Experiment 108464 PARAMETER Experiment Name: At_Germinating_Seeds_cDNA_P Parameter: Age (day) Value: 4 vs. 0
  misc_feature: MA Experiment 108464 PARAMETER Experiment Name: At_Germinating_Seeds_cDNA_P Parameter: Tissue Value: Germinating Seeds
  misc_feature: MA Experiment ID: 108501 Result: Up-regulated in Transcription
  misc_feature: MA Experiment 108501 PARAMETER Experiment Name: At_ap2_floral_buds_cDNA_P Parameter: Plant Line Value: ap2 (Ler.)
  misc_feature: MA Experiment 108501 PARAMETER Experiment Name: At_ap2_floral_buds_cDNA_P Parameter: Tissue Value: Closed Flower
  misc_feature: MA Experiment ID: 108595 Result: Down-regulated in Transcription
  misc_feature: MA Experiment 108595 PARAMETER Experiment Name: At_Ler-pi_Ovule_cDNA_P Parameter: Plant Line Value: null
  misc_feature: MA Experiment ID: 108607 Result: Down-regulated in Transcription
  misc_feature: MA Experiment 108607 PARAMETER Experiment Name: At_100uM_ABA_cDNA_P Parameter: Timepoint (hr) Value: 4
  misc_feature: MA Experiment 108607 PARAMETER Experiment Name: At_100uM_ABA_cDNA_P Parameter: Tissue Value: Aerial
  misc_feature: MA Experiment 108607 PARAMETER Experiment Name: At_100uM_ABA_cDNA_P Parameter: Treatment Value: 100uM ABA vs. No Treatment
  misc_feature: MA Experiment ID: 108668 Result: Down-regulated in Transcription
  misc_feature: MA Experiment 108668 PARAMETER Experiment Name: At_2mM_SA_cDNA_P Parameter: Plant Line Value: WS
  misc_feature: MA Experiment 108668 PARAMETER Experiment Name: At_2mM_SA_cDNA_P Parameter: Timepoint (hr) Value: 6
  misc_feature: MA Experiment 108668 PARAMETER Experiment Name: At_2mM_SA_cDNA_P Parameter: Treatment Value: 2mM SA vs. No Treatment
  misc_feature: MA Experiment ID: 20000068 Result: Down-regulated in Transcription
  misc_feature: MA Experiment ID: 20000113 Result: Down-regulated in Transcription
  misc_feature: MA Experiment 20000113 PARAMETER Experiment Name: At_42deg_Heat_cDNA_P Parameter: Temperature (deg C) Value: 42 vs. 22
  misc_feature: MA Experiment 20000113 PARAMETER Experiment Name: At_42deg_Heat_cDNA_P Parameter: Timepoint (hr) Value: 8
  misc_feature: MA Experiment 20000113 PARAMETER Experiment Name: At_42deg_Heat_cDNA_P Parameter: Tissue Value: Aerial
  misc_feature: MA Experiment ID: 20000173 Result: Down-regulated in Transcription
  misc_feature: MA Experiment 20000173 PARAMETER Experiment Name: At_42deg_Heat_P Parameter: Age (day) Value: 14
  misc_feature: MA Experiment 20000173 PARAMETER Experiment Name: At_42deg_Heat_P Parameter: Organism Value: A. thaliana
  misc_feature: MA Experiment 20000173 PARAMETER Experiment Name: At_42deg_Heat_P Parameter: Plant Line Value: WS
  misc_feature: MA Experiment 20000173 PARAMETER Experiment Name: At_42deg_Heat_P Parameter: Temperature (deg C) Value: 42 vs. 22
  misc_feature: MA Experiment 20000173 PARAMETER Experiment Name: At_42deg_Heat_P Parameter: Timepoint (hr) Value: 6
  misc_feature: MA Experiment 20000173 PARAMETER Experiment Name: At_42deg_Heat_P Parameter: Tissue Value: Aerial
  misc_feature: MA Experiment ID: 20000184 Result: Down-regulated in Transcription
  misc_feature: MA Experiment 20000184 PARAMETER Experiment Name: At_Shoots__P Parameter: Age (day) Value: 7
  misc_feature: MA Experiment 20000184 PARAMETER Experiment Name: At_Shoots__P Parameter: Tissue Value: Shoots vs. Whole Plant
  misc_feature: MA Experiment ID: 20000185 Result: Down-regulated in Transcription
  misc_feature: MA Experiment 20000185 PARAMETER Experiment Name: At_Roots__P Parameter: Age (day) Value: 7 vs. 21
  misc_feature: MA Experiment 20000185 PARAMETER Experiment Name: At_Roots__P Parameter: Organism Value: A. thaliana
  misc_feature: MA Experiment 20000185 PARAMETER Experiment Name: At_Roots__P Parameter: Tissue Value: Roots vs. Whole Plant
  misc_feature: MA Experiment ID: 20000234 Result: Down-regulated in Transcription
  misc_feature: MA Experiment 20000234 PARAMETER Experiment Name: At_Siliques_P Parameter: Age (day) Value: 21
  misc_feature: MA Experiment 20000234 PARAMETER Experiment Name: At_Siliques_P Parameter: Organism Value: A. thaliana
  misc_feature: MA Experiment 20000234 PARAMETER Experiment Name: At_Siliques_P Parameter: Plant Line Value: WS
  misc_feature: MA Experiment 20000234 PARAMETER Experiment Name: At_Siliques_P Parameter: Tissue Value: Less Than 5mm Siliques vs. Whole Plant
  misc_feature: MA Experiment ID: 20000235 Result: Down-regulated in Transcription
  misc_feature: MA Experiment 20000235 PARAMETER Experiment Name: At_Siliques_P Parameter: Age (day) Value: 21
  misc_feature: MA Experiment 20000235 PARAMETER Experiment Name: At_Siliques_P Parameter: Organism Value: A. thaliana
  misc_feature: MA Experiment 20000235 PARAMETER Experiment Name: At_Siliques_P Parameter: Plant Line Value: WS
  misc_feature: MA Experiment 20000235 PARAMETER Experiment Name: At_Siliques_P Parameter: Tissue Value: 5-10mm Siliques vs. Whole Plant
  misc_feature: MA Experiment ID: 20000264 Result: Down-regulated in Transcription
  misc_feature: MA Experiment 20000264 PARAMETER Experiment Name: At_Open_Flower_P Parameter: Age (day) Value: 21
  misc_feature: MA Experiment 20000264 PARAMETER Experiment Name: At_Open_Flower_P Parameter: Plant Line Value: WS
  misc_feature: MA Experiment 20000264 PARAMETER Experiment Name: At_Open_Flower_P Parameter: Tissue Value: Open Flower vs. Whole Plant
  misc_feature: MA Experiment ID: 20000265 Result: Down-regulated in Transcription
  misc_feature: MA Experiment 20000265 PARAMETER Experiment Name: At_Open_Flower_P Parameter: Age (day) Value: 21
  misc_feature: MA Experiment 20000265 PARAMETER Experiment Name: At_Open_Flower_P Parameter: Plant Line Value: WS
  misc_feature: MA Experiment 20000265 PARAMETER Experiment Name: At_Open_Flower_P Parameter: Tissue Value: Closed Flower vs. Whole Plant
  misc_feature: MA Experiment ID: 20000269 Result: Down-regulated in Transcription
  misc_feature: MA Experiment 20000269 PARAMETER Experiment Name: At_1mM_KNO3_L-vs-H_Roots_P Parameter: Age (day) Value: 7,10,12
  misc_feature: MA Experiment 20000269 PARAMETER Experiment Name: At_1mM_KNO3_L-vs-H_Roots_P Parameter: Organism Value: A. thaliana
  misc_feature: MA Experiment 20000269 PARAMETER Experiment Name: At_1mM_KNO3_L-vs-H_Roots_P Parameter: Plant Line Value: WS
  misc_feature: MA Experiment 20000269 PARAMETER Experiment Name: At_1mM_KNO3_L-vs-H_Roots_P Parameter: Timepoint (day) Value: 7,10,12
  misc_feature: MA Experiment 20000269 PARAMETER Experiment Name: At_1mM_KNO3_L-vs-H_Roots_P Parameter: Tissue Value: Roots
  misc_feature: MA Experiment 20000269 PARAMETER Experiment Name: At_1mM_KNO3_L-vs-H_Roots_P Parameter: Treatment Value: 1mM KNO3 vs. 50mM KNO3
  misc_feature: MA Experiment ID: 20000286 Result: Down-regulated in Transcription
  misc_feature: MA Experiment 20000286 PARAMETER Experiment Name: At_Open_Flower_P Parameter: Age (day) Value: 21
  misc_feature: MA Experiment 20000286 PARAMETER Experiment Name: At_Open_Flower_P Parameter: Plant Line Value: WS
  misc_feature: MA Experiment 20000286 PARAMETER Experiment Name: At_Open_Flower_P Parameter: Tissue Value: Half Open vs. Whole Plant
  misc_feature: MA Experiment ID: 20000308 Result: Up-regulated in Transcription
  misc_feature: MA Experiment 20000308 PARAMETER Experiment Name: At_100mM_NaCl__P Parameter: Age (day) Value: 17
  misc_feature: MA Experiment 20000308 PARAMETER Experiment Name: At_100mM_NaCl__P Parameter: Organism Value: A. thaliana
  misc_feature: MA Experiment 20000308 PARAMETER Experiment Name: At_100mM_NaCl__P Parameter: Plant Line Value: WS
  misc_feature: MA Experiment 20000308 PARAMETER Experiment Name: At_100mM_NaCl__P Parameter: Timepoint (hr) Value: 72
  misc_feature: MA Experiment 20000308 PARAMETER Experiment Name: At_100mM_NaCl__P Parameter: Tissue Value: Whole Plant
  misc_feature: MA Experiment 20000308 PARAMETER Experiment Name: At_100mM_NaCl__P Parameter: Treatment Value: 100mM NaCl vs. No Treatment
  misc_feature: MA Experiment ID: 20000436 Result: Down-regulated in Transcription
  misc_feature: MA Experiment 20000436 PARAMETER Experiment Name: At_Drought_P Parameter: Age (day) Value: 7
  misc_feature: MA Experiment 20000436 PARAMETER Experiment Name: At_Drought_P Parameter: Organism Value: A. thaliana
  misc_feature: MA Experiment 20000436 PARAMETER Experiment Name: At_Drought_P Parameter: Plant Line Value: WS
  misc_feature: MA Experiment 20000436 PARAMETER Experiment Name: At_Drought_P Parameter: Timepoint (hr) Value: 12
  misc_feature: MA Experiment 20000436 PARAMETER Experiment Name: At_Drought_P Parameter: Tissue Value: Whole Plant
  misc_feature: MA Experiment 20000436 PARAMETER Experiment Name: At_Drought_P Parameter: Treatment Value: Drought vs. No Drought
  misc_feature: MA Experiment ID: 20000438 Result: Down-regulated in Transcription
  misc_feature: MA Experiment 20000438 PARAMETER Experiment Name: At_Shoots__P Parameter: Age (day) Value: 14
  misc_feature: MA Experiment 20000438 PARAMETER Experiment Name: At_Shoots__P Parameter: Tissue Value: Shoots vs. Whole Plant
  misc_feature: MA Experiment ID: 20000439 Result: Down-regulated in Transcription
  misc_feature: MA Experiment 20000439 PARAMETER Experiment Name: At_Roots__P Parameter: Age (day) Value: 14 vs. 21
  misc_feature: MA Experiment 20000439 PARAMETER Experiment Name: At_Roots__P Parameter: Organism Value: A. thaliana
  misc_feature: MA Experiment 20000439 PARAMETER Experiment Name: At_Roots__P Parameter: Tissue Value: Roots vs. Whole Plant
  misc_feature: MA Experiment ID: 20000527 Result: Down-regulated in Transcription
  misc_feature: MA Experiment 20000527 PARAMETER Experiment Name: At_10percent_PEG_P Parameter: Age (day) Value: 20
  misc_feature: MA Experiment 20000527 PARAMETER Experiment Name: At_10percent_PEG_P Parameter: Organism Value: A. thaliana
  misc_feature: MA Experiment 20000527 PARAMETER Experiment Name: At_10percent_PEG_P Parameter: Plant Line Value: WS
  misc_feature: MA Experiment 20000527 PARAMETER Experiment Name: At_10percent_PEG_P Parameter: Timepoint (day) Value: 20
  misc_feature: MA Experiment 20000527 PARAMETER Experiment Name: At_10percent_PEG_P Parameter: Tissue Value: Whole Plant
  misc_feature: MA Experiment 20000527 PARAMETER Experiment Name: At_10percent_PEG_P Parameter: Treatment Value: 10percent PEG vs. No Treatment
  misc_feature: MA Experiment ID: 20001450 Result: Down-regulated in Transcription
  misc_feature: MA Experiment 20001450 PARAMETER Experiment Name: At_Far-red-induction_P Parameter: Age (day) Value: 7
  misc_feature: MA Experiment 20001450 PARAMETER Experiment Name: At_Far-red-induction_P Parameter: Light Value: Far-red vs. White
  misc_feature: MA Experiment 20001450 PARAMETER Experiment Name: At_Far-red-induction_P Parameter: Organism Value: A. thaliana
  misc_feature: MA Experiment 20001450 PARAMETER Experiment Name: At_Far-red-induction_P Parameter: Plant Line Value: Columbia
  misc_feature: MA Experiment 20001450 PARAMETER Experiment Name: At_Far-red-induction_P Parameter: Timepoint (hr) Value: 8
  misc_feature: MA Experiment 20001450 PARAMETER Experiment Name: At_Far-red-induction_P Parameter: Tissue Value: Whole Plant
  misc_feature: MA Experiment ID: 20001451 Result: Down-regulated in Transcription
  misc_feature: MA Experiment 20001451 PARAMETER Experiment Name: At_Far-red-induction_P Parameter: Age (day) Value: 7
  misc_feature: MA Experiment 20001451 PARAMETER Experiment Name: At_Far-red-induction_P Parameter: Light Value: Far-red vs. White
  misc_feature: MA Experiment 20001451 PARAMETER Experiment Name: At_Far-red-induction_P Parameter: Organism Value: A. thaliana
  misc_feature: MA Experiment 20001451 PARAMETER Experiment Name: At_Far-red-induction_P Parameter: Plant Line Value: Columbia
  misc_feature: MA Experiment 20001451 PARAMETER Experiment Name: At_Far-red-induction_P Parameter: Timepoint (hr) Value: 24
  misc_feature: MA Experiment 20001451 PARAMETER Experiment Name: At_Far-red-induction_P Parameter: Tissue Value: Whole Plant
  misc_feature: MA Experiment ID: 20001458 Result: Up-regulated in Transcription
  misc_feature: MA Experiment 20001458 PARAMETER Experiment Name: At_50mM_NH4NO3_L-to-H_P Parameter: Age (day) Value: Undefined
  misc_feature: MA Experiment 20001458 PARAMETER Experiment Name: At_50mM_NH4NO3_L-to-H_P Parameter: Organism Value: Undefined
  misc_feature: MA Experiment 20001458 PARAMETER Experiment Name: At_50mM_NH4NO3_L-to-H_P Parameter: Plant Line Value: Undefined
  misc_feature: MA Experiment 20001458 PARAMETER Experiment Name: At_50mM_NH4NO3_L-to-H_P Parameter: Timepoint (hr) Value: 2
  misc_feature: MA Experiment 20001458 PARAMETER Experiment Name: At_50mM_NH4NO3_L-to-H_P Parameter: Tissue Value: Siliques
  misc_feature: MA Experiment 20001458 PARAMETER Experiment Name: At_50mM_NH4NO3_L-to-H_P Parameter: Treatment Value: 50mM NH4NO3 vs. 100mM Manitol
  misc_feature: MA Experiment ID: 20001459 Result: Up-regulated in Transcription
  misc_feature: MA Experiment 20001459 PARAMETER Experiment Name: At_50mM_NH4NO3_L-to-H_P Parameter: Age (day) Value: Undefined
  misc_feature: MA Experiment 20001459 PARAMETER Experiment Name: At_50mM_NH4NO3_L-to-H_P Parameter: Organism Value: Undefined
  misc_feature: MA Experiment 20001459 PARAMETER Experiment Name: At_50mM_NH4NO3_L-to-H_P Parameter: Plant Line Value: Undefined
  misc_feature: MA Experiment 20001459 PARAMETER Experiment Name: At_50mM_NH4NO3_L-to-H_P Parameter: Timepoint (hr) Value: 4
  misc_feature: MA Experiment 20001459 PARAMETER Experiment Name: At_50mM_NH4NO3_L-to-H_P Parameter: Tissue Value: Siliques
  misc_feature: MA Experiment 20001459 PARAMETER Experiment Name: At_50mM_NH4NO3_L-to-H_P Parameter: Treatment Value: 50mM NH4NO3 vs. 100mM Manitol
  misc_feature: MA Experiment ID: 20001554 Result: Down-regulated in Transcription
  misc_feature: MA Experiment 20001554 PARAMETER Experiment Name: At_Drought_Soil_Dry_P Parameter: Age (day) Value: 21
  misc_feature: MA Experiment 20001554 PARAMETER Experiment Name: At_Drought_Soil_Dry_P Parameter: Organism Value: A. thaliana
  misc_feature: MA Experiment 20001554 PARAMETER Experiment Name: At_Drought_Soil_Dry_P Parameter: Plant Line Value: WS
  misc_feature: MA Experiment 20001554 PARAMETER Experiment Name: At_Drought_Soil_Dry_P Parameter: Post Timepoint (hr) Value: None
  misc_feature: MA Experiment 20001554 PARAMETER Experiment Name: At_Drought_Soil_Dry_P Parameter: Post-Treatment Value: None
  misc_feature: MA Experiment 20001554 PARAMETER Experiment Name: At_Drought_Soil_Dry_P Parameter: Timepoint (day) Value: 7
  misc_feature: MA Experiment 20001554 PARAMETER Experiment Name: At_Drought_Soil_Dry_P Parameter: Treatment Value: Drought vs. No Drought
  misc_feature: MA Experiment ID: 20001555 Result: Down-regulated in Transcription
  misc_feature: MA Experiment 20001555 PARAMETER Experiment Name: At_Drought_Soil_Dry_P Parameter: Age (day) Value: 24
  misc_feature: MA Experiment 20001555 PARAMETER Experiment Name: At_Drought_Soil_Dry_P Parameter: Organism Value: A. thaliana
  misc_feature: MA Experiment 20001555 PARAMETER Experiment Name: At_Drought_Soil_Dry_P Parameter: Plant Line Value: WS
  misc_feature: MA Experiment 20001555 PARAMETER Experiment Name: At_Drought_Soil_Dry_P Parameter: Post Timepoint (hr) Value: None
  misc_feature: MA Experiment 20001555 PARAMETER Experiment Name: At_Drought_Soil_Dry_P Parameter: Post-Treatment Value: None
  misc_feature: MA Experiment 20001555 PARAMETER Experiment Name: At_Drought_Soil_Dry_P Parameter: Timepoint (day) Value: 10
  misc_feature: MA Experiment 20001555 PARAMETER Experiment Name: At_Drought_Soil_Dry_P Parameter: Treatment Value: Drought vs. No Drought
  misc_feature: MA Experiment ID: 20001556 Result: Down-regulated in Transcription
  misc_feature: MA Experiment 20001556 PARAMETER Experiment Name: At_Drought_Soil_Dry_P Parameter: Age (day) Value: 26
  misc_feature: MA Experiment 20001556 PARAMETER Experiment Name: At_Drought_Soil_Dry_P Parameter: Organism Value: A. thaliana
  misc_feature: MA Experiment 20001556 PARAMETER Experiment Name: At_Drought_Soil_Dry_P Parameter: Plant Line Value: WS
  misc_feature: MA Experiment 20001556 PARAMETER Experiment Name: At_Drought_Soil_Dry_P Parameter: Post Timepoint (hr) Value: None
  misc_feature: MA Experiment 20001556 PARAMETER Experiment Name: At_Drought_Soil_Dry_P Parameter: Post-Treatment Value: None
  misc_feature: MA Experiment 20001556 PARAMETER Experiment Name: At_Drought_Soil_Dry_P Parameter: Timepoint (day) Value: 12
  misc_feature: MA Experiment 20001556 PARAMETER Experiment Name: At_Drought_Soil_Dry_P Parameter: Treatment Value: Drought vs. No Drought
  misc_feature: MA Experiment ID: 20001557 Result: Up-regulated in Transcription
  misc_feature: MA Experiment 20001557 PARAMETER Experiment Name: At_Drought_Soil_Dry_P Parameter: Age (day) Value: 27
  misc_feature: MA Experiment 20001557 PARAMETER Experiment Name: At_Drought_Soil_Dry_P Parameter: Organism Value: A. thaliana
  misc_feature: MA Experiment 20001557 PARAMETER Experiment Name: At_Drought_Soil_Dry_P Parameter: Plant Line Value: WS
  misc_feature: MA Experiment 20001557 PARAMETER Experiment Name: At_Drought_Soil_Dry_P Parameter: Post Timepoint (hr) Value: 3
  misc_feature: MA Experiment 20001557 PARAMETER Experiment Name: At_Drought_Soil_Dry_P Parameter: Post-Treatment Value: Re-Water vs. No Drought
  misc_feature: MA Experiment 20001557 PARAMETER Experiment Name: At_Drought_Soil_Dry_P Parameter: Timepoint (day) Value: 13
  misc_feature: MA Experiment 20001557 PARAMETER Experiment Name: At_Drought_Soil_Dry_P Parameter: Treatment Value: Drought vs. No Drought
  misc_feature: MA Experiment ID: 20001558 Result: Up-regulated in Transcription
  misc_feature: MA Experiment 20001558 PARAMETER Experiment Name: At_Drought_Soil_Dry_P Parameter: Age (day) Value: 27
  misc_feature: MA Experiment 20001558 PARAMETER Experiment Name: At_Drought_Soil_Dry_P Parameter: Organism Value: A. thaliana
  misc_feature: MA Experiment 20001558 PARAMETER Experiment Name: At_Drought_Soil_Dry_P Parameter: Plant Line Value: WS
  misc_feature: MA Experiment 20001558 PARAMETER Experiment Name: At_Drought_Soil_Dry_P Parameter: Post Timepoint (hr) Value: 6
  misc_feature: MA Experiment 20001558 PARAMETER Experiment Name: At_Drought_Soil_Dry_P Parameter: Post-Treatment Value: Re-Water vs. No Drought
  misc_feature: MA Experiment 20001558 PARAMETER Experiment Name: At_Drought_Soil_Dry_P Parameter: Timepoint (day) Value: 13
  misc_feature: MA Experiment 20001558 PARAMETER Experiment Name: At_Drought_Soil_Dry_P Parameter: Treatment Value: Drought vs. No Drought
  misc_feature: MA Experiment ID: 20001560 Result: Up-regulated in Transcription
  misc_feature: MA Experiment 20001560 PARAMETER Experiment Name: At_Drought_Soil_Dry_P Parameter: Age (day) Value: 28
  misc_feature: MA Experiment 20001560 PARAMETER Experiment Name: At_Drought_Soil_Dry_P Parameter: Organism Value: A. thaliana
  misc_feature: MA Experiment 20001560 PARAMETER Experiment Name: At_Drought_Soil_Dry_P Parameter: Plant Line Value: WS
  misc_feature: MA Experiment 20001560 PARAMETER Experiment Name: At_Drought_Soil_Dry_P Parameter: Post Timepoint (hr) Value: None
  misc_feature: MA Experiment 20001560 PARAMETER Experiment Name: At_Drought_Soil_Dry_P Parameter: Post-Treatment Value: None
  misc_feature: MA Experiment 20001560 PARAMETER Experiment Name: At_Drought_Soil_Dry_P Parameter: Timepoint (day) Value: 14
  misc_feature: MA Experiment 20001560 PARAMETER Experiment Name: At_Drought_Soil_Dry_P Parameter: Treatment Value: Drought vs. No Drought
cacacacactttctcatcttctttctacaaatgggtttccaaagatctatctcttcttcttctgcattaaaatggcttggatttgtaacagcggtttgggttcaatccatctccggcaacaactacactttttcaaactactccggtgctcttaagtctctcatgaatctcaaccagctcgagctcaacaacctctctgtcgctaaagacgtcggaaaagcctttgggatcctggctggccttgcctctgaccgtcttcccactccggtcatcctccttattggttgctttgaaggtcttcttggttatggtgtacaatggctcgttgttagccgcaccatccaaccaatcccttattggcagatgtgtatattcctctgtatgggagggaacagcacaacgtggatgaacacggcggttctagtgacttgcatacgcaattttcgacgaaaccgtggtccggtctccgggatattgaaaggatatgtcggtttaagcacagctatattcactgatctctgtactgctctgttctcaaacgatccggcgtcgtttttggttttactagccgtggtgccttttgccgtatgtctcacggcggttttcttcctccgtgagatcccaccagcatcttccgcagctgaggagaacgaagagactcgttactttaccatattcaacattgtggccgttgttgtcgccgtgtatcttcagtcttacgacatcattggaatcaaaactggagtgttctctgtcgctttcgcttctatacttctcttcctcttggcttctccaatagccattcctttccactccttcatcaagagcttgaactacggtgaacaagatgacttagaaggacggattcaagaaccgttgcttagatccgagatagcggcagcggagaaagaagtaatagttgtagctgcggtggcagcggaagaggaggagaagaagaggaagaaaccggttttgggagaagaccacactataatggaagcagtgttgaccgttgacttttgggtgctttttgtgtccttcttgtgtggtgtaggaactggtttagctgtgatgaacaatatgggtcagataggtcttgcccttggatacacaaatgtctcaatctttgtctccatgactagtatttggggattcttcggtcgcattctctccggtactctctccgaatactttctcaagaaagctggaacaccaagaccactatggaatgcagcctctcaaatccttatggccgtaggatatatactaatggctttagccgtgcctaattcactctacatcggttcaatggtggttggagtatgttacggtgtccgtctagccataactgtaccaacagcttccgaactctttggtctcaaatactacggtctcatctacaacatcttagtacttaacttgccacttggctcgtttctcttctcgggtctcctcgctggcttcctctacgatgcagaggcaacaccaactcctggtgggggcaacacgtgcgtaggagctcattgctaccgtctcatcttcatagtcatggcattagcttctgttatcggagtcggtttggatcttgtgttggcttataggactaaggagatttacgctaagattcacgctagcaagaagtcaaagaaatctggtggtagccttagttaagacactgtatatctagttccggtgcactacattgttttcagatgctgattttgtatacatgatacaatatcggattcaagatattgttgaacaaaatttcaagtaccagagatcattgttgtagtagcatcgccaatgtatttttttgtctttccgagatttgttcaaaattatataaatgtatgacattttgatagtccaattccaattattttctaagattt

SEQ ID NO: 78659 - protein, 556 aa, Arabidopsis thaliana; identical to SEQ ID NO: 41272
  peptide (1)..(556): Ceres Seq. ID no. 12643699
  misc_feature (244)..(490): Pfam Name: Sugar (and other) transporter Pfam Description: Sugar (and other) transporter
  misc_feature (11)..(556): Homolog of NCBI NO: 15227274 NR Description: nodulin-like protein; protein id: At2g16660.1, by cDNA: gi_17979282, supported by cDNA: gi_20465249 [Arabidopsis
  misc_feature (11)..(339): Homolog of NCBI NO: 15236224 NR Description: putative protein; protein id: At4g34950.1
  misc_feature (286)..(555): Homolog of NCBI NO: 15236224 NR Description: putative protein; protein id: At4g34950.1
  misc_feature (276)..(545): Homolog of NCBI NO: 38345150 NR Description: OSJNBa0014K14.4 [Oryza sativa (japonica
  misc_feature (17)..(269): Homolog of NCBI NO: 38345150 NR Description: OSJNBa0014K14.4 [Oryza sativa (japonica
  misc_feature (16)..(269): Homolog of NCBI NO: 24461856 NR Description: nodulin-like protein [Poncirus trifoliata]
  misc_feature (304)..(544): Homolog of NCBI NO: 24461856 NR Description: nodulin-like protein [Poncirus trifoliata]
  misc_feature (24)..(294): Homolog of NCBI NO: 18395988 NR Description: unknown protein; protein id: At3g01930.1 thaliana] >gi|6091732|gb|AAF03444.1|AC010797_20 unknown protein thaliana] >gi|6513938|gb|AAF14842.1|AC011664_24 unknown protein
  misc_feature (298)..(548): Homolog of NCBI NO: 18395988 NR Description: unknown protein; protein id: At3g01930.1 thaliana] >gi|6091732|gb|AAF03444.1|AC010797_20 unknown protein thaliana] >gi|6513938|gb|AAF14842.1|AC011664_24 unknown protein
  misc_feature (24)..(321): Homolog of NCBI NO: 15241312 NR Description: nodulin-like protein; protein id: At5g14120.1

SEQ ID NO: 78660 - protein, 546 aa, Arabidopsis thaliana; identical to SEQ ID NO: 41273
  peptide (1)..(546): Ceres Seq. ID no. 12643700
  misc_feature (234)..(480): Pfam Name: Sugar (and other) transporter Pfam Description: Sugar (and other) transporter
  misc_feature (1)..(546): Homolog of NCBI NO: 15227274 NR Description: nodulin-like protein; protein id: At2g16660.1, by cDNA: gi_17979282, supported by cDNA: gi_20465249 [Arabidopsis
  misc_feature (1)..(329): Homolog of NCBI NO: 15236224 NR Description: putative protein; protein id: At4g34950.1
  misc_feature (276)..(545): Homolog of NCBI NO: 15236224 NR Description: putative protein; protein id: At4g34950.1
  misc_feature (266)..(535): Homolog of NCBI NO: 38345150 NR Description: OSJNBa0014K14.4 [Oryza sativa (japonica
  misc_feature (7)..(259): Homolog of NCBI NO: 38345150 NR Description: OSJNBa0014K14.4 [Oryza sativa (japonica
  misc_feature (6)..(259): Homolog of NCBI NO: 24461856 NR Description: nodulin-like protein [Poncirus trifoliata]
  misc_feature (294)..(534): Homolog of NCBI NO: 24461856 NR Description: nodulin-like protein [Poncirus trifoliata]
  misc_feature (14)..(284): Homolog of NCBI NO: 18395988 NR Description: unknown protein; protein id: At3g01930.1 thaliana] >gi|6091732|gb|AAF03444.1|AC010797_20 unknown protein thaliana] >gi|6513938|gb|AAF14842.1|AC011664_24 unknown protein
  misc_feature (288)..(538): Homolog of NCBI NO: 18395988 NR Description: unknown protein; protein id: At3g01930.1 thaliana] >gi|6091732|gb|AAF03444.1|AC010797_20 unknown protein thaliana] >gi|6513938|gb|AAF14842.1|AC011664_24 unknown protein
  misc_feature (14)..(311): Homolog of NCBI NO: 15241312 NR Description: nodulin-like protein; protein id: At5g14120.1

SEQ ID NO: 78661 - protein, 502 aa, Arabidopsis thaliana; identical to SEQ ID NO: 41274
  peptide (1)..(502): Ceres Seq. ID no. 12643701
  misc_feature (190)..(436): Pfam Name: Sugar (and other) transporter Pfam Description: Sugar (and other) transporter
  misc_feature (1)..(502): Homolog of NCBI NO: 15227274 NR Description: nodulin-like protein; protein id: At2g16660.1, by cDNA: gi_17979282, supported by cDNA: gi_20465249 [Arabidopsis
  misc_feature (1)..(285): Homolog of NCBI NO: 15236224 NR Description: putative protein; protein id: At4g34950.1
  misc_feature (232)..(501): Homolog of NCBI NO: 15236224 NR Description: putative protein; protein id: At4g34950.1
  misc_feature (222)..(491): Homolog of NCBI NO: 38345150 NR Description: OSJNBa0014K14.4 [Oryza sativa (japonica
  misc_feature (1)..(215): Homolog of NCBI NO: 38345150 NR Description: OSJNBa0014K14.4 [Oryza sativa (japonica
  misc_feature (1)..(215): Homolog of NCBI NO: 24461856 NR Description: nodulin-like protein [Poncirus trifoliata]
  misc_feature (250)..(490): Homolog of NCBI NO: 24461856 NR Description: nodulin-like protein [Poncirus trifoliata]
  misc_feature (1)..(240): Homolog of NCBI NO: 18395988 NR Description: unknown protein; protein id: At3g01930.1 thaliana] >gi|6091732|gb|AAF03444.1|AC010797_20 unknown protein thaliana] >gi|6513938|gb|AAF14842.1|AC011664_24 unknown protein
  misc_feature (244)..(494): Homolog of NCBI NO: 18395988 NR Description: unknown protein; protein id: At3g01930.1 thaliana] >gi|6091732|gb|AAF03444.1|AC010797_20 unknown protein thaliana] >gi|6513938|gb|AAF14842.1|AC011664_24 unknown protein
  misc_feature (1)..(267): Homolog of NCBI NO: 15241312 NR Description: nodulin-like protein; protein id: At5g14120.1

SEQ ID NO: 78662 - DNA, 1485 bp, Arabidopsis thaliana
  misc_feature (1)..(1485): Ceres Seq. ID no. 12643756
  misc_feature: MA Experiment ID: 20000171 Result: Down-regulated in Transcription
  misc_feature: MA Experiment 20000171 PARAMETER Experiment Name: At_42deg_Heat_P Parameter: Age (day) Value: 14
  misc_feature: MA Experiment 20000171 PARAMETER Experiment Name: At_42deg_Heat_P Parameter: Organism Value: A. thaliana
  misc_feature: MA Experiment 20000171 PARAMETER Experiment Name: At_42deg_Heat_P Parameter: Plant Line Value: WS
  misc_feature: MA Experiment 20000171 PARAMETER Experiment Name: At_42deg_Heat_P Parameter: Temperature (deg C) Value: 42 vs. 22
  misc_feature: MA Experiment 20000171 PARAMETER Experiment Name: At_42deg_Heat_P Parameter: Timepoint (hr) Value: 1
  misc_feature: MA Experiment 20000171 PARAMETER Experiment Name: At_42deg_Heat_P Parameter: Tissue Value: Aerial
atgtctaagaaaggtcgtttgagtgatcttaaggaattgttgttggatatgaagaagaatggattggtgccaaatagggttacttataataatttagtgtatggttactgtaagttaggttcgttgaaagaagcatttcagattgtggagctgatgaagcaaactaatgtattaccggatctttgtacctataacattttgatcaatgggctttgcaatgcggggagtatgagggaaggtcttgaattaatggatgcgatgaagagtttgaagttacagcccgatgtggttacttacaatacattgattgatgggtgtttcgaattggggcttagtttggaggctaggaagttgatggagcaaatggaaaatgatggagtcaaagctaaccaagtgactcataatatctctcttaagtggctttgtaaggaagagaaaagggaagcggttactagaaaggttaaggaattggtggacatgcacgggttttctcctgatatagtaacttatcatactctgattaaagcgtatttgaaagtaggagatttgagtggtgcccttgagatgatgcgtgagatggggcaaaaagggattaagatgaatactattacccttaataccattcttgatgctctatgtaaggagaggaaacttgatgaggctcacaatttgctgaatagtgcgcacaaacgaggatttattgttgacgaggttacttatggcacattaatcatgggattcttcagggaagaaaaagtggagaaagctttggagatgtgggatgagatgaagaaggtaaagattactcctacagtgagcacgttcaactctttaattggaggtctctgtcaccatggaaaaactgagctagcaatggagaaattcgatgagcttgctgagagtggtttgcttcctgatgacagtactttcaattcaatcatcctcggatactgcaaagaaggacgagttgagaaagcattcgagttttataatgaatccatcaaacactctttcaagcctgataactatacatgcaacattctcctcaatggtctttgtaaggaaggtatgacagaaaaggctctcaatttcttcaacacgctaatagaggagagagaggttgatacagttacatacaacacgatgatctcggctttctgcaaggacaagaagttaaaagaagcatatgaccttctatcagaaatggaggagaaaggactagagcctgatcggtttacatacaacagttttatcagtttgcttatggaagatggtaagctgagtgaaacagatgaattgttaaagaaattttccggaaagtttggatcgatgaagcgggatttacaggtagagacagagaaaaatccagcaacaagtgaatcaaaggaggaacttaacactgaagctattgcttattcagatgtaatagatgaactttgtagtagaggaagattaaaggagcattctagatcttacactagttga

SEQ ID NO: 78663 - protein, 494 aa, Arabidopsis thaliana
  peptide (1)..(494): Ceres Seq. ID no. 12643757
  misc_feature (308)..(342): Pfam Name: PPR repeat Pfam Description: PPR repeat
  misc_feature (1)..(494): Homolog of NCBI NO: 15227316 NR Description: putative salt-inducible protein; protein id: supported by cDNA: gi_20465656 [Arabidopsis thaliana]
  misc_feature (6)..(436): Homolog of NCBI NO: 15221549 NR Description: PPR-repeat protein; protein id: At1g62670.1
  misc_feature (6)..(436): Homolog of NCBI NO: 6630464 NR Description: F23N19.4 [Arabidopsis thaliana]
  misc_feature (19)..(436): Homolog of NCBI NO: 11994279 NR Description: gb|AAD43616.1~gene_id:F16J14.3~strong similarity
  misc_feature (19)..(436): Homolog of NCBI NO: 15228763 NR Description: hypothetical protein; protein id: At3g22470.1
  misc_feature (19)..(436): Homolog of NCBI NO: 15221282 NR Description: hypothetical protein; protein id: At1g12300.1
  misc_feature (19)..(436): Homolog of NCBI NO: 25402719 NR Description: protein F5O11.4 [imported] - Arabidopsis thaliana
  misc_feature (19)..(487): Homolog of NCBI NO: 18391414 NR Description: expressed protein; protein id: At1g12620.1, by cDNA: gi_13605504 [Arabidopsis thaliana] At1g12620/T12C24_25 [Arabidopsis thaliana]
  misc_feature (19)..(436): Homolog of NCBI NO: 9502388 NR Description: T12C24.15 [Arabidopsis thaliana]
  misc_feature (6)..(436): Homolog of NCBI NO: 15221674 NR Description: unknown protein; protein id: At1g63080.1
MSKKGRLSDLKELLLDMKKNGLVPNRVTYNNLVYGYCKLGSLKEAFQIVELMKQTNVLPDLCTYNILINGLCNAGSMREGLELMDAMKSLKLQPDVVTYNTLIDGCFELGLSLEARKLMEQMENDGVKANQVTHNISLKWLCKEEKREAVTRKVKELVDMHGFSPDIVTYHTLIKAYLKVGDLSGALEMMREMGQKGIKMNTITLNTILDALCKERKLDEAHNLLNSAHKRGFIVDEVTYGTLIMGFFREEKVEKALEMWDEMKKVKITPTVSTFNSLIGGLCHHGKTELAMEKFDELAESGLLPDDSTFNSIILGYCKEGRVEKAFEFYNESIKHSFKPDNYTCNILLNGLCKEGMTEKALNFFNTLIEEREVDTVTYNTMISAFCKDKKLKEAYDLLSEMEEKGLEPDRFTYNSFISLLMEDGKLSETDELLKKFSGKFGSMKRDLQVETEKNPATSESKEELNTEAIAYSDVIDELCSRGRLKEHSRSYTS

SEQ ID NO: 78664 - protein, 478 aa, Arabidopsis thaliana
  peptide (1)..(478): Ceres Seq. ID no. 12643758
  misc_feature (292)..(326): Pfam Name: PPR repeat Pfam Description: PPR repeat
  misc_feature (1)..(478): Homolog of NCBI NO: 15227316 NR Description: putative salt-inducible protein; protein id: supported by cDNA: gi_20465656 [Arabidopsis thaliana]
  misc_feature (1)..(420): Homolog of NCBI NO: 15221549 NR Description: PPR-repeat protein; protein id: At1g62670.1
  misc_feature (1)..(420): Homolog of NCBI NO: 6630464 NR Description: F23N19.4 [Arabidopsis thaliana]
  misc_feature (3)..(420): Homolog of NCBI NO: 11994279 NR Description: gb|AAD43616.1~gene_id:F16J14.3~strong similarity
  misc_feature (3)..(420): Homolog of NCBI NO: 15228763 NR Description: hypothetical protein; protein id: At3g22470.1
  misc_feature (3)..(420): Homolog of NCBI NO: 15221282 NR Description: hypothetical protein; protein id: At1g12300.1
  misc_feature (3)..(420): Homolog of NCBI NO: 25402719 NR Description: protein F5O11.4 [imported] - Arabidopsis thaliana
  misc_feature (3)..(471): Homolog of NCBI NO: 18391414 NR Description: expressed protein; protein id: At1g12620.1, by cDNA: gi_13605504 [Arabidopsis thaliana] At1g12620/T12C24_25 [Arabidopsis thaliana]
  misc_feature (3)..(420): Homolog of NCBI NO: 9502388 NR Description: T12C24.15 [Arabidopsis thaliana]
  misc_feature (1)..(420): Homolog of NCBI NO: 15221674 NR Description: unknown protein; protein id: At1g63080.1
MKKNGLVPNRVTYNNLVYGYCKLGSLKEAFQIVELMKQTNVLPDLCTYNILINGLCNAGSMREGLELMDAMKSLKLQPDVVTYNTLIDGCFELGLSLEARKLMEQMENDGVKANQVTHNISLKWLCKEEKREAVTRKVKELVDMHGFSPDIVTYHTLIKAYLKVGDLSGALEMMREMGQKGIKMNTITLNTILDALCKERKLDEAHNLLNSAHKRGFIVDEVTYGTLIMGFFREEKVEKALEMWDEMKKVKITPTVSTFNSLIGGLCHHGKTELAMEKFDELAESGLLPDDSTFNSIILGYCKEGRVEKAFEFYNESIKHSFKPDNYTCNILLNGLCKEGMTEKALNFFNTLIEEREVDTVTYNTMISAFCKDKKLKEAYDLLSEMEEKGLEPDRFTYNSFISLLMEDGKLSETDELLKKFSGKFGSMKRDLQVETEKNPATSESKEELNTEAIAYSDVIDELCSRGRLKEHSRSYTS

SEQ ID NO: 78665 - protein, 443 aa, Arabidopsis thaliana
  peptide (1)..(443): Ceres Seq. ID no. 12643759
  misc_feature (257)..(291): Pfam Name: PPR repeat Pfam Description: PPR repeat
  misc_feature (1)..(443): Homolog of NCBI NO: 15227316 NR Description: putative salt-inducible protein; protein id: supported by cDNA: gi_20465656 [Arabidopsis thaliana]
  misc_feature (1)..(385): Homolog of NCBI NO: 15221549 NR Description: PPR-repeat protein; protein id: At1g62670.1
  misc_feature (1)..(385): Homolog of NCBI NO: 6630464 NR Description: F23N19.4 [Arabidopsis thaliana]
  misc_feature (1)..(385): Homolog of NCBI NO: 11994279 NR Description: gb|AAD43616.1~gene_id:F16J14.3~strong similarity
  misc_feature (1)..(385): Homolog of NCBI NO: 15228763 NR Description: hypothetical protein; protein id: At3g22470.1
  misc_feature (1)..(385): Homolog of NCBI NO: 15221282 NR Description: hypothetical protein; protein id: At1g12300.1
  misc_feature (1)..(385): Homolog of NCBI NO: 25402719 NR Description: protein F5O11.4 [imported] - Arabidopsis thaliana
  misc_feature (1)..(436): Homolog of NCBI NO: 18391414 NR Description: expressed protein; protein id: At1g12620.1, by cDNA: gi_13605504 [Arabidopsis thaliana] At1g12620/T12C24_25 [Arabidopsis thaliana]
  misc_feature (1)..(385): Homolog of NCBI NO: 9502388 NR Description: T12C24.15 [Arabidopsis thaliana]
  misc_feature (1)..(385): Homolog of NCBI NO: 15221674 NR Description: unknown protein; protein id: At1g63080.1
MKQTNVLPDLCTYNILINGLCNAGSMREGLELMDAMKSLKLQPDVVTYNTLIDGCFELGLSLEARKLMEQMENDGVKANQVTHNISLKWLCKEEKREAVTRKVKELVDMHGFSPDIVTYHTLIKAYLKVGDLSGALEMMREMGQKGIKMNTITLNTILDALCKERKLDEAHNLLNSAHKRGFIVDEVTYGTLIMGFFREEKVEKALEMWDEMKKVKITPTVSTFNSLIGGLCHHGKTELAMEKFDELAESGLLPDDSTFNSIILGYCKEGRVEKAFEFYNESIKHSFKPDNYTCNILLNGLCKEGMTEKALNFFNTLIEEREVDTVTYNTMISAFCKDKKLKEAYDLLSEMEEKGLEPDRFTYNSFISLLMEDGKLSETDELLKKFSGKFGSMKRDLQVETEKNPATSESKEELNTEAIAYSDVIDELCSRGRLKEHSRSYTS

SEQ ID NO: 78666 - DNA, 1637 bp, Arabidopsis thaliana
  misc_feature (1)..(1637): Ceres Seq. ID no. 12643764
  misc_feature: MA Experiment ID: 108434 Result: Down-regulated in Transcription
  misc_feature: MA Experiment 108434 PARAMETER Experiment Name: At_Root_Tips_cDNA_P Parameter: Tissue Value: Root Tips
  misc_feature: MA Experiment ID: 108474 Result: Down-regulated in Transcription
  misc_feature: MA Experiment 108474 PARAMETER Experiment Name: At_Drought_Flowers_cDNA_P Parameter: Timepoint (hr) Value: null
  misc_feature: MA Experiment 108474 PARAMETER Experiment Name: At_Drought_Flowers_cDNA_P Parameter: Treatment Value: Drought vs. No Drought
  misc_feature: MA Experiment ID: 108501 Result: Up-regulated in Transcription
  misc_feature: MA Experiment 108501 PARAMETER Experiment Name: At_ap2_floral_buds_cDNA_P Parameter: Plant Line Value: ap2 (Ler.)
  misc_feature: MA Experiment 108501 PARAMETER Experiment Name: At_ap2_floral_buds_cDNA_P Parameter: Tissue Value: Closed Flower
  misc_feature: MA Experiment ID: 108572 Result: Down-regulated in Transcription
  misc_feature: MA Experiment 108572 PARAMETER Experiment Name: At_Drought_cDNA_P Parameter: Timepoint (hr) Value: 1
  misc_feature: MA Experiment 108572 PARAMETER Experiment Name: At_Drought_cDNA_P Parameter: Tissue Value: Aerial
  misc_feature: MA Experiment 108572 PARAMETER Experiment Name: At_Drought_cDNA_P Parameter: Treatment Value: Drought vs. No Drought
  misc_feature: MA Experiment ID: 108573 Result: Down-regulated in Transcription
  misc_feature: MA Experiment 108573 PARAMETER Experiment Name: At_Drought_cDNA_P Parameter: Timepoint (hr) Value: 6
  misc_feature: MA Experiment 108573 PARAMETER Experiment Name: At_Drought_cDNA_P Parameter: Tissue Value: Aerial
  misc_feature: MA Experiment 108573 PARAMETER Experiment Name: At_Drought_cDNA_P Parameter: Treatment Value: Drought vs. No Drought
  misc_feature: MA Experiment ID: 108577 Result: Down-regulated in Transcription
  misc_feature: MA Experiment 108577 PARAMETER Experiment Name: At_42deg_Heat_cDNA_P Parameter: Temperature (deg C) Value: 42 vs. 22
  misc_feature: MA Experiment 108577 PARAMETER Experiment Name: At_42deg_Heat_cDNA_P Parameter: Timepoint (hr) Value: 6
  misc_feature: MA Experiment 108577 PARAMETER Experiment Name: At_42deg_Heat_cDNA_P Parameter: Tissue Value: Aerial
  misc_feature: MA Experiment ID: 108579 Result: Up-regulated in Transcription
  misc_feature: MA Experiment 108579 PARAMETER Experiment Name: At_4deg_Cold_cDNA_P Parameter: Temperature (deg C) Value: 4 vs. 22
  misc_feature: MA Experiment 108579 PARAMETER Experiment Name: At_4deg_Cold_cDNA_P Parameter: Timepoint (hr) Value: 6
  misc_feature: MA Experiment 108579 PARAMETER Experiment Name: At_4deg_Cold_cDNA_P Parameter: Tissue Value: Aerial
  misc_feature: MA Experiment ID: 108595 Result: Up-regulated in Transcription
  misc_feature: MA Experiment 108595 PARAMETER Experiment Name: At_Ler-pi_Ovule_cDNA_P Parameter: Plant Line Value: null
  misc_feature: MA Experiment ID: 20000173 Result: Down-regulated in Transcription
  misc_feature: MA Experiment 20000173 PARAMETER Experiment Name: At_42deg_Heat_P Parameter: Age (day) Value: 14
  misc_feature: MA Experiment 20000173 PARAMETER Experiment Name: At_42deg_Heat_P Parameter: Organism Value: A. thaliana
  misc_feature: MA Experiment 20000173 PARAMETER Experiment Name: At_42deg_Heat_P Parameter: Plant Line Value: WS
  misc_feature: MA Experiment 20000173 PARAMETER Experiment Name: At_42deg_Heat_P Parameter: Temperature (deg C) Value: 42 vs. 22
  misc_feature: MA Experiment 20000173 PARAMETER Experiment Name: At_42deg_Heat_P Parameter: Timepoint (hr) Value: 6
  misc_feature: MA Experiment 20000173 PARAMETER Experiment Name: At_42deg_Heat_P Parameter: Tissue Value: Aerial
  misc_feature: MA Experiment ID: 20000185 Result: Up-regulated in Transcription
  misc_feature: MA Experiment 20000185 PARAMETER Experiment Name: At_Roots__P Parameter: Age (day) Value: 7 vs. 21
  misc_feature: MA Experiment 20000185 PARAMETER Experiment Name: At_Roots__P Parameter: Organism Value: A. thaliana
  misc_feature: MA Experiment 20000185 PARAMETER Experiment Name: At_Roots__P Parameter: Tissue Value: Roots vs. Whole Plant
  misc_feature: MA Experiment ID: 20000213 Result: Up-regulated in Transcription
  misc_feature: MA Experiment 20000213 PARAMETER Experiment Name: At_4deg_Cold_P Parameter: Timepoint (hr) Value: 2
  misc_feature: MA Experiment ID: 20000227 Result: Down-regulated in Transcription
  misc_feature: MA Experiment 20000227 PARAMETER Experiment Name: At_Root-Tips-vs-Tops_P Parameter: Tissue Value: Root Tips vs. Root Tops
  misc_feature: MA Experiment ID: 20000234 Result: Up-regulated in Transcription
  misc_feature: MA Experiment 20000234 PARAMETER Experiment Name: At_Siliques_P Parameter: Age (day) Value: 21
  misc_feature: MA Experiment 20000234 PARAMETER Experiment Name: At_Siliques_P Parameter: Organism Value: A. thaliana
  misc_feature: MA Experiment 20000234 PARAMETER Experiment Name: At_Siliques_P Parameter: Plant Line Value: WS
  misc_feature: MA Experiment 20000234 PARAMETER Experiment Name: At_Siliques_P Parameter: Tissue Value: Less Than 5mm Siliques vs. Whole Plant
  misc_feature: MA Experiment ID: 20000264 Result: Up-regulated in Transcription
  misc_feature: MA Experiment 20000264 PARAMETER Experiment Name: At_Open_Flower_P Parameter: Age (day) Value: 21
  misc_feature: MA Experiment 20000264 PARAMETER Experiment Name: At_Open_Flower_P Parameter: Plant Line Value: WS
  misc_feature: MA Experiment 20000264 PARAMETER Experiment Name: At_Open_Flower_P Parameter: Tissue Value: Open Flower vs. Whole Plant
  misc_feature: MA Experiment ID: 20000265 Result: Up-regulated in Transcription
  misc_feature: MA Experiment 20000265 PARAMETER Experiment Name: At_Open_Flower_P Parameter: Age (day) Value: 21
  misc_feature: MA Experiment 20000265 PARAMETER Experiment Name: At_Open_Flower_P Parameter: Plant Line Value: WS
  misc_feature: MA Experiment 20000265 PARAMETER Experiment Name: At_Open_Flower_P Parameter: Tissue Value: Closed Flower vs. Whole Plant
  misc_feature: MA Experiment ID: 20000267 Result: Up-regulated in Transcription
  misc_feature: MA Experiment 20000267 PARAMETER Experiment Name: At_Drought_P Parameter: Age (day) Value: 7
  misc_feature: MA Experiment 20000267 PARAMETER Experiment Name: At_Drought_P Parameter: Organism Value: A. thaliana
  misc_feature: MA Experiment 20000267 PARAMETER Experiment Name: At_Drought_P Parameter: Plant Line Value: WS
  misc_feature: MA Experiment 20000267 PARAMETER Experiment Name: At_Drought_P Parameter: Timepoint (hr) Value: 6
  misc_feature: MA Experiment 20000267 PARAMETER Experiment Name: At_Drought_P Parameter: Tissue Value: Whole Plant
  misc_feature: MA Experiment 20000267 PARAMETER Experiment Name: At_Drought_P Parameter: Treatment Value: Drought vs. No Drought
  misc_feature: MA Experiment ID: 20000268 Result: Up-regulated in Transcription
  misc_feature: MA Experiment 20000268 PARAMETER Experiment Name: At_100mM_NaCl__P Parameter: Age (day) Value: 14
  misc_feature: MA Experiment 20000268 PARAMETER Experiment Name: At_100mM_NaCl__P Parameter: Organism Value: A. thaliana
  misc_feature: MA Experiment 20000268 PARAMETER Experiment Name: At_100mM_NaCl__P Parameter: Plant Line Value: WS
  misc_feature: MA Experiment 20000268 PARAMETER Experiment Name: At_100mM_NaCl__P Parameter: Timepoint (hr) Value: 6
  misc_feature: MA Experiment 20000268 PARAMETER Experiment Name: At_100mM_NaCl__P Parameter: Tissue Value: Whole Plant
  misc_feature: MA Experiment 20000268 PARAMETER Experiment Name: At_100mM_NaCl__P Parameter: Treatment Value: 100mM NaCl vs. No Treatment
  misc_feature: MA Experiment ID: 20000286 Result: Up-regulated in Transcription
  misc_feature: MA Experiment 20000286 PARAMETER Experiment Name: At_Open_Flower_P Parameter: Age (day) Value: 21
  misc_feature: MA Experiment 20000286 PARAMETER Experiment Name: At_Open_Flower_P Parameter: Plant Line Value: WS
  misc_feature: MA Experiment 20000286 PARAMETER Experiment Name: At_Open_Flower_P Parameter: Tissue Value: Half Open vs. Whole Plant
  misc_feature: MA Experiment ID: 20000436 Result: Up-regulated in Transcription
  misc_feature: MA Experiment 20000436 PARAMETER Experiment Name: At_Drought_P Parameter: Age (day) Value: 7
  misc_feature: MA Experiment 20000436 PARAMETER Experiment Name: At_Drought_P Parameter: Organism Value: A. thaliana
  misc_feature: MA Experiment 20000436 PARAMETER Experiment Name: At_Drought_P Parameter: Plant Line Value: WS
  misc_feature: MA Experiment 20000436 PARAMETER Experiment Name: At_Drought_P Parameter: Timepoint (hr) Value: 12
  misc_feature: MA Experiment 20000436 PARAMETER Experiment Name: At_Drought_P Parameter: Tissue Value: Whole Plant
  misc_feature: MA Experiment 20000436 PARAMETER Experiment Name: At_Drought_P Parameter: Treatment Value: Drought vs. No Drought
  misc_feature: MA Experiment ID: 20000437 Result: Up-regulated in Transcription
  misc_feature: MA Experiment 20000437 PARAMETER Experiment Name: At_Drought_P Parameter: Age (day) Value: 8
  misc_feature: MA Experiment 20000437 PARAMETER Experiment Name: At_Drought_P Parameter: Organism Value: A. thaliana
  misc_feature: MA Experiment 20000437 PARAMETER Experiment Name: At_Drought_P Parameter: Plant Line Value: WS
  misc_feature: MA Experiment 20000437 PARAMETER Experiment Name: At_Drought_P Parameter: Timepoint (hr) Value: 24
  misc_feature: MA Experiment 20000437 PARAMETER Experiment Name: At_Drought_P Parameter: Tissue Value: Whole Plant
  misc_feature: MA Experiment 20000437 PARAMETER Experiment Name: At_Drought_P Parameter: Treatment Value: Drought vs. No Drought
  misc_feature: MA Experiment ID: 20000439 Result: Up-regulated in Transcription
  misc_feature: MA Experiment 20000439 PARAMETER Experiment Name: At_Roots__P Parameter: Age (day) Value: 14 vs. 21
  misc_feature: MA Experiment 20000439 PARAMETER Experiment Name: At_Roots__P Parameter: Organism Value: A. thaliana
  misc_feature: MA Experiment 20000439 PARAMETER Experiment Name: At_Roots__P Parameter: Tissue Value: Roots vs. Whole Plant
  misc_feature: MA Experiment ID: 20000456 Result: Up-regulated in Transcription
  misc_feature: MA Experiment 20000456 PARAMETER Experiment Name: At_100uM_BA_P Parameter: Age (day) Value: 14
  misc_feature: MA Experiment 20000456 PARAMETER Experiment Name: At_100uM_BA_P Parameter: Organism Value: A. thaliana
  misc_feature: MA Experiment 20000456 PARAMETER Experiment Name: At_100uM_BA_P Parameter: Plant Line Value: WS
  misc_feature: MA Experiment 20000456 PARAMETER Experiment Name: At_100uM_BA_P Parameter: Timepoint (hr) Value: 6
  misc_feature: MA Experiment 20000456 PARAMETER Experiment Name: At_100uM_BA_P Parameter: Tissue Value: Aerial
  misc_feature: MA Experiment 20000456 PARAMETER Experiment Name: At_100uM_BA_P Parameter: Treatment Value: 100uM BA vs. No Treatment
  misc_feature: MA Experiment ID: 20000573 Result: Down-regulated in Transcription
  misc_feature: MA Experiment 20000573 PARAMETER Experiment Name: At_100uM_ABA_Mutants__P Parameter: Organism Value: A. thaliana
  misc_feature: MA Experiment 20000573 PARAMETER Experiment Name: At_100uM_ABA_Mutants__P Parameter: Plant Line Value: CS22 vs. Ler wt
  misc_feature: MA Experiment 20000573 PARAMETER Experiment Name: At_100uM_ABA_Mutants__P Parameter: Timepoint (hr) Value: N/A
  misc_feature: MA Experiment 20000573 PARAMETER Experiment Name: At_100uM_ABA_Mutants__P Parameter: Tissue Value: Whole Plant
  misc_feature: MA Experiment 20000573 PARAMETER Experiment Name: At_100uM_ABA_Mutants__P Parameter: Treatment Value: None
  misc_feature: MA Experiment ID: 20000709 Result: Down-regulated in Transcription
  misc_feature: MA Experiment 20000709 PARAMETER Experiment Name: At_15mM_NH4NO3_L-to-H_P Parameter: Age (hr) Value: 14
  misc_feature: MA Experiment 20000709 PARAMETER Experiment Name: At_15mM_NH4NO3_L-to-H_P Parameter: Organism Value: A. thaliana
  misc_feature: MA Experiment 20000709 PARAMETER Experiment Name: At_15mM_NH4NO3_L-to-H_P Parameter: Plant Line Value: WS
  misc_feature: MA Experiment 20000709 PARAMETER Experiment Name: At_15mM_NH4NO3_L-to-H_P Parameter: Timepoint (hr) Value: 4
  misc_feature: MA Experiment 20000709 PARAMETER Experiment Name: At_15mM_NH4NO3_L-to-H_P Parameter: Tissue Value: Aerial
  misc_feature: MA Experiment 20000709 PARAMETER Experiment Name: At_15mM_NH4NO3_L-to-H_P Parameter: Treatment Value: 15mM NH4NO3 vs. 30mM Mannitol
  misc_feature: MA Experiment ID: 20000794 Result: Up-regulated in Transcription
  misc_feature: MA Experiment 20000794 PARAMETER Experiment Name: At_Petals_P Parameter: Age (day) Value: 23-25 days
  misc_feature: MA Experiment 20000794 PARAMETER Experiment Name: At_Petals_P Parameter: Plant Line Value: WS
  misc_feature: MA Experiment 20000794 PARAMETER Experiment Name: At_Petals_P Parameter: Tissue Value: Petals vs. Whole plant
  misc_feature: MA Experiment ID: 20001247 Result: Down-regulated in Transcription
  misc_feature: MA Experiment 20001247 PARAMETER Experiment Name: At_Far-red-induction_P Parameter: Age (day) Value: 7
  misc_feature: MA Experiment 20001247 PARAMETER Experiment Name: At_Far-red-induction_P Parameter: Light Value: Far-red vs. White
  misc_feature: MA Experiment 20001247 PARAMETER Experiment Name: At_Far-red-induction_P Parameter: Organism Value: A. thaliana
  misc_feature: MA Experiment 20001247 PARAMETER Experiment Name: At_Far-red-induction_P Parameter: Plant Line Value: Columbia
  misc_feature: MA Experiment 20001247 PARAMETER Experiment Name: At_Far-red-induction_P Parameter: Timepoint (hr) Value: 1
  misc_feature: MA Experiment 20001247 PARAMETER Experiment Name: At_Far-red-induction_P Parameter: Tissue Value: Whole Plant
  misc_feature: MA Experiment ID: 20001248 Result: Down-regulated in Transcription
  misc_feature: MA Experiment 20001248 PARAMETER Experiment Name: At_Far-red-induction_P Parameter: Age (day) Value: 7
  misc_feature: MA Experiment 20001248 PARAMETER Experiment Name: At_Far-red-induction_P Parameter: Light Value: Far-red vs. White
  misc_feature: MA Experiment 20001248 PARAMETER Experiment Name: At_Far-red-induction_P Parameter: Organism Value: A. thaliana
  misc_feature: MA Experiment 20001248 PARAMETER Experiment Name: At_Far-red-induction_P Parameter: Plant Line Value: Columbia
  misc_feature: MA Experiment 20001248 PARAMETER Experiment Name: At_Far-red-induction_P Parameter: Timepoint (hr) Value: 4
  misc_feature: MA Experiment 20001248 PARAMETER Experiment Name: At_Far-red-induction_P Parameter: Tissue Value: Whole Plant
  misc_feature: MA Experiment ID: 20001504 Result: Up-regulated in Transcription
  misc_feature: MA Experiment 20001504 PARAMETER Experiment Name: At_Far-red-enriched_P Parameter: Age (day) Value: 10
  misc_feature: MA Experiment 20001504 PARAMETER Experiment Name: At_Far-red-enriched_P Parameter: Light Value: Far-red enriched vs. White
  misc_feature: MA Experiment 20001504 PARAMETER Experiment Name: At_Far-red-enriched_P Parameter: Organism Value: A. thaliana
  misc_feature: MA Experiment 20001504 PARAMETER Experiment Name: At_Far-red-enriched_P Parameter: Plant Line Value: Columbia
  misc_feature: MA Experiment 20001504 PARAMETER Experiment Name: At_Far-red-enriched_P Parameter: Timepoint (day) Value: 6
  misc_feature: MA Experiment 20001504 PARAMETER Experiment Name: At_Far-red-enriched_P Parameter: Tissue Value: Whole Plant
  misc_feature: MA Experiment ID: 20001557 Result: Up-regulated in Transcription
  misc_feature: MA Experiment 20001557 PARAMETER Experiment Name: At_Drought_Soil_Dry_P Parameter: Age (day) Value: 27
  misc_feature: MA Experiment 20001557 PARAMETER Experiment Name: At_Drought_Soil_Dry_P Parameter: Organism Value: A. thaliana
  misc_feature: MA Experiment 20001557 PARAMETER Experiment Name: At_Drought_Soil_Dry_P Parameter: Plant Line Value: WS
  misc_feature: MA Experiment 20001557 PARAMETER Experiment Name: At_Drought_Soil_Dry_P Parameter: Post Timepoint (hr) Value: 3
  misc_feature: MA Experiment 20001557 PARAMETER Experiment Name: At_Drought_Soil_Dry_P Parameter: Post-Treatment Value: Re-Water vs. No Drought
  misc_feature: MA Experiment 20001557 PARAMETER Experiment Name: At_Drought_Soil_Dry_P Parameter: Timepoint (day) Value: 13
  misc_feature: MA Experiment 20001557 PARAMETER Experiment Name: At_Drought_Soil_Dry_P Parameter: Treatment Value: Drought vs. No Drought
  misc_feature: MA Experiment ID: 20001771 Result: Up-regulated in Transcription
  misc_feature: MA Experiment 20001771 PARAMETER Experiment Name: At_Far-red-enriched-adult_P Parameter: Age (day) Value: 28
  misc_feature: MA Experiment 20001771 PARAMETER Experiment Name: At_Far-red-enriched-adult_P Parameter: Light Value: Far-red enriched vs. White
  misc_feature: MA Experiment 20001771 PARAMETER Experiment Name: At_Far-red-enriched-adult_P Parameter: Organism Value: A. thaliana
  misc_feature: MA Experiment 20001771 PARAMETER Experiment Name: At_Far-red-enriched-adult_P Parameter: Plant Line Value: Columbia
  misc_feature: MA Experiment 20001771 PARAMETER Experiment Name: At_Far-red-enriched-adult_P Parameter: Timepoint (hr) Value: 16
  misc_feature: MA Experiment 20001771 PARAMETER Experiment Name: At_Far-red-enriched-adult_P Parameter: Tissue Value: Aerial
aactaagaaacacccaagaaaacaaacaaactttttaaaaaatgtccgtttcaacacatcaccaccacgtggtcctcttccctttcatgtcaaaaggccacatcatccctctcctccaattcggtcgtctcctcctccgtcaccaccgcaaagaaccaaccatcaccgtcaccgttttcaccactcccaagaaccaacctttcatctcagacttcctctcggatacgccggagatcaaagtcatctctctccctttcccggaaaacatcaccggaatccctcccggcgtcgagaacaccgaaaagctcccatccatgtcacttttcgtccccttcacacgcgccacgaagcttctccaacctttcttcgaagaaacactcaagactcttccaaaagtttcgttcatggtctctgatggattcctctggtggacatcggagtctgcagctaagttcaacattccaagatttgtctcctacggcatgaactcttactccgccgctgtctccatctctgttttcaaacacgaactctttaccgaaccggaaagtaaatctgataccgaaccggtcactgtaccagactttccatggatcaaggtcaagaagtgtgatttcgaccatggcactaccgagccggaagaatcaggtgcagccctcgaactatctatggaccaaatcaagtcgaccaccacaagccatgggtttttagtcaatagcttctacgagctcgagtcagcatttgttgattacaacaacaactctggtgataaaccaaagtcgtggtgtgttgggccactgtgtttgacagatcctcctaaacaggggagtgctaaaccggcttggattcattggttggatcagaagcgagaggaagggcgtccggttttgtacgtggcgtttggaacgcaggcagagatatcgaacaagcagcttatggaactagctttcggcttggaagattcaaaggtgaactttctgtgggtcacaagaaaagatgtggaggagattattggagaaggattcaacgatagaataagagagagtgggatgatagtgagagattgggtggaccaatgggagatattgtcacatgaaagtgtcaaaggatttttgagccattgtgggtggaactcagcacaagagagcatatgtgtcggggtcccattgttggcttggccgatgatggccgagcaaccgctcaatgcgaagatggttgtggaggagataaaggtgggagtaagagttgaaacggaagatgggagtgtaaaaggttttgtgacaagagaagaactaagtggaaagattaaagaactgatggaaggagaaacggggaaaaccgcaagaaagaatgtaaaagaatattcgaaaatggcgaaagcggctttggtcgaagggactggttcgtcatggaagaatttagatatgattcttaaggagttatgtaagagtagagattcaaacggtgctagtgagtagagtgattaagaattgaataactgaaccagtctatacgtttactaattaaaacaagtattttcaatatacgtcttgtgtaagtcttggtttagttgaaaagatgttatcgattacaataactgactctctcatttgataatactgactatgattaatatt

SEQ ID NO: 78667 - protein, 478 aa, Arabidopsis thaliana
  peptide (1)..(478): Ceres Seq. ID no. 12643765
  misc_feature (1)..(478): Homolog of NCBI NO: 30679796 NR Description: glycosyltransferase family [Arabidopsis thaliana]
  misc_feature (1)..(478): Homolog of NCBI NO: 21553613 NR Description: putative glucosyltransferase [Arabidopsis
  misc_feature (1)..(478): Homolog of NCBI NO: 15241515 NR Description: glucosyltransferase -like protein; protein id:
  misc_feature (1)..(310): Homolog of NCBI NO: 30679790 NR Description: glycosyltransferase family [Arabidopsis thaliana] putative glucosyltransferase [Arabidopsis thaliana]
  misc_feature (9)..(470): Homolog of NCBI NO: 4914344 NR Description: F14N23.30 [Arabidopsis thaliana]
  misc_feature (105)..(470): Homolog of NCBI NO: 30681693 NR Description: glycosyltransferase family [Arabidopsis thaliana]
  misc_feature (105)..(470): Homolog of NCBI NO: 26449653 NR Description: putative glucosyl transferase [Arabidopsis
  misc_feature (9)..(467): Homolog of NCBI NO: 15228034 NR Description: putative glucosyl transferase; protein id: supported by cDNA: gi_15028388, supported by cDNA: gi_19310660
  misc_feature (9)..(474): Homolog of NCBI NO: 15228037 NR Description: putative glucosyl transferase; protein id: supported by cDNA: gi_17065333 [Arabidopsis thaliana]
  misc_feature (9)..(474): Homolog of NCBI NO: 26450153 NR Description: putative glucosyl transferase [Arabidopsis
MSVSTHHHHVVLFPFMSKGHIIPLLQFGRLLLRHHRKEPTITVTVFTTPKNQPFISDFLSDTPEIKVISLPFPENITGIPPGVENTEKLPSMSLFVPFTRATKLLQPFFEETLKTLPKVSFMVSDGFLWWTSESAAKFNIPRFVSYGMNSYSAAVSISVFKHELFTEPESKSDTEPVTVPDFPWIKVKKCDFDHGTTEPEESGAALELSMDQIKSTTTSHGFLVNSFYELESAFVDYNNNSGDKPKSWCVGPLCLTDPPKQGSAKPAWIHWLDQKREEGRPVLYVAFGTQAEISNKQLMELAFGLEDSKVNFLWVTRKDVEEIIGEGFNDRIRESGMIVRDWVDQWEILSHESVKGFLSHCGWNSAQESICVGVPLLAWPMMAEQPLNAKMVVEEIKVGVRVETEDGSVKGFVTREELSGKIKELMEGETGKTARKNVKEYSKMAKAALVEGTGSSWKNLDMILKELCKSRDSNGASE

SEQ ID NO: 78668 - protein, 463 aa, Arabidopsis thaliana
  peptide (1)..(463): Ceres Seq. ID no. 12643766
  misc_feature (1)..(463): Homolog of NCBI NO: 30679796 NR Description: glycosyltransferase family [Arabidopsis thaliana]
  misc_feature (1)..(463): Homolog of NCBI NO: 21553613 NR Description: putative glucosyltransferase [Arabidopsis
  misc_feature (1)..(463): Homolog of NCBI NO: 15241515 NR Description: glucosyltransferase -like protein; protein id:
  misc_feature (1)..(295): Homolog of NCBI NO: 30679790 NR Description: glycosyltransferase family [Arabidopsis thaliana] putative glucosyltransferase [Arabidopsis thaliana]
  misc_feature (1)..(455): Homolog of NCBI NO: 4914344 NR Description: F14N23.30 [Arabidopsis thaliana]
  misc_feature (90)..(455): Homolog of NCBI NO: 30681693 NR Description: glycosyltransferase family [Arabidopsis thaliana]
  misc_feature (90)..(455): Homolog of NCBI NO: 26449653 NR Description: putative glucosyl transferase [Arabidopsis
  misc_feature (1)..(452): Homolog of NCBI NO: 15228034 NR Description: putative glucosyl transferase; protein id: supported by cDNA: gi_15028388, supported by cDNA: gi_19310660
  misc_feature (1)..(459): Homolog of NCBI NO: 15228037 NR Description: putative glucosyl transferase; protein id: supported by cDNA: gi_17065333 [Arabidopsis thaliana]
  misc_feature (1)..(459): Homolog of NCBI NO: 26450153 NR Description: putative glucosyl transferase [Arabidopsis
MSKGHIIPLLQFGRLLLRHHRKEPTITVTVFTTPKNQPFISDFLSDTPEIKVISLPFPENITGIPPGVENTEKLPSMSLFVPFTRATKLLQPFFEETLKTLPKVSFMVSDGFLWWTSESAAKFNIPRFVSYGMNSYSAAVSISVFKHELFTEPESKSDTEPVTVPDFPWIKVKKCDFDHGTTEPEESGAALELSMDQIKSTTTSHGFLVNSFYELESAFVDYNNNSGDKPKSWCVGPLCLTDPPKQGSAKPAWIHWLDQKREEGRPVLYVAFGTQAEISNKQLMELAFGLEDSKVNFLWVTRKDVEEIIGEGFNDRIRESGMIVRDWVDQWEILSHESVKGFLSHCGWNSAQESICVGVPLLAWPMMAEQPLNAKMVVEEIKVGVRVETEDGSVKGFVTREELSGKIKELMEGETGKTARKNVKEYSKMAKAALVEGTGSSWKNLDMILKELCKSRDSNGASE

SEQ ID NO: 78669 - protein, 387 aa, Arabidopsis thaliana
  peptide (1)..(387): Ceres Seq. ID no. 12643767
  misc_feature (1)..(387): Homolog of NCBI NO: 30679796 NR Description: glycosyltransferase family [Arabidopsis thaliana]
  misc_feature (1)..(387): Homolog of NCBI NO: 21553613 NR Description: putative glucosyltransferase [Arabidopsis
  misc_feature (1)..(387): Homolog of NCBI NO: 15241515 NR Description: glucosyltransferase -like protein; protein id:
  misc_feature (1)..(219): Homolog of NCBI NO: 30679790 NR Description: glycosyltransferase family [Arabidopsis thaliana] putative glucosyltransferase [Arabidopsis thaliana]
  misc_feature (1)..(379): Homolog of NCBI NO: 4914344 NR Description: F14N23.30 [Arabidopsis thaliana]
  misc_feature (14)..(379): Homolog of NCBI NO: 30681693 NR Description: glycosyltransferase family [Arabidopsis thaliana]
  misc_feature (14)..(379): Homolog of NCBI NO: 26449653 NR Description: putative glucosyl transferase [Arabidopsis
  misc_feature (1)..(376): Homolog of NCBI NO: 15228034 NR Description: putative glucosyl transferase; protein id: supported by cDNA: gi_15028388, supported by cDNA: gi_19310660
  misc_feature (1)..(383): Homolog of NCBI NO: 15228037 NR Description: putative glucosyl transferase; protein id: supported by cDNA: gi_17065333 [Arabidopsis thaliana]
  misc_feature (1)..(383): Homolog of NCBI NO: 26450153 NR Description: putative glucosyl transferase [Arabidopsis
MSLFVPFTRATKLLQPFFEETLKTLPKVSFMVSDGFLWWTSESAAKFNIPRFVSYGMNSYSAAVSISVFKHELFTEPESKSDTEPVTVPDFPWIKVKKCDFDHGTTEPEESGAALELSMDQIKSTTTSHGFLVNSFYELESAFVDYNNNSGDKPKSWCVGPLCLTDPPKQGSAKPAWIHWLDQKREEGRPVLYVAFGTQAEISNKQLMELAFGLEDSKVNFLWVTRKDVEEIIGEGFNDRIRESGMIVRDWVDQWEILSHESVKGFLSHCGWNSAQESICVGVPLLAWPMMAEQPLNAKMVVEEIKVGVRVETEDGSVKGFVTREELSGKIKELMEGETGKTARKNVKEYSKMAKAALVEGTGSSWKNLDMILKELCKSRDSNGASE

SEQ ID NO: 78670 - DNA, 1245 bp, Arabidopsis thaliana
  misc_feature (1)..(1245): Ceres Seq. ID no. 12643797
  misc_feature: MA Experiment ID: 108469 Result: Up-regulated in Transcription
  misc_feature: MA Experiment ID: 108573 Result: Up-regulated in Transcription
  misc_feature: MA Experiment 108573 PARAMETER Experiment Name: At_Drought_cDNA_P Parameter: Timepoint (hr) Value: 6
  misc_feature: MA Experiment 108573 PARAMETER Experiment Name: At_Drought_cDNA_P Parameter: Tissue Value: Aerial
  misc_feature: MA Experiment 108573 PARAMETER Experiment Name: At_Drought_cDNA_P Parameter: Treatment Value: Drought vs. No Drought
  misc_feature: MA Experiment ID: 108585 Result: Up-regulated in Transcription
  misc_feature: MA Experiment 108585 PARAMETER Experiment Name: At_5mM_NaNP_cDNA_P Parameter: Timepoint (hr) Value: 6
  misc_feature: MA Experiment 108585 PARAMETER Experiment Name: At_5mM_NaNP_cDNA_P Parameter: Tissue Value: Aerial
  misc_feature: MA Experiment 108585 PARAMETER Experiment Name: At_5mM_NaNP_cDNA_P Parameter: Treatment Value: null
  misc_feature: MA Experiment ID: 108605 Result: Up-regulated in Transcription
  misc_feature: MA Experiment 108605 PARAMETER Experiment Name: At_100uM_ABA_cDNA_P Parameter: Timepoint (hr) Value: 6
  misc_feature: MA Experiment 108605 PARAMETER Experiment Name: At_100uM_ABA_cDNA_P Parameter: Tissue Value: Aerial
  misc_feature: MA Experiment 108605 PARAMETER Experiment Name: At_100uM_ABA_cDNA_P Parameter: Treatment Value: 100uM ABA vs. No Treatment
  misc_feature: MA Experiment ID: 108607 Result: Up-regulated in Transcription
  misc_feature: MA Experiment 108607 PARAMETER Experiment Name: At_100uM_ABA_cDNA_P Parameter: Timepoint (hr) Value: 4
  misc_feature: MA Experiment 108607 PARAMETER Experiment Name: At_100uM_ABA_cDNA_P Parameter: Tissue Value: Aerial
  misc_feature: MA Experiment 108607 PARAMETER Experiment Name: At_100uM_ABA_cDNA_P Parameter: Treatment Value: 100uM ABA vs. No Treatment
  misc_feature: MA Experiment ID: 108668 Result: Up-regulated in Transcription
  misc_feature: MA Experiment 108668 PARAMETER Experiment Name: At_2mM_SA_cDNA_P Parameter: Plant Line Value: WS
  misc_feature: MA Experiment 108668 PARAMETER Experiment Name: At_2mM_SA_cDNA_P Parameter: Timepoint (hr) Value: 6
  misc_feature: MA Experiment 108668 PARAMETER Experiment Name: At_2mM_SA_cDNA_P Parameter: Treatment Value: 2mM SA vs. No Treatment
  misc_feature: MA Experiment ID: 20000069 Result: Up-regulated in Transcription
  misc_feature: MA Experiment 20000069 PARAMETER Experiment Name: At_100uM_ABA_Mutants_cDNA_P Parameter: Plant Line Value: CS23
  misc_feature: MA Experiment 20000069 PARAMETER Experiment Name: At_100uM_ABA_Mutants_cDNA_P Parameter: Timepoint (hr) Value: 6
  misc_feature: MA Experiment 20000069 PARAMETER Experiment Name: At_100uM_ABA_Mutants_cDNA_P Parameter: Tissue Value: Aerial
  misc_feature: MA Experiment 20000069 PARAMETER Experiment Name: At_100uM_ABA_Mutants_cDNA_P Parameter: Treatment Value: 100uM ABA vs. No Treatment
  misc_feature: MA Experiment ID: 20000070 Result: Up-regulated in Transcription
  misc_feature: MA Experiment 20000070 PARAMETER Experiment Name: At_100uM_ABA_Mutants_cDNA_P Parameter: Plant Line Value: CS24
  misc_feature: MA Experiment 20000070 PARAMETER Experiment Name: At_100uM_ABA_Mutants_cDNA_P Parameter: Timepoint (hr) Value: 6
  misc_feature: MA Experiment 20000070 PARAMETER Experiment Name: At_100uM_ABA_Mutants_cDNA_P Parameter: Tissue Value: Aerial
  misc_feature: MA Experiment 20000070 PARAMETER Experiment Name: At_100uM_ABA_Mutants_cDNA_P Parameter: Treatment Value: 100uM ABA vs. No Treatment
  misc_feature: MA Experiment ID: 20000072 Result: Up-regulated in Transcription
  misc_feature: MA Experiment 20000072 PARAMETER Experiment Name: At_100uM_ABA_Mutants_cDNA_P Parameter: Plant Line Value: CS8105
  misc_feature: MA Experiment 20000072 PARAMETER Experiment Name: At_100uM_ABA_Mutants_cDNA_P Parameter: Timepoint (hr) Value: 6
  misc_feature: MA Experiment 20000072 PARAMETER Experiment Name: At_100uM_ABA_Mutants_cDNA_P Parameter: Tissue Value: Aerial
  misc_feature: MA Experiment 20000072 PARAMETER Experiment Name: At_100uM_ABA_Mutants_cDNA_P Parameter: Treatment Value: 100uM ABA vs. No Treatment
  misc_feature: MA Experiment ID: 20000086 Result: Up-regulated in Transcription
  misc_feature: MA Experiment 20000086 PARAMETER Experiment Name: At_100uM_ABA_Mutants_cDNA_P Parameter: Plant Line Value: CS22
  misc_feature: MA Experiment 20000086 PARAMETER Experiment Name: At_100uM_ABA_Mutants_cDNA_P Parameter: Timepoint (hr) Value: 6
  misc_feature: MA Experiment 20000086 PARAMETER Experiment Name: At_100uM_ABA_Mutants_cDNA_P Parameter: Tissue Value: Aerial
  misc_feature: MA Experiment 20000086 PARAMETER Experiment Name: At_100uM_ABA_Mutants_cDNA_P Parameter: Treatment Value: 100uM ABA vs. No Treatment
  misc_feature: MA Experiment ID: 20000087 Result: Up-regulated in Transcription
  misc_feature: MA Experiment 20000087 PARAMETER Experiment Name: At_100uM_ABA_Mutants_cDNA_P Parameter: Plant Line Value: WS
  misc_feature: MA Experiment 20000087 PARAMETER Experiment Name: At_100uM_ABA_Mutants_cDNA_P Parameter: Timepoint (hr) Value: 6
  misc_feature: MA Experiment 20000087 PARAMETER Experiment Name: At_100uM_ABA_Mutants_cDNA_P Parameter: Tissue Value: Aerial
  misc_feature: MA Experiment 20000087 PARAMETER Experiment Name: At_100uM_ABA_Mutants_cDNA_P Parameter: Treatment Value: 100uM ABA vs. No Treatment
  misc_feature: MA Experiment ID: 20000088 Result: Up-regulated in Transcription
  misc_feature: MA Experiment 20000088 PARAMETER Experiment Name: At_100uM_ABA_Mutants_cDNA_P Parameter: Plant Line Value: Landsberg
  misc_feature: MA Experiment 20000088 PARAMETER Experiment Name: At_100uM_ABA_Mutants_cDNA_P Parameter: Timepoint (hr) Value: 6
  misc_feature: MA Experiment 20000088 PARAMETER Experiment Name: At_100uM_ABA_Mutants_cDNA_P Parameter: Tissue Value: Aerial
  misc_feature: MA Experiment 20000088 PARAMETER Experiment Name: At_100uM_ABA_Mutants_cDNA_P Parameter: Treatment Value: 100uM ABA vs. No Treatment
  misc_feature: MA Experiment ID: 20000090 Result: Up-regulated in Transcription
atggcaacacttcaatcaaggaacagaacacaatgtgaaaccagactgttctcatttattttccagcaagtcaaaaagtcaaactcaaaaagtcctctctcggtcaactttcttcttggtccccatcttcacaaatcacaactctttttatttccaaagaccaaaaacctgagaacacaccggcgacctgaaaatggaaacttcctgttttacccttctcggtctccttgtctccctctccttcttcctcactctctccgcccaaatgaccggaaacttcaactgcagtggctcaacctcgacgtgtcaatctctcgttggttactcaacaagaacgcaacaacgttgcgcaatatccaaaccctttttgccgtcaagaacctccgctcgatcctcggagctaacaatctcccactcaacacctcacgtgaccaacgcgtgaacccgaatcaagtcgtacgtgtcccaatccattgctcttgctccaatggaaccggtgtctcgaaccgggacatcgaatacaccatcaagaaagacgacatactctctttcgtcgcaactgagattttcggtggtctcgttacgtacgagaagatcagtgaggttaacaaaatccctgacccgaacaaaatcgaaatcggtcaaaagttttggatccctttgccttgtagctgtgataaattgaacggtgaggatgttgttcactacgcacatgtagtcaaactagggagctctctcggtgagatcgctgctcagtttggaacggacaacacgacgttggctcagctcaatggaatcattggtgactctcagcttcttgctgataaacctctcgacgtccctctcaaagcttgtagctcttctgtgaggaaggactcgttggatgctcctctgcttctgtctaacaactcatacgtcttcactgcaaacaattgcgtcaagtgtacttgtgacgctttgaagaattggactttaagctgtcaatcatcatctgagattaagccttcgaactggcaaacctgcccaccattttcacaatgtgatggagctttgcttaacgcctcttgcagacaacctcgtgattgcgtctatgctggttactccaaccaaaccatcttcaccacagcttccccagcttgtccagattctgctggtcctgataactatgcatcaacgctcagctcaagcttcaatttcgtgattgtgttgattcagtgtgctctgctttgtctctgccttctctag

SEQ ID NO: 78671 - protein, 414 aa, Arabidopsis thaliana
  peptide (1)..(414): Ceres Seq. ID no. 12643798
  misc_feature (174)..(220): Pfam Name: LysM domain Pfam Description: LysM domain
  misc_feature (110)..(414): Homolog of NCBI NO: 18398317 NR Description: expressed protein; protein id: At2g17120.1, by cDNA: 6280., supported by cDNA: gi_15810364, supported by
  misc_feature (110)..(414): Homolog of NCBI NO: 21593990 NR Description: unknown [Arabidopsis thaliana]
  misc_feature (112)..(410): Homolog of NCBI NO: 28207683 NR Description: Erwinia induced protein 1 [Solanum tuberosum]
  misc_feature (112)..(408): Homolog of NCBI NO: 22758281 NR Description: Unknown protein [Oryza sativa (japonica
  misc_feature (119)..(394): Homolog of NCBI NO: 18395044 NR Description: expressed protein; protein id: At1g21880.1, by cDNA: gi_15982869 [Arabidopsis thaliana]
  misc_feature (119)..(374): Homolog of NCBI NO: 30687570 NR Description: expressed protein [Arabidopsis thaliana]
  misc_feature (119)..(398): Homolog of NCBI NO: 30699276 NR Description: expressed protein [Arabidopsis thaliana]
  misc_feature (119)..(398): Homolog of NCBI NO: 25406518 NR Description: unknown protein T5M16.22 [imported] - Arabidopsis
MATLQSRNRTQCETRLFSFIFQQVKKSNSKSPLSVNFLLGPHLHKSQLFLFPKTKNLRTHRRPENGNFLFYPSRSPCLPLLLPHSLRPNDRKLQLQWLNLDVSISRWLLNKNATTLRNIQTLFAVKNLRSILGANNLPLNTSRDQRVNPNQVVRVPIHCSCSNGTGVSNRDIEYTIKKDDILSFVATEIFGGLVTYEKISEVNKIPDPNKIEIGQKFWIPLPCSCDKLNGEDVVHYAHVVKLGSSLGEIAAQFGTDNTTLAQLNGIIGDSQLLADKPLDVPLKACSSSVRKDSLDAPLLLSNNSYVFTANNCVKCTCDALKNWTLSCQSSSEIKPSNWQTCPPFSQCDGALLNASCRQPRDCVYAGYSNQTIFTTASPACPDSAGPDNYASTLSSSFNFVIVLIQCALLCLCLL

SEQ ID NO: 78672 - DNA, 2589 bp, Arabidopsis thaliana
  misc_feature (1)..(2589): Ceres Seq. ID no. 12643803
  misc_feature: MA Experiment ID: 20000307 Result: Down-regulated in Transcription
  misc_feature: MA Experiment 20000307 PARAMETER Experiment Name: At_Germinating_Seeds_Sub_P Parameter: Age (hr) Value: 24 vs. 0
  misc_feature: MA Experiment 20000307 PARAMETER Experiment Name: At_Germinating_Seeds_Sub_P Parameter: Organism Value: A. thaliana
  misc_feature: MA Experiment 20000307 PARAMETER Experiment Name: At_Germinating_Seeds_Sub_P Parameter: Plant Line Value: WS
  misc_feature: MA Experiment 20000307 PARAMETER Experiment Name: At_Germinating_Seeds_Sub_P Parameter: Tissue Value: Germinating Seeds
  misc_feature: MA Experiment ID: 20000314 Result: Up-regulated in Transcription
  misc_feature: MA Experiment 20000314 PARAMETER Experiment Name: At_14day_Shoots-Roots_Sub_P Parameter: Age (day) Value: 14
  misc_feature: MA Experiment 20000314 PARAMETER Experiment Name: At_14day_Shoots-Roots_Sub_P Parameter: Organism Value: A. thaliana
  misc_feature: MA Experiment 20000314 PARAMETER Experiment Name: At_14day_Shoots-Roots_Sub_P Parameter: Plant Line Value: WS
  misc_feature: MA Experiment 20000314 PARAMETER Experiment Name: At_14day_Shoots-Roots_Sub_P Parameter: Tissue Value: Roots vs. Whole Plant
atggaagatgatggtggtagtgatggaggcgaaggaaatggtgggttttcacctaattctagctttggggcattcgctgacactgccatggatttggatttcatggatgaactcttgtttgatggatgttggctagagacaacagatagtaagagcttgaagcagacagaacaatctccttcagcttctaccgccatgaatgacaatagccctttcctctgctttggtgagaatccatctcaagataatttctctaatgaagaaacagagagaatgtttcctcaggctgaaaagtttctcctagaagaagctgaggtgggaaaaagttggtggattgctccaagtgcaagtgaaggcccgtcttcatctgtgaaggagaggctactacaagctattagtggtcttaacgaggcggtgcaagataaggacttcttggttcagatatgggtgccaattcagcaggaagggaagagctttcttactacttgggctcagccacatttattcaaccaagaatactccagccttgcagaatacagacatgtttcagagacttataatttcccggctgatgagggtatgaaagattttgtgggtcttcccggtcgtgttttcttgcagaagtttcctgagtggactcctgatgtgcgtttctttagaagagatgaatatccacgcatcaaagaagcacaaaagtgtgatgttcgtggttcacttgcccttcctgttttcgaaagaggtagtgggacttgtttgggtgttgttgagatcgtcacaacaactcagaagatgaattaccggcaagaacttgagaagatgtgtaaagctcttgagtttctgcaggtctatagtgatttctactgtgctgcattacctgaaataaaagatttcctggccacaatctgcagatcatatgattttcctctagctttgtcatgggcgccgtgtgctcggcaagggaaagttggttcccgacattctgatgagaacttctctgagtgtgtttcaacaatcgattctgcttgttctgtccccgacgaacagagcaaaagtttttgggaggcatgctctgaacaccatctgctccagggggaaggcattgttgggaaagcatttgaagccaccaaactcttttttgtgcccgaagtggccacatttagcaagactaactacccccttgcacaccacgccaagatatctggactacatgctgctttagcagttccattaaagagcaaatctggtttggttgagtttgtgttggaatttttctttccgaaagcatgccttgacactgaagcgcaacaggaaatgctcaagtcactatgtgtgacactgcagcaagatttcaggaaaaccgtagagtcgttgacagaaattcaaatgcaagaatcctcatggatcgcccacatgataaaggcaaacgagaagggtaaagatgtatcactttcttgggagtaccagaaagaagatcctaaagagctctcatctggccgggagaacagtcagcttgatccagtccccaataatgttcctttagaagctgagcaattacagcaagcatcaactccaggactcagagtcgacatcggtccaagcacagaatcagcttcgactggtgggggaaatatgttaagcagtaggagaccaggggagaaaaaaagagcaaaaacagaaaagaccattggcttggaggttcttcgacaatactttgctggaagcctcaaggatgcagccaagagcattggtgtttgtccaactaccttgaaaaggatatgcaggcaacatggaataatgcgatggccctcccgaaaaatcaagaaggttgggcattcgttgaagaaactccaactagttatggactctgtccaaggtgcgcagggctctatccaactcgattcattctatacaagcttcccagagttgaactccccaaatatgtctagcaatggcccttccttgaagagtaatgaacagccaagtcatttgaatgctcaaaccgataatggtattatggcagaggaaaaccccaggtcaccatcatcttcttgcagcaagagctctggttcaagcaacaataatgagaatactggaaacattctagttgctgaggatgctgatgcggtgttaaagagagctcatagcgaagcacaactgcataatgtgaatcaggaggaaacaaaatgtcttgcaagaacccagagccataaaacattcaaggagcctcttgttcttgataattcatctccattaacaggtagtagcaacacgagtttaagagctagaggtgccatcaaagtgaaagcgacatttggtgaggccagaatacggtttaccttactcccgagttggggcttcgcagagctgaagcaagagattgctaggcgtttcaacatagatgacatttcctggtttgaccttaagtacctggatgatgataaggagtgggttcttctgacatgtgaagcggatctcgtggaatgcattgacatatatagattaacacagacccacacaattaaaataagtctgaacgaagcttctcaagtcaagctaagtggttcttttggcaacactggtctttcctga

SEQ ID NO: 78673 - protein, 862 aa, Arabidopsis thaliana
  peptide (1)..(862): Ceres Seq. ID no. 12643804
  misc_feature (764)..(847): Pfam Name: PB1 domain Pfam Description: PB1 domain
  misc_feature (477)..(854): Homolog of NCBI NO: 7486018 NR Description: hypothetical protein F23E12.170 - Arabidopsis >gi|3080423|emb|CAA18742.1| putative protein [Arabidopsis >gi|7270479|emb|CAB80244.1| putative protein [Arabidopsis
  misc_feature (95)..(284): Homolog of NCBI NO: 7486018 NR Description: hypothetical protein F23E12.170 - Arabidopsis >gi|3080423|emb|CAA18742.1| putative protein [Arabidopsis >gi|7270479|emb|CAB80244.1| putative protein [Arabidopsis
  misc_feature (297)..(451): Homolog of NCBI NO: 7486018 NR Description: hypothetical protein F23E12.170 - Arabidopsis >gi|3080423|emb|CAA18742.1| putative protein [Arabidopsis >gi|7270479|emb|CAB80244.1| putative protein [Arabidopsis
  misc_feature (4)..(94): Homolog of NCBI NO: 7486018 NR Description: hypothetical protein F23E12.170 - Arabidopsis >gi|3080423|emb|CAA18742.1| putative protein [Arabidopsis >gi|7270479|emb|CAB80244.1| putative protein [Arabidopsis
  misc_feature (582)..(861): Homolog of NCBI NO: 30690272 NR Description: RWP-RK domain containing protein [Arabidopsis
  misc_feature (95)..(284): Homolog of NCBI NO: 30690272 NR Description: RWP-RK domain containing protein [Arabidopsis
  misc_feature (297)..(451): Homolog of NCBI NO: 30690272 NR Description: RWP-RK domain containing protein [Arabidopsis
  misc_feature (4)..(94): Homolog of NCBI NO: 30690272 NR Description: RWP-RK domain containing protein [Arabidopsis
  misc_feature (457)..(691): Homolog of NCBI NO: 30690272 NR Description: RWP-RK domain containing protein [Arabidopsis
  misc_feature (457)..(691): Homolog of NCBI NO: 7486018 NR Description: hypothetical protein F23E12.170 - Arabidopsis >gi|3080423|emb|CAA18742.1| putative protein [Arabidopsis >gi|7270479|emb|CAB80244.1| putative protein [Arabidopsis
MEDDGGSDGGEGNGGFSPNSSFGAFADTAMDLDFMDELLFDGCWLETTDSKSLKQTEQSPSASTAMNDNSPFLCFGENPSQDNFSNEETERMFPQAEKFLLEEAEVGKSWWIAPSASEGPSSSVKERLLQAISGLNEAVQDKDFLVQIWVPIQQEGKSFLTTWAQPHLFNQEYSSLAEYRHVSETYNFPADEGMKDFVGLPGRVFLQKFPEWTPDVRFFRRDEYPRIKEAQKCDVRGSLALPVFERGSGTCLGVVEIVTTTQKMNYRQELEKMCKALEFLQVYSDFYCAALPEIKDFLATICRSYDFPLALSWAPCARQGKVGSRHSDENFSECVSTIDSACSVPDEQSKSFWEACSEHHLLQGEGIVGKAFEATKLFFVPEVATFSKTNYPLAHHAKISGLHAALAVPLKSKSGLVEFVLEFFFPKACLDTEAQQEMLKSLCVTLQQDFRKTVESLTEIQMQESSWIAHMIKANEKGKDVSLSWEYQKEDPKELSSGRENSQLDPVPNNVPLEAEQLQQASTPGLRVDIGPSTESASTGGGNMLSSRRPGEKKRAKTEKTIGLEVLRQYFAGSLKDAAKSIGVCPTTLKRICRQHGIMRWPSRKIKKVGHSLKKLQLVMDSVQGAQGSIQLDSFYTSFPELNSPNMSSNGPSLKSNEQPSHLNAQTDNGIMAEENPRSPSSSCSKSSGSSNNNENTGNILVAEDADAVLKRAHSEAQLHNVNQEETKCLARTQSHKTFKEPLVLDNSSPLTGSSNTSLRARGAIKVKATFGEARIRFTLLPSWGFAELKQEIARRFNIDDISWFDLKYLDDDKEWVLLTCEADLVECIDIYRLTQTHTIKISLNEASQVKLSGSFGNTGLS

SEQ ID NO: 78674 - protein, 833 aa, Arabidopsis thaliana
  peptide (1)..(833): Ceres Seq. ID no. 12643805
  misc_feature (735)..(818): Pfam Name: PB1 domain Pfam Description: PB1 domain
  misc_feature (448)..(825): Homolog of NCBI NO: 7486018 NR Description: hypothetical protein F23E12.170 - Arabidopsis >gi|3080423|emb|CAA18742.1| putative protein [Arabidopsis >gi|7270479|emb|CAB80244.1| putative protein [Arabidopsis
  misc_feature (66)..(255): Homolog of NCBI NO: 7486018 NR Description: hypothetical protein F23E12.170 - Arabidopsis >gi|3080423|emb|CAA18742.1| putative protein [Arabidopsis >gi|7270479|emb|CAB80244.1| putative protein [Arabidopsis
  misc_feature (268)..(422): Homolog of NCBI NO: 7486018 NR Description: hypothetical protein F23E12.170 - Arabidopsis >gi|3080423|emb|CAA18742.1| putative protein [Arabidopsis >gi|7270479|emb|CAB80244.1| putative protein [Arabidopsis
  misc_feature (1)..(65): Homolog of NCBI NO: 7486018 NR Description: hypothetical protein F23E12.170 - Arabidopsis >gi|3080423|emb|CAA18742.1| putative protein [Arabidopsis >gi|7270479|emb|CAB80244.1| putative protein [Arabidopsis
  misc_feature (553)..(832): Homolog of NCBI NO: 30690272 NR Description: RWP-RK domain containing protein [Arabidopsis
  misc_feature (66)..(255): Homolog of NCBI NO: 30690272 NR Description: RWP-RK domain containing protein [Arabidopsis
  misc_feature (268)..(422): Homolog of NCBI NO: 30690272 NR Description: RWP-RK domain containing protein [Arabidopsis
  misc_feature (1)..(65): Homolog of NCBI NO: 30690272 NR Description: RWP-RK domain containing protein [Arabidopsis
  misc_feature (428)..(662): Homolog of NCBI NO: 30690272 NR Description: RWP-RK domain containing protein [Arabidopsis
  misc_feature (428)..(662): Homolog of NCBI NO: 7486018 NR Description: hypothetical protein F23E12.170 - Arabidopsis >gi|3080423|emb|CAA18742.1| putative protein [Arabidopsis >gi|7270479|emb|CAB80244.1| putative protein [Arabidopsis
MDLDFMDELLFDGCWLETTDSKSLKQTEQSPSASTAMNDNSPFLCFGENPSQDNFSNEETERMFPQAEKFLLEEAEVGKSWWIAPSASEGPSSSVKERLLQAISGLNEAVQDKDFLVQIWVPIQQEGKSFLTTWAQPHLFNQEYSSLAEYRHVSETYNFPADEGMKDFVGLPGRVFLQKFPEWTPDVRFFRRDEYPRIKEAQKCDVRGSLALPVFERGSGTCLGVVEIVTTTQKMNYRQELEKMCKALEFLQVYSDFYCAALPEIKDFLATICRSYDFPLALSWAPCARQGKVGSRHSDENFSECVSTIDSACSVPDEQSKSFWEACSEHHLLQGEGIVGKAFEATKLFFVPEVATFSKTNYPLAHHAKISGLHAALAVPLKSKSGLVEFVLEFFFPKACLDTEAQQEMLKSLCVTLQQDFRKTVESLTEIQMQESSWIAHMIKANEKGKDVSLSWEYQKEDPKELSSGRENSQLDPVPNNVPLEAEQLQQASTPGLRVDIGPSTESASTGGGNMLSSRRPGEKKRAKTEKTIGLEVLRQYFAGSLKDAAKSIGVCPTTLKRICRQHGIMRWPSRKIKKVGHSLKKLQLVMDSVQGAQGSIQLDSFYTSFPELNSPNMSSNGPSLKSNEQPSHLNAQTDNGIMAEENPRSPSSSCSKSSGSSNNNENTGNILVAEDADAVLKRAHSEAQLHNVNQEETKCLARTQSHKTFKEPLVLDNSSPLTGSSNTSLRARGAIKVKATFGEARIRFTLLPSWGFAELKQEIARRFNIDDISWFDLKYLDDDKEWVLLTCEADLVECIDIYRLTQTHTIKISLNEASQVKLSGSFGNTGLS

SEQ ID NO: 78675 - protein, 828 aa, Arabidopsis thaliana
  peptide (1)..(828): Ceres Seq. ID no. 12643806
  misc_feature (730)..(813): Pfam Name: PB1 domain Pfam Description: PB1 domain
  misc_feature (443)..(820): Homolog of NCBI NO: 7486018 NR Description: hypothetical protein F23E12.170 - Arabidopsis >gi|3080423|emb|CAA18742.1| putative protein [Arabidopsis >gi|7270479|emb|CAB80244.1| putative protein [Arabidopsis
  misc_feature (61)..(250): Homolog of NCBI NO: 7486018 NR Description: hypothetical protein F23E12.170 - Arabidopsis >gi|3080423|emb|CAA18742.1| putative protein [Arabidopsis >gi|7270479|emb|CAB80244.1| putative protein [Arabidopsis
  misc_feature (263)..(417): Homolog of NCBI NO: 7486018 NR Description: hypothetical protein F23E12.170 - Arabidopsis >gi|3080423|emb|CAA18742.1| putative protein [Arabidopsis >gi|7270479|emb|CAB80244.1| putative protein [Arabidopsis
  misc_feature (1)..(60): Homolog of NCBI NO: 7486018 NR Description: hypothetical protein F23E12.170 - Arabidopsis >gi|3080423|emb|CAA18742.1| putative protein [Arabidopsis >gi|7270479|emb|CAB80244.1| putative protein [Arabidopsis
  misc_feature (548)..(827): Homolog of NCBI NO: 30690272 NR Description: RWP-RK domain containing protein [Arabidopsis
  misc_feature (61)..(250): Homolog of NCBI NO: 30690272 NR Description: RWP-RK domain containing protein [Arabidopsis
  misc_feature (263)..(417): Homolog of NCBI NO: 30690272 NR Description: RWP-RK domain containing protein [Arabidopsis
  misc_feature (1)..(60): Homolog of NCBI NO: 30690272 NR Description: RWP-RK domain containing protein [Arabidopsis
  misc_feature (423)..(657): Homolog of NCBI NO: 30690272 NR Description: RWP-RK domain containing protein [Arabidopsis
  misc_feature (423)..(657): Homolog of NCBI NO: 7486018 NR Description: hypothetical protein F23E12.170 - Arabidopsis >gi|3080423|emb|CAA18742.1| putative protein [Arabidopsis >gi|7270479|emb|CAB80244.1| putative protein [Arabidopsis
MDELLFDGCWLETTDSKSLKQTEQSPSASTAMNDNSPFLCFGENPSQDNFSNEETERMFPQAEKFLLEEAEVGKSWWIAPSASEGPSSSVKERLLQAISGLNEAVQDKDFLVQIWVPIQQEGKSFLTTWAQPHLFNQEYSSLAEYRHVSETYNFPADEGMKDFVGLPGRVFLQKFPEWTPDVRFFRRDEYPRIKEAQKCDVRGSLALPVFERGSGTCLGVVEIVTTTQKMNYRQELEKMCKALEFLQVYSDFYCAALPEIKDFLATICRSYDFPLALSWAPCARQGKVGSRHSDENFSECVSTIDSACSVPDEQSKSFWEACSEHHLLQGEGIVGKAFEATKLFFVPEVATFSKTNYPLAHHAKISGLHAALAVPLKSKSGLVEFVLEFFFPKACLDTEAQQEMLKSLCVTLQQDFRKTVESLTEIQMQESSWIAHMIKANEKGKDVSLSWEYQKEDPKELSSGRENSQLDPVPNNVPLEAEQLQQASTPGLRVDIGPSTESASTGGGNMLSSRRPGEKKRAKTEKTIGLEVLRQYFAGSLKDAAKSIGVCPTTLKRICRQHGIMRWPSRKIKKVGHSLKKLQLVMDSVQGAQGSIQLDSFYTSFPELNSPNMSSNGPSLKSNEQPSHLNAQTDNGIMAEENPRSPSSSCSKSSGSSNNNENTGNILVAEDADAVLKRAHSEAQLHNVNQEETKCLARTQSHKTFKEPLVLDNSSPLTGSSNTSLRARGAIKVKATFGEARIRFTLLPSWGFAELKQEIARRFNIDDISWFDLKYLDDDKEWVLLTCEADLVECIDIYRLTQTHTIKISLNEASQVKLSGSFGNTGLS

SEQ ID NO: 78676 - DNA, 3273 bp, Arabidopsis thaliana
  misc_feature (1)..(3273): Ceres Seq. ID no. 12643896
  misc_feature: MA Experiment ID: 20000180 Result: Up-regulated in Transcription
  misc_feature: MA Experiment 20000180 PARAMETER Experiment Name: At_Germinating_Seeds_P Parameter: Age (hr) Value: 24 vs. 0
  misc_feature: MA Experiment 20000180 PARAMETER Experiment Name: At_Germinating_Seeds_P Parameter: Tissue Value: Germinating Seeds
  misc_feature: MA Experiment ID: 20000185 Result: Up-regulated in Transcription
  misc_feature: MA Experiment 20000185 PARAMETER Experiment Name: At_Roots__P Parameter: Age (day) Value: 7 vs. 21
  misc_feature: MA Experiment 20000185 PARAMETER Experiment Name: At_Roots__P Parameter: Organism Value: A. thaliana
  misc_feature: MA Experiment 20000185 PARAMETER Experiment Name: At_Roots__P Parameter: Tissue Value: Roots vs. Whole Plant
  misc_feature: MA Experiment ID: 20000214 Result: Down-regulated in Transcription
  misc_feature: MA Experiment 20000214 PARAMETER Experiment Name: At_4deg_Cold_P Parameter: Timepoint (hr) Value: 6
  misc_feature: MA Experiment ID: 20000437 Result: Down-regulated in Transcription
  misc_feature: MA Experiment 20000437 PARAMETER Experiment Name: At_Drought_P Parameter: Age (day) Value: 8
  misc_feature: MA Experiment 20000437 PARAMETER Experiment Name: At_Drought_P Parameter: Organism Value: A. thaliana
  misc_feature: MA Experiment 20000437 PARAMETER Experiment Name: At_Drought_P Parameter: Plant Line Value: WS
  misc_feature: MA Experiment 20000437 PARAMETER Experiment Name: At_Drought_P Parameter: Timepoint (hr) Value: 24
  misc_feature: MA Experiment 20000437 PARAMETER Experiment Name: At_Drought_P Parameter: Tissue Value: Whole Plant
  misc_feature: MA Experiment 20000437 PARAMETER Experiment Name: At_Drought_P Parameter: Treatment Value: Drought vs. No Drought
  misc_feature: MA Experiment ID: 20001555 Result: Down-regulated in Transcription
  misc_feature: MA Experiment 20001555 PARAMETER Experiment Name: At_Drought_Soil_Dry_P Parameter: Age (day) Value: 24
  misc_feature: MA Experiment 20001555 PARAMETER Experiment Name: At_Drought_Soil_Dry_P Parameter: Organism Value: A. thaliana
  misc_feature: MA Experiment 20001555 PARAMETER Experiment Name: At_Drought_Soil_Dry_P Parameter: Plant Line Value: WS
  misc_feature: MA Experiment 20001555 PARAMETER Experiment Name: At_Drought_Soil_Dry_P Parameter: Post Timepoint (hr) Value: None
  misc_feature: MA Experiment 20001555 PARAMETER Experiment Name: At_Drought_Soil_Dry_P Parameter: Post-Treatment Value: None
  misc_feature: MA Experiment 20001555 PARAMETER Experiment Name: At_Drought_Soil_Dry_P Parameter: Timepoint (day) Value: 10
  misc_feature: MA Experiment 20001555 PARAMETER Experiment Name: At_Drought_Soil_Dry_P Parameter: Treatment Value: Drought vs. No Drought
  misc_feature: MA Experiment ID: 20001905 Result: Down-regulated in Transcription
  misc_feature: MA Experiment 20001905 PARAMETER Experiment Name: At_Drought_Reproduction_P Parameter: Age (day) Value: 40
  misc_feature: MA Experiment 20001905 PARAMETER Experiment Name: At_Drought_Reproduction_P Parameter: Organism Value: A. thaliana
  misc_feature: MA Experiment 20001905 PARAMETER Experiment Name: At_Drought_Reproduction_P Parameter: Plant Line Value: WS
  misc_feature: MA Experiment 20001905 PARAMETER Experiment Name: At_Drought_Reproduction_P Parameter: Timepoint (day) Value: 10
  misc_feature: MA Experiment 20001905 PARAMETER Experiment Name: At_Drought_Reproduction_P Parameter: Tissue Value: Rosettes
  misc_feature: MA Experiment 20001905 PARAMETER Experiment Name: At_Drought_Reproduction_P Parameter: Treatment Value: Drought vs. No Drought
atgccacgtaaccctagattctgcttcttcctcttccttctttttcactcctctcttttcttctccatcccctgtttttccatagacgaacagggtctagctctcctctcatggaaatctcagttgaacatctccggagacgctttatcttcttggaaagcctccgaatcgaatccttgtcaatgggtgggaatcaaatgcaacgaaagaggtcaagtctcggagatacaactccaagtcatggattttcaaggtccgttaccggcgacgaatctccgacagataaagtctctgactttgctcagcttaacctccgtgaatctcactggttcaatccctaaggagcttggagacttgtcggagctagaagttcttgatttagctgataattctctctctggtgaaatccctgtggatatcttcaagctcaagaaactaaagattctgtctctcaacacaaataatctcgaaggtgtgattccatcggagttagggaatctcgttaacctcatcgagctcactctcttcgacaataaactcgccggagagattcctagaaccatcggagaactcaagaatctagaaatcttccgtgcaggtggtaacaagaatctcagaggagagcttccttgggagattggtaactgcgagagtcttgtgactttaggtctcgccgaaacaagtctctccggtagacttccggcgtcgatcggaaacctgaaaaaggttcagacaatagctctttacacgtcactcttgtctggtccaatccctgatgagattggaaactgcacagagcttcaaaacctctacttgtaccaaaactcaatctctggatcgattcctgtatcaatgggacgtctcaagaagcttcaaagtcttctcttatggcaaaacaatctcgtcggaaagatccctaccgagctaggcacctgtccggagcttttcctcgtcgatttatcggaaaatctcctcaccggaaacatcccaagaagcttcggaaaccttccaaatctccaagagcttcagctaagtgttaaccagctctccggtacaatccctgaagaactcgcgaattgcacgaagttgacgcatttagagatcgataacaaccaaatctccggcgagattccgccgttgatcgggaaattaacaagcttgacgatgttctttgcgtggcagaatcagttaaccggaataattccagagtctctttctcaatgtcaagagcttcaagcgattgatctctcctacaacaatctctctggttcgatacctaatggaatctttgagattcgaaacctcacgaagcttcttcttctctctaactacttatctggattcataccaccggatattggaaactgcacgaatctttaccggttaagactcaacggtaacagactcgcggggaatattccggcggagattgggaatctgaaaaatctcaacttcatcgatataagtgagaatcgtctcatcggaaacattcctccggagatctccggttgtacaagtctcgaattcgtcgatctacattcaaacggtttaaccggtggtttacccggtacacttccgaagagcttacaattcattgatttatccgataattcattaaccggttctctaccaaccggaatcggatcgttaaccgaactcacgaagctcaatctcgcgaagaatcgtttctccggcgaaatccctcgagagatatcttcctgtcggagtcttcagcttctcaacctcggcgacaatggcttcaccggagaaatccctaacgagttaggacggatcccgtctcttgcgatctctctaaatctcagctgcaatcacttcaccggagagatcccgtcgagattctctagcctcactaatctcggaaccctcgatgtctctcacaacaaactcgccggaaacctaaacgtcttagctgatctacagaacctcgtctcactcaacatctccttcaacgaattctcaggcgagttaccaaatactctgtttttcaggaaacttccactctctgttcttgaatcaaacaaagggctatttatttcgacccgacccgagaatgggatccaaacccgacaccgttcggctgtcaaagtaaccatgtcgatcctcgtagcagcaagcgtcgttcttgttctcatggcggtttacactctcgtcaaagctcaacgaatcaccggaaaacaagaggagttagattcttgggaagtgactctttatcagaaactcgatttctccatcgacgacatcgtcaagaacttaacttcagctaacgtgatcggaactggaagctccggtgtagtttacagagtcacaatcccgtccggtgaaactttagctgtgaagaaaatgtggtcaaaggaagaaaacagagcgtttaactcagagatcaacactcttggatcgattcgacataggaacataatccgtcttttgggttggtgttcgaatcggaatctgaagcttttgttctatgattatcttcctaacggaagtttaagctctctgcttcacggtgccggtaaaggaagtggaggagctgattgggaagcacgttacgacgtcgttttaggcgttgcacatgcactagcttatcttcatcatgattgtcttcctccgattctacacggtgacgttaaagctatgaatgtcttattgggttcccgcttcgaatcttacttagccgatttcggtttagcaaaaatcgtctccggtgagggagttaccgatggagattcgtctaaattgagtaaccggcctccgttagccggttcttatggttacatggctccagaacatgcttcgatgcaacatataacagaaaagagtgatgtgtatagctatggagtggtgctactagaagttttaaccgggaagcatccattggacccggatctacccggaggtgctcatttggttcaatgggtgagagatcatttagccggaaagaaagatcctagagaaattcttgacccgagactccgcgggcgggcagatcctataatgcatgagatgctacaaactctagcggtctcgttcctttgtgtgagcaacaaggcatccgatcggcctatgatgaaagacattgtggcaatgcttaaagagattaggcagtttgatatggatagatcggaatccgatatgataaaaggcggaaaatgcgaaaaatggcagccgcaaccgttaccaccggagaaaattgtcagtactcctcgaggttcatctaattgttcgtttgcttactcggatgaatccgtataa

SEQ ID NO: 78677 - protein, 1090 aa, Arabidopsis thaliana
  peptide (1)..(1090): Ceres Seq. ID no. 12643897
  misc_feature (127)..(1090): Homolog of NCBI NO: 7434427 NR Description: protein kinase homolog M3E9.30 - Arabidopsis
  misc_feature (82)..(1086): Homolog of NCBI NO: 15528705 NR Description: putative receptor protein kinase [Oryza sativa
  misc_feature (1)..(595): Homolog of NCBI NO: 9758624 NR Description: receptor protein kinase-like protein [Arabidopsis
  misc_feature (26)..(1089): Homolog of NCBI NO: 12054894 NR Description: receptor protein kinase [Pinus sylvestris]
  misc_feature (11)..(740): Homolog of NCBI NO: 15239748 NR Description: leucine-rich repeat transmembrane protein kinase, protein id: At5g48940.1 [Arabidopsis thaliana]
  misc_feature (882)..(1058): Homolog of NCBI NO: 15239748 NR Description: leucine-rich repeat transmembrane protein kinase, protein id: At5g48940.1 [Arabidopsis thaliana]
  misc_feature (1)..(1041): Homolog of NCBI NO: 25403209 NR Description: probable Protein kinase [imported] - Arabidopsis >gi|10086466|gb|AAG12526.1|AC015446_7 Putative Protein kinase
  misc_feature (24)..(1041): Homolog of NCBI NO: 30692999 NR Description: leucine-rich repeat transmembrane protein kinase,
  misc_feature (13)..(683): Homolog of NCBI NO: 7434427 NR Description: protein kinase homolog M3E9.30 - Arabidopsis
  misc_feature (29)..(728): Homolog of NCBI NO: 15528705 NR Description: putative receptor protein kinase [Oryza sativa
MPRNPRFCFFLFLLFHSSLFFSIPCFSIDEQGLALLSWKSQLNISGDALSSWKASESNPCQWVGIKCNERGQVSEIQLQVMDFQGPLPATNLRQIKSLTLLSLTSVNLTGSIPKELGDLSELEVLDLADNSLSGEIPVDIFKLKKLKILSLNTNNLEGVIPSELGNLVNLIELTLFDNKLAGEIPRTIGELKNLEIFRAGGNKNLRGELPWEIGNCESLVTLGLAETSLSGRLPASIGNLKKVQTIALYTSLLSGPIPDEIGNCTELQNLYLYQNSISGSIPVSMGRLKKLQSLLLWQNNLVGKIPTELGTCPELFLVDLSENLLTGNIPRSFGNLPNLQELQLSVNQLSGTIPEELANCTKLTHLEIDNNQISGEIPPLIGKLTSLTMFFAWQNQLTGIIPESLSQCQELQAIDLSYNNLSGSIPNGIFEIRNLTKLLLLSNYLSGFIPPDIGNCTNLYRLRLNGNRLAGNIPAEIGNLKNLNFIDISENRLIGNIPPEISGCTSLEFVDLHSNGLTGGLPGTLPKSLQFIDLSDNSLTGSLPTGIGSLTELTKLNLAKNRFSGEIPREISSCRSLQLLNLGDNGFTGEIPNELGRIPSLAISLNLSCNHFTGEIPSRFSSLTNLGTLDVSHNKLAGNLNVLADLQNLVSLNISFNEFSGELPNTLFFRKLPLSVLESNKGLFISTRPENGIQTRHRSAVKVTMSILVAASVVLVLMAVYTLVKAQRITGKQEELDSWEVTLYQKLDFSIDDIVKNLTSANVIGTGSSGVVYRVTIPSGETLAVKKMWSKEENRAFNSEINTLGSIRHRNIIRLLGWCSNRNLKLLFYDYLPNGSLSSLLHGAGKGSGGADWEARYDVVLGVAHALAYLHHDCLPPILHGDVKAMNVLLGSRFESYLADFGLAKIVSGEGVTDGDSSKLSNRPPLAGSYGYMAPEHASMQHITEKSDVYSYGVVLLEVLTGKHPLDPDLPGGAHLVQWVRDHLAGKKDPREILDPRLRGRADPIMHEMLQTLAVSFLCVSNKASDRPMMKDIVAMLKEIRQFDMDRSESDMIKGGKCEKWQPQPLPPEKIVSTPRGSSNCSFAYSDESV

SEQ ID NO: 78678 - protein, 1010 aa, Arabidopsis thaliana
  peptide (1)..(1010): Ceres Seq. ID no. 12643898
  misc_feature (47)..(1010): Homolog of NCBI NO: 7434427 NR Description: protein kinase homolog M3E9.30 - Arabidopsis
  misc_feature (2)..(1006): Homolog of NCBI NO: 15528705 NR Description: putative receptor protein kinase [Oryza sativa
  misc_feature (1)..(515): Homolog of NCBI NO: 9758624 NR Description: receptor protein kinase-like protein [Arabidopsis
  misc_feature (1)..(1009): Homolog of NCBI NO: 12054894 NR Description: receptor protein kinase [Pinus sylvestris]
  misc_feature (1)..(660): Homolog of NCBI NO: 15239748 NR Description: leucine-rich repeat transmembrane protein kinase, protein id: At5g48940.1 [Arabidopsis thaliana]
  misc_feature (802)..(978): Homolog of NCBI NO: 15239748 NR Description: leucine-rich repeat transmembrane protein kinase, protein id: At5g48940.1 [Arabidopsis thaliana]
  misc_feature (1)..(961): Homolog of NCBI NO: 25403209 NR Description: probable Protein kinase [imported] - Arabidopsis >gi|10086466|gb|AAG12526.1|AC015446_7 Putative Protein kinase
  misc_feature (1)..(961): Homolog of NCBI NO: 30692999 NR Description: leucine-rich repeat transmembrane protein kinase,
  misc_feature (1)..(603): Homolog of NCBI NO: 7434427 NR Description: protein kinase homolog M3E9.30 - Arabidopsis
  misc_feature (1)..(648): Homolog of NCBI NO: 15528705 NR Description: putative receptor protein kinase [Oryza sativa
MDFQGPLPATNLRQIKSLTLLSLTSVNLTGSIPKELGDLSELEVLDLADNSLSGEIPVDIFKLKKLKILSLNTNNLEGVIPSELGNLVNLIELTLFDNKLAGEIPRTIGELKNLEIFRAGGNKNLRGELPWEIGNCESLVTLGLAETSLSGRLPASIGNLKKVQTIALYTSLLSGPIPDEIGNCTELQNLYLYQNSISGSIPVSMGRLKKLQSLLLWQNNLVGKIPTELGTCPELFLVDLSENLLTGNIPRSFGNLPNLQELQLSVNQLSGTIPEELANCTKLTHLEIDNNQISGEIPPLIGKLTSLTMFFAWQNQLTGIIPESLSQCQELQAIDLSYNNLSGSIPNGIFEIRNLTKLLLLSNYLSGFIPPDIGNCTNLYRLRLNGNRLAGNIPAEIGNLKNLNFIDISENRLIGNIPPEISGCTSLEFVDLHSNGLTGGLPGTLPKSLQFIDLSDNSLTGSLPTGIGSLTELTKLNLAKNRFSGEIPREISSCRSLQLLNLGDNGFTGEIPNELGRIPSLAISLNLSCNHFTGEIPSRFSSLTNLGTLDVSHNKLAGNLNVLADLQNLVSLNISFNEFSGELPNTLFFRKLPLSVLESNKGLFISTRPENGIQTRHRSAVKVTMSILVAASVVLVLMAVYTLVKAQRITGKQEELDSWEVTLYQKLDFSIDDIVKNLTSANVIGTGSSGVVYRVTIPSGETLAVKKMWSKEENRAFNSEINTLGSIRHRNIIRLLGWCSNRNLKLLFYDYLPNGSLSSLLHGAGKGSGGADWEARYDVVLGVAHALAYLHHDCLPPILHGDVKAMNVLLGSRFESYLADFGLAKIVSGEGVTDGDSSKLSNRPPLAGSYGYMAPEHASMQHITEKSDVYSYGVVLLEVLTGKHPLDPDLPGGAHLVQWVRDHLAGKKDPREILDPRLRGRADPIMHEMLQTLAVSFLCVSNKASDRPMMKDIVAMLKEIRQFDMDRSESDMIKGGKCEKWQPQPLPPEKIVSTPRGSSNCSFAYSDESV

SEQ ID NO: 78679 - protein, 806 aa, Arabidopsis thaliana
  peptide (1)..(806): Ceres Seq. ID no. 12643899
  misc_feature (1)..(806): Homolog of NCBI NO: 7434427 NR Description: protein kinase homolog M3E9.30 - Arabidopsis
  misc_feature (1)..(802): Homolog of NCBI NO: 15528705 NR Description: putative receptor protein kinase [Oryza sativa
  misc_feature (1)..(311): Homolog of NCBI NO: 9758624 NR Description: receptor protein kinase-like protein [Arabidopsis
  misc_feature (1)..(805): Homolog of NCBI NO: 12054894 NR Description: receptor protein kinase [Pinus sylvestris]
  misc_feature (1)..(456): Homolog of NCBI NO: 15239748 NR Description: leucine-rich repeat transmembrane protein kinase, protein id: At5g48940.1 [Arabidopsis thaliana]
  misc_feature (598)..(774): Homolog of NCBI NO: 15239748 NR Description: leucine-rich repeat transmembrane protein kinase, protein id: At5g48940.1 [Arabidopsis thaliana]
  misc_feature (1)..(757): Homolog of NCBI NO: 25403209 NR Description: probable Protein kinase [imported] - Arabidopsis >gi|10086466|gb|AAG12526.1|AC015446_7 Putative Protein kinase
  misc_feature (1)..(757): Homolog of NCBI NO: 30692999 NR Description: leucine-rich repeat transmembrane protein kinase,
  misc_feature (1)..(399): Homolog of NCBI NO: 7434427 NR Description: protein kinase homolog M3E9.30 - Arabidopsis
  misc_feature (1)..(444): Homolog of NCBI NO: 15528705 NR Description: putative receptor protein kinase [Oryza sativa
MGRLKKLQSLLLWQNNLVGKIPTELGTCPELFLVDLSENLLTGNIPRSFGNLPNLQELQLSVNQLSGTIPEELANCTKLTHLEIDNNQISGEIPPLIGKLTSLTMFFAWQNQLTGIIPESLSQCQELQAIDLSYNNLSGSIPNGIFEIRNLTKLLLLSNYLSGFIPPDIGNCTNLYRLRLNGNRLAGNIPAEIGNLKNLNFIDISENRLIGNIPPEISGCTSLEFVDLHSNGLTGGLPGTLPKSLQFIDLSDNSLTGSLPTGIGSLTELTKLNLAKNRFSGEIPREISSCRSLQLLNLGDNGFTGEIPNELGRIPSLAISLNLSCNHFTGEIPSRFSSLTNLGTLDVSHNKLAGNLNVLADLQNLVSLNISFNEFSGELPNTLFFRKLPLSVLESNKGLFISTRPENGIQTRHRSAVKVTMSILVAASVVLVLMAVYTLVKAQRITGKQEELDSWEVTLYQKLDFSIDDIVKNLTSANVIGTGSSGVVYRVTIPSGETLAVKKMWSKEENRAFNSEINTLGSIRHRNIIRLLGWCSNRNLKLLFYDYLPNGSLSSLLHGAGKGSGGADWEARYDVVLGVAHALAYLHHDCLPPILHGDVKAMNVLLGSRFESYLADFGLAKIVSGEGVTDGDSSKLSNRPPLAGSYGYMAPEHASMQHITEKSDVYSYGVVLLEVLTGKHPLDPDLPGGAHLVQWVRDHLAGKKDPREILDPRLRGRADPIMHEMLQTLAVSFLCVSNKASDRPMMKDIVAMLKEIRQFDMDRSESDMIKGGKCEKWQPQPLPPEKIVSTPRGSSNCSFAYSDESV

SEQ ID NO: 78680 - DNA, 1305 bp, Arabidopsis thaliana
  misc_feature (1)..(1305): Ceres Seq. ID no. 12643931
  misc_feature: MA Experiment ID: 20000180 Result: Down-regulated in Transcription
  misc_feature: MA Experiment 20000180 PARAMETER Experiment Name: At_Germinating_Seeds_P Parameter: Age (hr) Value: 24 vs. 0
  misc_feature: MA Experiment 20000180 PARAMETER Experiment Name: At_Germinating_Seeds_P Parameter: Tissue Value: Germinating Seeds
  misc_feature: MA Experiment ID: 20001556 Result: Up-regulated in Transcription
  misc_feature: MA Experiment 20001556 PARAMETER Experiment Name: At_Drought_Soil_Dry_P Parameter: Age (day) Value: 26
  misc_feature: MA Experiment 20001556 PARAMETER Experiment Name: At_Drought_Soil_Dry_P Parameter: Organism Value: A. thaliana
  misc_feature: MA Experiment 20001556 PARAMETER Experiment Name: At_Drought_Soil_Dry_P Parameter: Plant Line Value: WS
  misc_feature: MA Experiment 20001556 PARAMETER Experiment Name: At_Drought_Soil_Dry_P Parameter: Post Timepoint (hr) Value: None
  misc_feature: MA Experiment 20001556 PARAMETER Experiment Name: At_Drought_Soil_Dry_P Parameter: Post-Treatment Value: None
  misc_feature: MA Experiment 20001556 PARAMETER Experiment Name: At_Drought_Soil_Dry_P Parameter: Timepoint (day) Value: 12
  misc_feature: MA Experiment 20001556 PARAMETER Experiment Name: At_Drought_Soil_Dry_P Parameter: Treatment Value: Drought vs. No Drought
  misc_feature: MA Experiment ID: 20001558 Result: Up-regulated in Transcription
  misc_feature: MA Experiment 20001558 PARAMETER Experiment Name: At_Drought_Soil_Dry_P Parameter: Age (day) Value: 27
  misc_feature: MA Experiment 20001558 PARAMETER Experiment Name: At_Drought_Soil_Dry_P Parameter: Organism Value: A. thaliana
  misc_feature: MA Experiment 20001558 PARAMETER Experiment Name: At_Drought_Soil_Dry_P Parameter: Plant Line Value: WS
  misc_feature: MA Experiment 20001558 PARAMETER Experiment Name: At_Drought_Soil_Dry_P Parameter: Post Timepoint (hr) Value: 6
  misc_feature: MA Experiment 20001558 PARAMETER Experiment Name: At_Drought_Soil_Dry_P Parameter: Post-Treatment Value: Re-Water vs. No Drought
  misc_feature: MA Experiment 20001558 PARAMETER Experiment Name: At_Drought_Soil_Dry_P Parameter: Timepoint (day) Value: 13
  misc_feature: MA Experiment 20001558 PARAMETER Experiment Name: At_Drought_Soil_Dry_P Parameter: Treatment Value: Drought vs. No Drought
atgattcagagaatcaatgccttgagcttaagctctggtctaaattggttccctgacacgtttactttcccgtttgtgttgaagattgctgttagggtttctgatgtttggtttgggagacagattcatggacaagttgtggtttttgggtttgattcgagcgttcatgttgtaacaggtttgattcagatgtatttttcgtgtggtggtttgggagatgcacgtaagatgttcgatgaaatgcttgtcaaggatgtgaatgtttggaatgcgttgttagcagggtatgggaaagttggtgagatggatgaagctaggagtttgcttgagatgatgccttgttgggtaaggaatgaggtttcttggacttgtgtgatctctggatatgcgaaaagtggacgagctagcgaagctattgaagtgtttcagagaatgctgatggagaatgttgagcctgatgaagttacgcttttggctgtgctctcagcttgtgctgatcttggttcacttgaattgggtgaaagaatatgtagctatgttgatcaccgagggatgaacagagcggtttcattgaacaatgcggtcattgatatgtatgcgaaatcagggaatataacaaaggcgttggatgtgtttgagtgtgttaatgagagaaatgttgttacttggacgactataatcgcagggctagctacgcacgggcacggagctgaagccttagcgatgtttaaccgtatggttaaagctggcgtgagaccgaacgatgttactttcattgcaatcctttcagcttgcagtcatgtcggttgggttgatcttggaaaacgtttgtttaactcaatgagatcgaaatacgggattcatccaaacattgagcattacggatgcatgattgatttgctaggacgagcaggtaaactccgagaggcggatgaagttattaaaagcatgccctttaaggccaatgctgcaatatggggatctcttcttgctgcttcaaatgttcatcatgatcttgagcttggagaaagagctttgagtgagctgattaagttagaaccgaataacagcggtaactatatgcttttagctaatttatactcgaatttaggaaggtgggatgagtcgaggatgatgaggaacatgatgaaagggattggtgtgaagaagatggctggtgaaagctccatagaagttgaaaacagagtatacaaattcatttcaggggatcttacgcatcctcaagtcgaaaggattcatgaaattctacaagagatggatttgcaaatacagagcaaagtttga

SEQ ID NO: 78681 - protein, 434 aa, Arabidopsis thaliana
  peptide (1)..(434): Ceres Seq. ID no. 12643932
  misc_feature (56)..(90): Pfam Name: PPR repeat Pfam Description: PPR repeat
  misc_feature (18)..(434): Homolog of NCBI NO: 15241180 NR Description: putative protein; protein id: At5g56310.1 thaliana] >gi|10177829|dbj|BAB11258.1|
  misc_feature (41)..(432): Homolog of NCBI NO: 34902972 NR Description: unnamed protein product [Oryza sativa (japonica group)] >gi|9558518|dbj|BAB03436.1| unnamed protein product
  misc_feature (18)..(424): Homolog of NCBI NO: 15225375 NR Description: unknown protein; protein id: At2g20540.1
  misc_feature (16)..(426): Homolog of NCBI NO: 15240085 NR Description: selenium-binding protein-like; protein id:
  misc_feature (19)..(419): Homolog of NCBI NO: 15239979 NR Description: selenium-binding protein-like; protein id:
  misc_feature (22)..(426): Homolog of NCBI NO: 34910298 NR Description: P0013F10.8 [Oryza sativa (japonica
  misc_feature (120)..(431): Homolog of NCBI NO: 15229097 NR Description: putative protein; protein id: At3g49140.1
  misc_feature (13)..(112): Homolog of NCBI NO: 15229097 NR Description: putative protein; protein id: At3g49140.1
  misc_feature (10)..(431): Homolog of NCBI NO: 10178152 NR Description: selenium-binding protein-like [Arabidopsis
  misc_feature (10)..(431): Homolog of NCBI NO: 15242684 NR Description: putative protein; protein id: At5g40410.1
MIQRINALSLSSGLNWFPDTFTFPFVLKIAVRVSDVWFGRQIHGQVVVFGFDSSVHVVTGLIQMYFSCGGLGDARKMFDEMLVKDVNVWNALLAGYGKVGEMDEARSLLEMMPCWVRNEVSWTCVISGYAKSGRASEAIEVFQRMLMENVEPDEVTLLAVLSACADLGSLELGERICSYVDHRGMNRAVSLNNAVIDMYAKSGNITKALDVFECVNERNVVTWTTIIAGLATHGHGAEALAMFNRMVKAGVRPNDVTFIAILSACSHVGWVDLGKRLFNSMRSKYGIHPNIEHYGCMIDLLGRAGKLREADEVIKSMPFKANAAIWGSLLAASNVHHDLELGERALSELIKLEPNNSGNYMLLANLYSNLGRWDESRMMRNMMKGIGVKKMAGESSIEVENRVYKFISGDLTHPQVERIHEILQEMDLQIQSKV

SEQ ID NO: 78682 - protein, 371 aa, Arabidopsis thaliana
  peptide (1)..(371): Ceres Seq. ID no. 12643933
  misc_feature (1)..(27): Pfam Name: PPR repeat Pfam Description: PPR repeat
  misc_feature (1)..(371): Homolog of NCBI NO: 15241180 NR Description: putative protein; protein id: At5g56310.1 thaliana] >gi|10177829|dbj|BAB11258.1|
  misc_feature (1)..(369): Homolog of NCBI NO: 34902972 NR Description: unnamed protein product [Oryza sativa (japonica group)] >gi|9558518|dbj|BAB03436.1| unnamed protein product
  misc_feature (1)..(361): Homolog of NCBI NO: 15225375 NR Description: unknown protein; protein id: At2g20540.1
  misc_feature (1)..(363): Homolog of NCBI NO: 15240085 NR Description: selenium-binding protein-like; protein id:
  misc_feature (1)..(356): Homolog of NCBI NO: 15239979 NR Description: selenium-binding protein-like; protein id:
  misc_feature (1)..(363): Homolog of NCBI NO: 34910298 NR Description: P0013F10.8 [Oryza sativa (japonica
  misc_feature (57)..(368): Homolog of NCBI NO: 15229097 NR Description: putative protein; protein id: At3g49140.1
  misc_feature (1)..(49): Homolog of NCBI NO: 15229097 NR Description: putative protein; protein id: At3g49140.1
  misc_feature (1)..(368): Homolog of NCBI NO: 10178152 NR Description: selenium-binding protein-like [Arabidopsis
  misc_feature (1)..(368): Homolog of NCBI NO: 15242684 NR Description: putative protein; protein id: At5g40410.1
MYFSCGGLGDARKMFDEMLVKDVNVWNALLAGYGKVGEMDEARSLLEMMPCWVRNEVSWTCVISGYAKSGRASEAIEVFQRMLMENVEPDEVTLLAVLSACADLGSLELGERICSYVDHRGMNRAVSLNNAVIDMYAKSGNITKALDVFECVNERNVVTWTTIIAGLATHGHGAEALAMFNRMVKAGVRPNDVTFIAILSACSHVGWVDLGKRLFNSMRSKYGIHPNIEHYGCMIDLLGRAGKLREADEVIKSMPFKANAAIWGSLLAASNVHHDLELGERALSELIKLEPNNSGNYMLLANLYSNLGRWDESRMMRNMMKGIGVKKMAGESSIEVENRVYKFISGDLTHPQVERIHEILQEMDLQIQSKV

SEQ ID NO: 78683 - protein, 358 aa, Arabidopsis thaliana
  peptide (1)..(358): Ceres Seq. ID no. 12643934
  misc_feature (1)..(358): Homolog of NCBI NO: 15241180 NR Description: putative protein; protein id: At5g56310.1 thaliana] >gi|10177829|dbj|BAB11258.1|
  misc_feature (1)..(356): Homolog of NCBI NO: 34902972 NR Description: unnamed protein product [Oryza sativa (japonica group)] >gi|9558518|dbj|BAB03436.1| unnamed protein product
  misc_feature (1)..(348): Homolog of NCBI NO: 15225375 NR Description: unknown protein; protein id: At2g20540.1
  misc_feature (1)..(350): Homolog of NCBI NO: 15240085 NR Description: selenium-binding protein-like; protein id:
  misc_feature (1)..(343): Homolog of NCBI NO: 15239979 NR Description: selenium-binding protein-like; protein id:
  misc_feature (1)..(350): Homolog of NCBI NO: 34910298 NR Description: P0013F10.8 [Oryza sativa (japonica
  misc_feature (44)..(355): Homolog of NCBI NO: 15229097 NR Description: putative protein; protein id: At3g49140.1
  misc_feature (1)..(36): Homolog of NCBI NO: 15229097 NR Description: putative protein; protein id: At3g49140.1
  misc_feature (1)..(355): Homolog of NCBI NO: 10178152 NR Description: selenium-binding protein-like [Arabidopsis
  misc_feature (1)..(355): Homolog of NCBI NO: 15242684 NR Description: putative protein; protein id: At5g40410.1
MFDEMLVKDVNVWNALLAGYGKVGEMDEARSLLEMMPCWVRNEVSWTCVISGYAKSGRASEAIEVFQRMLMENVEPDEVTLLAVLSACADLGSLELGERICSYVDHRGMNRAVSLNNAVIDMYAKSGNITKALDVFECVNERNVVTWTTIIAGLATHGHGAEALAMFNRMVKAGVRPNDVTFIAILSACSHVGWVDLGKRLFNSMRSKYGIHPNIEHYGCMIDLLGRAGKLREADEVIKSMPFKANAAIWGSLLAASNVHHDLELGERALSELIKLEPNNSGNYMLLANLYSNLGRWDESRMMRNMMKGIGVKKMAGESSIEVENRVYKFISGDLTHPQVERIHEILQEMDLQIQSKV

SEQ ID NO: 78684 - DNA, 1203 bp, Arabidopsis thaliana
  misc_feature (1)..(1203): Ceres Seq. ID no. 12643935
  misc_feature: MA Experiment ID: 108434 Result: Up-regulated in Transcription
  misc_feature: MA Experiment 108434 PARAMETER Experiment Name: At_Root_Tips_cDNA_P Parameter: Tissue Value: Root Tips
  misc_feature: MA Experiment ID: 20000086 Result: Down-regulated in Transcription
  misc_feature: MA Experiment 20000086 PARAMETER Experiment Name: At_100uM_ABA_Mutants_cDNA_P Parameter: Plant Line Value: CS22
  misc_feature: MA Experiment 20000086 PARAMETER Experiment Name: At_100uM_ABA_Mutants_cDNA_P Parameter: Timepoint (hr) Value: 6
  misc_feature: MA Experiment 20000086 PARAMETER Experiment Name: At_100uM_ABA_Mutants_cDNA_P Parameter: Tissue Value: Aerial
  misc_feature: MA Experiment 20000086 PARAMETER Experiment Name: At_100uM_ABA_Mutants_cDNA_P Parameter: Treatment Value: 100uM ABA vs. No Treatment
  misc_feature: MA Experiment ID: 20000180 Result: Up-regulated in Transcription
  misc_feature: MA Experiment 20000180 PARAMETER Experiment Name: At_Germinating_Seeds_P Parameter: Age (hr) Value: 24 vs. 0
  misc_feature: MA Experiment 20000180 PARAMETER Experiment Name: At_Germinating_Seeds_P Parameter: Tissue Value: Germinating Seeds
  misc_feature: MA Experiment ID: 20000185 Result: Up-regulated in Transcription
  misc_feature: MA Experiment 20000185 PARAMETER Experiment Name: At_Roots__P Parameter: Age (day) Value: 7 vs. 21
  misc_feature: MA Experiment 20000185 PARAMETER Experiment Name: At_Roots__P Parameter: Organism Value: A. thaliana
  misc_feature: MA Experiment 20000185 PARAMETER Experiment Name: At_Roots__P Parameter: Tissue Value: Roots vs. Whole Plant
  misc_feature: MA Experiment ID: 20000437 Result: Down-regulated in Transcription
  misc_feature: MA Experiment 20000437 PARAMETER Experiment Name: At_Drought_P Parameter: Age (day) Value: 8
  misc_feature: MA Experiment 20000437 PARAMETER Experiment Name: At_Drought_P Parameter: Organism Value: A. thaliana
  misc_feature: MA Experiment 20000437 PARAMETER Experiment Name: At_Drought_P Parameter: Plant Line Value: WS
  misc_feature: MA Experiment 20000437 PARAMETER Experiment Name: At_Drought_P Parameter: Timepoint (hr) Value: 24
  misc_feature: MA Experiment 20000437 PARAMETER Experiment Name: At_Drought_P Parameter: Tissue Value: Whole Plant
  misc_feature: MA Experiment 20000437 PARAMETER Experiment Name: At_Drought_P Parameter: Treatment Value: Drought vs. No Drought
  misc_feature: MA Experiment ID: 20000439 Result: Up-regulated in Transcription
  misc_feature: MA Experiment 20000439 PARAMETER Experiment Name: At_Roots__P Parameter: Age (day) Value: 14 vs. 21
  misc_feature: MA Experiment 20000439 PARAMETER Experiment Name: At_Roots__P Parameter: Organism Value: A. thaliana
  misc_feature: MA Experiment 20000439 PARAMETER Experiment Name: At_Roots__P Parameter: Tissue Value: Roots vs. Whole Plant
acaacaacattgaaacccatttcttcgcctttaaccttacttgaatttttgtgtgggtcctttttttttctttctccaagccattgaataaaaaggcagagaaaatggagttttttggtaaaatgataatttcattgagtcttatgatgatgataatgtggaagagcgtggatggttacagtagtggttgggtcaatgctcgagccacattctatggaggagctgatgcttctggcaccatgggcggcgcgtgtggttacggaaacttatacagtcaaggatacggcactaacacggcggctctaagcacggctctattcaacggcggccaaagctgtggtgcttgttttcagataaaatgcgtagacgacccaaaatggtgtatcggtggaacaatcaccgtcaccggaacaaacttttgtccacccaactttgctcaagccaacaacgccggaggttggtgtaatcctcctcaacaccacttcgatttagctcagcccatcttcctccgtattgctcaatacaaagccggcgtcgtccctgtccaataccggagagtggcttgccggagaaaaggaggaataagattcacgatcaacggtcattcatacttcaacctcgtacttataaccaacgtcgccggcgccggagatgttatctccgtctccattaaaggaaccaatacacgttggcaaagcatgtcaagaaactggggacagaattggcaaagcaatgcaaaacttgatggtcaagctttgtcctttaaagtaacaactagtgatggccgtacagttatatctaacaatgctacaccacgtaactggagcttcggacagacttataccggaaaacagttccgggctcagaggtgatgatgacgtggactgtctggaggggaaaaaaaaagttttacttattactgattttggagttttctagagtttgcatagtttgaaaaaagttttcaggaattaaccctaatcaaaataaccaatttctaaatggcggaaatcgaggttttttctcactggcagcttttgtaattcgccggtgagactgaggtgttttcacccgccgcctgagtgattgagttttttttttttttttttgtactttgtttggcttttaagatgttcaatggtctgtttctttaagacattgtctactgaaataataataaaatcaagttaatttataattttt

SEQ ID NO: 78685 - protein, 255 aa, Arabidopsis thaliana [sequence omitted]

SEQ ID NO: 78686 - protein, 249 aa, Arabidopsis thaliana
  peptide (1)..(249): Ceres Seq. ID no. 12643937
  misc_feature (154)..(231): Pfam Name: Pollen allergen Pfam Description: Pollen allergen
  misc_feature (1)..(249): Homolog of NCBI NO: 15241183 NR Description: expansin, putative; protein id: At5g56320.1, by cDNA: 42551. [Arabidopsis thaliana]
  misc_feature (1)..(249): Homolog of NCBI NO: 21593755 NR Description: expansin [Arabidopsis thaliana]
  misc_feature (1)..(246): Homolog of NCBI NO: 29467505 NR Description: expansin [Pyrus communis]
  misc_feature (1)..(246): Homolog of NCBI NO: 22325441 NR Description: expansin, putative; protein id: At2g03090.1, by cDNA: gi_18176130 [Arabidopsis thaliana] putative expansin protein [Arabidopsis thaliana]
  misc_feature (15)..(246): Homolog of NCBI NO: 20137710 NR Description: Alpha-expansin 15 precursor (At-EXP15) (AtEx15)
  misc_feature (5)..(246): Homolog of NCBI NO: 29466641 NR Description: expansin [Prunus persica]
  misc_feature (5)..(246): Homolog of NCBI NO: 17484121 NR Description: alpha-expansin [Prunus cerasus]
  misc_feature (10)..(246): Homolog of NCBI NO: 38046730 NR Description: alpha-expansin 3 [Populus tremula x Populus
  misc_feature (2)..(246): Homolog of NCBI NO: 21615407 NR Description: alpha-expansin 3 [Cicer arietinum]
  misc_feature (7)..(246): Homolog of NCBI NO: 29467507 NR Description: expansin [Pyrus communis]
MIISLSLMMMIMWKSVDGYSSGWVNARATFYGGADASGTMGGACGYGNLYSQGYGTNTAALSTALFNGGQSCGACFQIKCVDDPKWCIGGTITVTGTNFCPPNFAQANNAGGWCNPPQHHFDLAQPIFLRIAQYKAGVVPVQYRRVACRRKGGIRFTINGHSYFNLVLITNVAGAGDVISVSIKGTNTRWQSMSRNWGQNWQSNAKLDGQALSFKVTTSDGRTVISNNATPRNWSFGQTYTGKQFRAQR

SEQ ID NO: 78687 - protein, 242 aa, Arabidopsis thaliana
  peptide (1)..(242): Ceres Seq. ID no. 12643938
  misc_feature (147)..(224): Pfam Name: Pollen allergen Pfam Description: Pollen allergen
  misc_feature (1)..(242): Homolog of NCBI NO: 15241183 NR Description: expansin, putative; protein id: At5g56320.1, by cDNA: 42551. [Arabidopsis thaliana]
  misc_feature (1)..(242): Homolog of NCBI NO: 21593755 NR Description: expansin [Arabidopsis thaliana]
  misc_feature (1)..(239): Homolog of NCBI NO: 29467505 NR Description: expansin [Pyrus communis]
  misc_feature (1)..(239): Homolog of NCBI NO: 22325441 NR Description: expansin, putative; protein id: At2g03090.1, by cDNA: gi_18176130 [Arabidopsis thaliana] putative expansin protein [Arabidopsis thaliana]
  misc_feature (8)..(239): Homolog of NCBI NO: 20137710 NR Description: Alpha-expansin 15 precursor (At-EXP15) (AtEx15)
  misc_feature (1)..(239): Homolog of NCBI NO: 29466641 NR Description: expansin [Prunus persica]
  misc_feature (1)..(239): Homolog of NCBI NO: 17484121 NR Description: alpha-expansin [Prunus cerasus]
  misc_feature (3)..(239): Homolog of NCBI NO: 38046730 NR Description: alpha-expansin 3 [Populus tremula x Populus
  misc_feature (1)..(239): Homolog of NCBI NO: 21615407 NR Description: alpha-expansin 3 [Cicer arietinum]
  misc_feature (1)..(239): Homolog of NCBI NO: 29467507 NR Description: expansin [Pyrus communis]
MMMIMWKSVDGYSSGWVNARATFYGGADASGTMGGACGYGNLYSQGYGTNTAALSTALFNGGQSCGACFQIKCVDDPKWCIGGTITVTGTNFCPPNFAQANNAGGWCNPPQHHFDLAQPIFLRIAQYKAGVVPVQYRRVACRRKGGIRFTINGHSYFNLVLITNVAGAGDVISVSIKGTNTRWQSMSRNWGQNWQSNAKLDGQALSFKVTTSDGRTVISNNATPRNWSFGQTYTGKQFRAQR

SEQ ID NO: 78688 - DNA, 3060 bp, Arabidopsis thaliana
  misc_feature (1)..(3060): Ceres Seq. ID no. 12644062
  misc_feature: MA Experiment ID: 20000315 Result: Down-regulated in Transcription
  misc_feature: MA Experiment 20000315 PARAMETER Experiment Name: At_14day_Shoots-Roots_Sub_P Parameter: Age (day) Value: 14
  misc_feature: MA Experiment 20000315 PARAMETER Experiment Name: At_14day_Shoots-Roots_Sub_P Parameter: Organism Value: A. thaliana
  misc_feature: MA Experiment 20000315 PARAMETER Experiment Name: At_14day_Shoots-Roots_Sub_P Parameter: Plant Line Value: WS
  misc_feature: MA Experiment 20000315 PARAMETER Experiment Name: At_14day_Shoots-Roots_Sub_P Parameter: Tissue Value: Shoots vs. Whole Plant
  misc_feature: MA Experiment ID: 20000355 Result: Up-regulated in Transcription
  misc_feature: MA Experiment 20000355 PARAMETER Experiment Name: At_Siliques_Sub_P Parameter: Age (day) Value: 21
  misc_feature: MA Experiment 20000355 PARAMETER Experiment Name: At_Siliques_Sub_P Parameter: Organism Value: A. thaliana
  misc_feature: MA Experiment 20000355 PARAMETER Experiment Name: At_Siliques_Sub_P Parameter: Plant Line Value: WS
  misc_feature: MA Experiment 20000355 PARAMETER Experiment Name: At_Siliques_Sub_P Parameter: Tissue Value: Less Than 5mm Siliques vs. Whole Plant
  misc_feature: MA Experiment ID: 20000440 Result: Up-regulated in Transcription
  misc_feature: MA Experiment 20000440 PARAMETER Experiment Name: At_Closed-Flower__Sub_P Parameter: Tissue Value: Closed Flower vs. Whole Plant
atgtttgaagagagtaatcgatacatcttaggaatgagagagcgagactcggattccactgccgcgaaaaccgccgttcaaggctacgattatgaccggaattgtttggatccacgactgagtaagacgaattcgttggaggaaagatggaggagaaagagaaacaaaattacctgcgaatgcgacggaggttattgtgcggtgcgtcgaggagacgaactcgtttgcgggattgaaatatggcgcatcgagaacttcaaacctgtcactgttccacaagagtctcatgggaaatttttcaccggggattcctatatagtcttaaagaccacagcgtcaagaagcggttctttgcatcatgatattcactactggctcggtaaagattccagccaggatgaagcaggtgctgtagccgtcatgactgttgaattagattcagcattaggtggacgtgctgttcagtaccgagaagtacagggtcacgaaaccgagaagtttctttcctacttcaaaccttgcataatacctcaagaaggtggagttgcttcagggttcaaccatgtaaagcccgaggagcatcagacgcgtctgtatatctgcaaaggcaaacatgtcgtccgtgttaaagaggttccgtttgttcgatcgactctcaaccacgaagacgtttttattcttgatacagagtctaaaatttttcaattcagtggttccaagtcgagtattcaagaaagagcaaaagctcttgaggttgttcagtacattaaagacacttaccatgatggaaagtgcgatatcgcagctgttgaggatgggaggatgatggctgatgctgaagctggagagttttggggcttgtttggtgggtttgctccgcttcctaagaaaccagcagtcaatgatgacgaaaccgctgcatctgatggtatcaaacttttcagtgtcgagaagggacagacagatgccgtagaggctgagtgtttgacgaaagagcttctggacactaacaaatgttatattctcgattgcggtcttgaattgttcgtttggaagggacgaagtacttcaatcgaccaaagaaagagcgcaactgaagctgcagaagaatttttccgttcgtctgaaccgccaaaatcaaacctggtcagtgtgatggaagggtatgaaacagtgatgttccgatctaagtttgattcatggccggcttcaagtaccatagctgagccccaacaaggcagaggcaaagtcgcagctcttttgcagcggcaaggagttaacgttcaaggcctggttaagacttcttcttcttcttctaaagacgaaccgaagccatacattgatggtacaggaaatctccaggtctggcgaatcaattgtgaagaaaagatccttctcgaagcagcagagcaatcaaagttctatagcggggattgttatatactccagtactcatacccaggagaagacagagaggaacatctagtgggtacttggtttggcaagcaaagcgttgaggaagacagagcatctgctatttctttggcaaacaagatggttgaatccatgaagtttgtgccggctcaggctcgcattaatgagggaaaagagccaattcagttttttgtgatcatgcaaagcttcatcacatttaagggtggtgtaagtgatgctttcaaaaagtacatagctgagaacgacatccctgatactacttacgaagcagaaggtgttgcactgtttcgggttcaaggttctggacccgagaacatgcaagccatacagatagaagcggcttccgcaggactaaattcttcgcactgttatatattacacggtgattctactgttttcacttggtgtggcaatcttacttcctcggaagatcaagaacttatggaaagaatgttggatttgattaagccaaatgaacccactaaggcacaaaaggaaggctcagagtctgaacagttttgggaattattaggaggcaaatcagaatatccgagccaaaagatcaaaagggatggagagagtgatcctcatctcttttcttgcacatatacaaacgaaagtctgaaggctacagagatcttcaacttcactcaagatgatttgatgactgaagatatcttcatacttgattgtcacactgaggtctttgtctgggtgggacaacaagttgacccaaagaagaaacctcaagctttggacattggagagaactttcttaagcatgatttcctcctagagaatctagcaagtgaaacaccgatatacattgtaacagagggaaacgaacctccatttttcactcggttcttcacctgggactcttctaaatctggaatgcatggagactctttccagagaaagcttgcgatcctgacaaataaaggaaagccgcttctagataaacctaaaaggagagtccctgcatacagtagcaggtccaccgttccagacaaatcgcagcctcggtccagaagtatgacttttagtccagacagggcccgcgtgaggggacggtctccagctttcaacgcacttgcagcaaactttgagaaactaaatataagaaaccaatcaactccaccacctatggttagtccaatggtccggaagctttacccgaaatctcatgccccagacctctcgaagatagctcctaaatccgctatagctgcccgtacagcgctttttgaaaaacctactcctacttctcaagaaccacctactagccccagttcttcagaagctacaaaccaagcagaagcaccaaaatcgacatcagagacaaacgaggaagaagcaatgagcagcatcaatgaagactcaaaagaagaagaagcagaagaagagagcagcctccctactttcccatatgaacgccttaaaaccgactcagaggatcctgtttcagatgtcgacctcactagaagagaggcatacttgacttcagtagagttcaaggagaagtttgagatgacaaagaatgagttctacaaactgcctaaatggaaacaaaacaagctcaaaatgtctgtcaatctcttctaa

SEQ ID NO: 78689 - protein, 1019 aa, Arabidopsis thaliana
  peptide (1)..(1019): Ceres Seq. ID no. 12644063
  misc_feature (85)..(168): Pfam Name: Gelsolin repeat Pfam Description: Gelsolin repeat
  misc_feature (77)..(1019): Homolog of NCBI NO: 25091523 NR Description: Villin 3 >gi|11358922|pir||T50668 villin 3 - Arabidopsis thaliana >gi|3415117|gb|AAC31607.1| villin 3
  misc_feature (77)..(1019): Homolog of NCBI NO: 18410709 NR Description: villin 3 fragment; protein id: At3g57410.1,
  misc_feature (77)..(1019): Homolog of NCBI NO: 18405794 NR Description: putative villin 2; protein id: At2g41740.1, by cDNA: gi_19310557, supported by cDNA: gi_3415114 [Arabidopsis >gi|25091521|sp|O81644|VIL2_ARATH Villin 2
  misc_feature (77)..(1019): Homolog of NCBI NO: 11358919 NR Description: villin 2 [imported] - Arabidopsis thaliana
  misc_feature (77)..(1019): Homolog of NCBI NO: 11358975 NR Description: actin bundling protein ABP135 [imported] - lily >gi|5880464|gb|AAD54660.1|AF088901_1 actin bundling protein
  misc_feature (77)..(966): Homolog of NCBI NO: 25091518 NR Description: Villin 1 >gi|11358918|pir||T50671 villin 1 - Arabidopsis thaliana >gi|3415113|gb|AAC31605.1| villin 1
  misc_feature (929)..(1019): Homolog of NCBI NO: 25091518 NR Description: Villin 1 >gi|11358918|pir||T50671 villin 1 - Arabidopsis thaliana >gi|3415113|gb|AAC31605.1| villin 1
  misc_feature (77)..(966): Homolog of NCBI NO: 18402176 NR Description: putative villin; protein id: At2g29890.1, by cDNA: gi_3415112 [Arabidopsis thaliana]
  misc_feature (929)..(1019): Homolog of NCBI NO: 18402176 NR Description: putative villin; protein id: At2g29890.1, by cDNA: gi_3415112 [Arabidopsis thaliana]
  misc_feature (77)..(583): Homolog of NCBI NO: 4938492 NR Description: putative villin, fragment [Arabidopsis thaliana]
MFEESNRYILGMRERDSDSTAAKTAVQGYDYDRNCLDPRLSKTNSLEERWRRKRNKITCECDGGYCAVRRGDELVCGIEIWRIENFKPVTVPQESHGKFFTGDSYIVLKTTASRSGSLHHDIHYWLGKDSSQDEAGAVAVMTVELDSALGGRAVQYREVQGHETEKFLSYFKPCIIPQEGGVASGFNHVKPEEHQTRLYICKGKHVVRVKEVPFVRSTLNHEDVFILDTESKIFQFSGSKSSIQERAKALEVVQYIKDTYHDGKCDIAAVEDGRMMADAEAGEFWGLFGGFAPLPKKPAVNDDETAASDGIKLFSVEKGQTDAVEAECLTKELLDTNKCYILDCGLELFVWKGRSTSIDQRKSATEAAEEFFRSSEPPKSNLVSVMEGYETVMFRSKFDSWPASSTIAEPQQGRGKVAALLQRQGVNVQGLVKTSSSSSKDEPKPYIDGTGNLQVWRINCEEKILLEAAEQSKFYSGDCYILQYSYPGEDREEHLVGTWFGKQSVEEDRASAISLANKMVESMKFVPAQARINEGKEPIQFFVIMQSFITFKGGVSDAFKKYIAENDIPDTTYEAEGVALFRVQGSGPENMQAIQIEAASAGLNSSHCYILHGDSTVFTWCGNLTSSEDQELMERMLDLIKPNEPTKAQKEGSESEQFWELLGGKSEYPSQKIKRDGESDPHLFSCTYTNESLKATEIFNFTQDDLMTEDIFILDCHTEVFVWVGQQVDPKKKPQALDIGENFLKHDFLLENLASETPIYIVTEGNEPPFFTRFFTWDSSKSGMHGDSFQRKLAILTNKGKPLLDKPKRRVPAYSSRSTVPDKSQPRSRSMTFSPDRARVRGRSPAFNALAANFEKLNIRNQSTPPPMVSPMVRKLYPKSHAPDLSKIAPKSAIAARTALFEKPTPTSQEPPTSPSSSEATNQAEAPKSTSETNEEEAMSSINEDSKEEEAEEESSLPTFPYERLKTDSEDPVSDVDLTRREAYLTSVEFKEKFEMTKNEFYKLPKWKQNKLKMSVNLF

SEQ ID NO: 78690 - protein, 1008 aa, Arabidopsis thaliana
  peptide (1)..(1008): Ceres Seq. ID no. 12644064
  misc_feature (74)..(157): Pfam Name: Gelsolin repeat Pfam Description: Gelsolin repeat
  misc_feature (66)..(1008): Homolog of NCBI NO: 25091523 NR Description: Villin 3 >gi|11358922|pir||T50668 villin 3 - Arabidopsis thaliana >gi|3415117|gb|AAC31607.1| villin 3
  misc_feature (66)..(1008): Homolog of NCBI NO: 18410709 NR Description: villin 3 fragment; protein id: At3g57410.1,
  misc_feature (66)..(1008): Homolog of NCBI NO: 18405794 NR Description: putative villin 2; protein id: At2g41740.1, by cDNA: gi_19310557, supported by cDNA: gi_3415114 [Arabidopsis >gi|25091521|sp|O81644|VIL2_ARATH Villin 2
  misc_feature (66)..(1008): Homolog of NCBI NO: 11358919 NR Description: villin 2 [imported] - Arabidopsis thaliana
  misc_feature (66)..(1008): Homolog of NCBI NO: 11358975 NR Description: actin bundling protein ABP135 [imported] - lily >gi|5880464|gb|AAD54660.1|AF088901_1 actin bundling protein
  misc_feature (66)..(955): Homolog of NCBI NO: 25091518 NR Description: Villin 1 >gi|11358918|pir||T50671 villin 1 - Arabidopsis thaliana >gi|3415113|gb|AAC31605.1| villin 1
  misc_feature (918)..(1008): Homolog of NCBI NO: 25091518 NR Description: Villin 1 >gi|11358918|pir||T50671 villin 1 - Arabidopsis thaliana >gi|3415113|gb|AAC31605.1| villin 1
  misc_feature (66)..(955): Homolog of NCBI NO: 18402176 NR Description: putative villin; protein id: At2g29890.1, by cDNA: gi_3415112 [Arabidopsis thaliana]
  misc_feature (918)..(1008): Homolog of NCBI NO: 18402176 NR Description: putative villin; protein id: At2g29890.1, by cDNA: gi_3415112 [Arabidopsis thaliana]
  misc_feature (66)..(572): Homolog of NCBI NO: 4938492 NR Description: putative villin, fragment [Arabidopsis thaliana]
MRERDSDSTAAKTAVQGYDYDRNCLDPRLSKTNSLEERWRRKRNKITCECDGGYCAVRRGDELVCGIEIWRIENFKPVTVPQESHGKFFTGDSYIVLKTTASRSGSLHHDIHYWLGKDSSQDEAGAVAVMTVELDSALGGRAVQYREVQGHETEKFLSYFKPCIIPQEGGVASGFNHVKPEEHQTRLYICKGKHVVRVKEVPFVRSTLNHEDVFILDTESKIFQFSGSKSSIQERAKALEVVQYIKDTYHDGKCDIAAVEDGRMMADAEAGEFWGLFGGFAPLPKKPAVNDDETAASDGIKLFSVEKGQTDAVEAECLTKELLDTNKCYILDCGLELFVWKGRSTSIDQRKSATEAAEEFFRSSEPPKSNLVSVMEGYETVMFRSKFDSWPASSTIAEPQQGRGKVAALLQRQGVNVQGLVKTSSSSSKDEPKPYIDGTGNLQVWRINCEEKILLEAAEQSKFYSGDCYILQYSYPGEDREEHLVGTWFGKQSVEEDRASAISLANKMVESMKFVPAQARINEGKEPIQFFVIMQSFITFKGGVSDAFKKYIAENDIPDTTYEAEGVALFRVQGSGPENMQAIQIEAASAGLNSSHCYILHGDSTVFTWCGNLTSSEDQELMERMLDLIKPNEPTKAQKEGSESEQFWELLGGKSEYPSQKIKRDGESDPHLFSCTYTNESLKATEIFNFTQDDLMTEDIFILDCHTEVFVWVGQQVDPKKKPQALDIGENFLKHDFLLENLASETPIYIVTEGNEPPFFTRFFTWDSSKSGMHGDSFQRKLAILTNKGKPLLDKPKRRVPAYSSRSTVPDKSQPRSRSMTFSPDRARVRGRSPAFNALAANFEKLNIRNQSTPPPMVSPMVRKLYPKSHAPDLSKIAPKSAIAARTALFEKPTPTSQEPPTSPSSSEATNQAEAPKSTSETNEEEAMSSINEDSKEEEAEEESSLPTFPYERLKTDSEDPVSDVDLTRREAYLTSVEFKEKFEMTKNEFYKLPKWKQNKLKMSVNLF

SEQ ID NO: 78691 - protein, 879 aa, Arabidopsis thaliana
  peptide (1)..(879): Ceres Seq. ID no. 12644065
  misc_feature (844)..(879): Pfam Name: Villin headpiece domain Pfam Description: Villin headpiece domain
  misc_feature (1)..(879): Homolog of NCBI NO: 25091523 NR Description: Villin 3 >gi|11358922|pir||T50668 villin 3 - Arabidopsis thaliana >gi|3415117|gb|AAC31607.1| villin 3
  misc_feature (1)..(879): Homolog of NCBI NO: 18410709 NR Description: villin 3 fragment; protein id: At3g57410.1,
  misc_feature (1)..(879): Homolog of NCBI NO: 18405794 NR Description: putative villin 2; protein id: At2g41740.1, by cDNA: gi_19310557, supported by cDNA: gi_3415114 [Arabidopsis >gi|25091521|sp|O81644|VIL2_ARATH Villin 2
  misc_feature (1)..(879): Homolog of NCBI NO: 11358919 NR Description: villin 2 [imported] - Arabidopsis thaliana
  misc_feature (1)..(879): Homolog of NCBI NO: 11358975 NR Description: actin bundling protein ABP135 [imported] - lily >gi|5880464|gb|AAD54660.1|AF088901_1 actin bundling protein
  misc_feature (1)..(826): Homolog of NCBI NO: 25091518 NR Description: Villin 1 >gi|11358918|pir||T50671 villin 1 - Arabidopsis thaliana >gi|3415113|gb|AAC31605.1| villin 1
  misc_feature (789)..(879): Homolog of NCBI NO: 25091518 NR Description: Villin 1 >gi|11358918|pir||T50671 villin 1 - Arabidopsis thaliana >gi|3415113|gb|AAC31605.1| villin 1
  misc_feature (1)..(826): Homolog of NCBI NO: 18402176 NR Description: putative villin; protein id: At2g29890.1, by cDNA: gi_3415112 [Arabidopsis thaliana]
  misc_feature (789)..(879): Homolog of NCBI NO: 18402176 NR Description: putative villin; protein id: At2g29890.1, by cDNA: gi_3415112 [Arabidopsis thaliana]
  misc_feature (1)..(443): Homolog of NCBI NO: 4938492 NR Description: putative villin, fragment [Arabidopsis thaliana]
MTVELDSALGGRAVQYREVQGHETEKFLSYFKPCIIPQEGGVASGFNHVKPEEHQTRLYICKGKHVVRVKEVPFVRSTLNHEDVFILDTESKIFQFSGSKSSIQERAKALEVVQYIKDTYHDGKCDIAAVEDGRMMADAEAGEFWGLFGGFAPLPKKPAVNDDETAASDGIKLFSVEKGQTDAVEAECLTKELLDTNKCYILDCGLELFVWKGRSTSIDQRKSATEAAEEFFRSSEPPKSNLVSVMEGYETVMFRSKFDSWPASSTIAEPQQGRGKVAALLQRQGVNVQGLVKTSSSSSKDEPKPYIDGTGNLQVWRINCEEKILLEAAEQSKFYSGDCYILQYSYPGEDREEHLVGTWFGKQSVEEDRASAISLANKMVESMKFVPAQARINEGKEPIQFFVIMQSFITFKGGVSDAFKKYIAENDIPDTTYEAEGVALFRVQGSGPENMQAIQIEAASAGLNSSHCYILHGDSTVFTWCGNLTSSEDQELMERMLDLIKPNEPTKAQKEGSESEQFWELLGGKSEYPSQKIKRDGESDPHLFSCTYTNESLKATEIFNFTQDDLMTEDIFILDCHTEVFVWVGQQVDPKKKPQALDIGENFLKHDFLLENLASETPIYIVTEGNEPPFFTRFFTWDSSKSGMHGDSFQRKLAILTNKGKPLLDKPKRRVPAYSSRSTVPDKSQPRSRSMTFSPDRARVRGRSPAFNALAANFEKLNIRNQSTPPPMVSPMVRKLYPKSHAPDLSKIAPKSAIAARTALFEKPTPTSQEPPTSPSSSEATNQAEAPKSTSETNEEEAMSSINEDSKEEEAEEESSLPTFPYERLKTDSEDPVSDVDLTRREAYLTSVEFKEKFEMTKNEFYKLPKWKQNKLKMSVNLF

SEQ ID NO: 78692 - DNA, 1062 bp, Arabidopsis thaliana
  misc_feature (1)..(1062): Ceres Seq. ID no. 12644166
  misc_feature: MA Experiment ID: 108433 Result: Up-regulated in Transcription
  misc_feature: MA Experiment 108433 PARAMETER Experiment Name: At_rhl_Mutant2_cDNA_P Parameter: Age (day) Value: 7
  misc_feature: MA Experiment 108433 PARAMETER Experiment Name: At_rhl_Mutant2_cDNA_P Parameter: Organism Value: A. thaliana
  misc_feature: MA Experiment 108433 PARAMETER Experiment Name: At_rhl_Mutant2_cDNA_P Parameter: Plant Line Value: rhl Mutant vs. wt landsburg
  misc_feature: MA Experiment 108433 PARAMETER Experiment Name: At_rhl_Mutant2_cDNA_P Parameter: Tissue Value: Roots
  misc_feature: MA Experiment ID: 108434 Result: Down-regulated in Transcription
  misc_feature: MA Experiment 108434 PARAMETER Experiment Name: At_Root_Tips_cDNA_P Parameter: Tissue Value: Root Tips
  misc_feature: MA Experiment ID: 108462 Result: Up-regulated in Transcription
  misc_feature: MA Experiment 108462 PARAMETER Experiment Name: At_Germinating_Seeds_cDNA_P Parameter: Age (day) Value: 2 vs. 0
  misc_feature: MA Experiment 108462 PARAMETER Experiment Name: At_Germinating_Seeds_cDNA_P Parameter: Tissue Value: Germinating Seeds
  misc_feature: MA Experiment ID: 108463 Result: Up-regulated in Transcription
  misc_feature: MA Experiment 108463 PARAMETER Experiment Name: At_Germinating_Seeds_cDNA_P Parameter: Age (day) Value: 3 vs. 0
  misc_feature: MA Experiment 108463 PARAMETER Experiment Name: At_Germinating_Seeds_cDNA_P Parameter: Tissue Value: Germinating Seeds
  misc_feature: MA Experiment ID: 108464 Result: Up-regulated in Transcription
  misc_feature: MA Experiment 108464 PARAMETER Experiment Name: At_Germinating_Seeds_cDNA_P Parameter: Age (day) Value: 4 vs. 0
  misc_feature: MA Experiment 108464 PARAMETER Experiment Name: At_Germinating_Seeds_cDNA_P Parameter: Tissue Value: Germinating Seeds
  misc_feature: MA Experiment ID: 108594 Result: Down-regulated in Transcription
  misc_feature: MA Experiment 108594 PARAMETER Experiment Name: At_Ler-rhl_Root_cDNA_P Parameter: Plant Line Value: null
  misc_feature: MA Experiment ID: 20000113 Result: Down-regulated in Transcription
  misc_feature: MA Experiment 20000113 PARAMETER Experiment Name: At_42deg_Heat_cDNA_P Parameter: Temperature (deg C) Value: 42 vs. 22
  misc_feature: MA Experiment 20000113 PARAMETER Experiment Name: At_42deg_Heat_cDNA_P Parameter: Timepoint (hr) Value: 8
  misc_feature: MA Experiment 20000113 PARAMETER Experiment Name: At_42deg_Heat_cDNA_P Parameter: Tissue Value: Aerial
  misc_feature: MA Experiment ID: 20000306 Result: Down-regulated in Transcription
  misc_feature: MA Experiment 20000306 PARAMETER Experiment Name: At_Germinating_Seeds_Sub_P Parameter: Age (hr) Value: 6 vs. 0
  misc_feature: MA Experiment 20000306 PARAMETER Experiment Name: At_Germinating_Seeds_Sub_P Parameter: Organism Value: A. thaliana
  misc_feature: MA Experiment 20000306 PARAMETER Experiment Name: At_Germinating_Seeds_Sub_P Parameter: Plant Line Value: WS
  misc_feature: MA Experiment 20000306 PARAMETER Experiment Name: At_Germinating_Seeds_Sub_P Parameter: Tissue Value: Germinating Seeds
  misc_feature: MA Experiment ID: 20000307 Result: Down-regulated in Transcription
  misc_feature: MA Experiment 20000307 PARAMETER Experiment Name: At_Germinating_Seeds_Sub_P Parameter: Age (hr) Value: 24 vs. 0
  misc_feature: MA Experiment 20000307 PARAMETER Experiment Name: At_Germinating_Seeds_Sub_P Parameter: Organism Value: A. thaliana
  misc_feature: MA Experiment 20000307 PARAMETER Experiment Name: At_Germinating_Seeds_Sub_P Parameter: Plant Line Value: WS
  misc_feature: MA Experiment 20000307 PARAMETER Experiment Name: At_Germinating_Seeds_Sub_P Parameter: Tissue Value: Germinating Seeds
  misc_feature: MA Experiment ID: 20000314 Result: Down-regulated in Transcription
  misc_feature: MA Experiment 20000314 PARAMETER Experiment Name: At_14day_Shoots-Roots_Sub_P Parameter: Age (day) Value: 14
  misc_feature: MA Experiment 20000314 PARAMETER Experiment Name: At_14day_Shoots-Roots_Sub_P Parameter: Organism Value: A. thaliana
  misc_feature: MA Experiment 20000314 PARAMETER Experiment Name: At_14day_Shoots-Roots_Sub_P Parameter: Plant Line Value: WS
  misc_feature: MA Experiment 20000314 PARAMETER Experiment Name: At_14day_Shoots-Roots_Sub_P Parameter: Tissue Value: Roots vs. Whole Plant
  misc_feature: MA Experiment ID: 20000315 Result: Down-regulated in Transcription
  misc_feature: MA Experiment 20000315 PARAMETER Experiment Name: At_14day_Shoots-Roots_Sub_P Parameter: Age (day) Value: 14
  misc_feature: MA Experiment 20000315 PARAMETER Experiment Name: At_14day_Shoots-Roots_Sub_P Parameter: Organism Value: A. thaliana
  misc_feature: MA Experiment 20000315 PARAMETER Experiment Name: At_14day_Shoots-Roots_Sub_P Parameter: Plant Line Value: WS
  misc_feature: MA Experiment 20000315 PARAMETER Experiment Name: At_14day_Shoots-Roots_Sub_P Parameter: Tissue Value: Shoots vs. Whole Plant
  misc_feature: MA Experiment ID: 20000346 Result: Up-regulated in Transcription
  misc_feature: MA Experiment 20000346 PARAMETER Experiment Name: At_2mM_SA_Sub_P Parameter: Age (day) Value: 14
  misc_feature: MA Experiment 20000346 PARAMETER Experiment Name: At_2mM_SA_Sub_P Parameter: Organism Value: A. thaliana
  misc_feature: MA Experiment 20000346 PARAMETER Experiment Name: At_2mM_SA_Sub_P Parameter: Plant Line Value: WS
  misc_feature: MA Experiment 20000346 PARAMETER Experiment Name: At_2mM_SA_Sub_P Parameter: Timepoint (hr) Value: 1
  misc_feature: MA Experiment 20000346 PARAMETER Experiment Name: At_2mM_SA_Sub_P Parameter: Tissue Value: Aerial
  misc_feature: MA Experiment 20000346 PARAMETER Experiment Name: At_2mM_SA_Sub_P Parameter: Treatment Value: 2mM SA vs. No Treatment
  misc_feature: MA Experiment ID: 20000347 Result: Up-regulated in Transcription
  misc_feature: MA Experiment 20000347 PARAMETER Experiment Name: At_2mM_SA_Sub_P Parameter: Age (day) Value: 14
  misc_feature: MA Experiment 20000347 PARAMETER Experiment Name: At_2mM_SA_Sub_P Parameter: Organism Value: A. thaliana
  misc_feature: MA Experiment 20000347 PARAMETER Experiment Name: At_2mM_SA_Sub_P Parameter: Plant Line Value: WS
  misc_feature: MA Experiment 20000347 PARAMETER Experiment Name: At_2mM_SA_Sub_P Parameter: Timepoint (hr) Value: 6
  misc_feature: MA Experiment 20000347 PARAMETER Experiment Name: At_2mM_SA_Sub_P Parameter: Tissue Value: Aerial
  misc_feature: MA Experiment 20000347 PARAMETER Experiment Name: At_2mM_SA_Sub_P Parameter: Treatment Value: 2mM SA vs. No Treatment
atggcaaacatcggcgtagtgacgacagcgactaacaaccaggtgatcttccgtaactacgtgaatggattccctaaagaatccgacctctacattgcagcaagcaccgttgacttacgtgtacctcccggatccatggcggttctagtgaagaatctctacttatcttgcgatcctcatagccgcactcgcatggggaagcctgatccctcgtctcctgcttccatggctcatgctttcactatcggcaagccaatctctgggtttggagtggctaaagcaatagattcagggcacccaaattacaaaacaggagatttactttggggaagagttggttgggaagagtatagtgttattactccaactccttcttcacatttcaagattcatcacaccgatgttccattatctttctacactggacttcttggtattccgggtctcactgcgtatattgggttttacgagatatgttctccgaaaaaaggagagactgtttttgtatcagctgcatctggcgcagtaggtcaactcgtgggacagtttgcgaagatggcgggatgctatgtcgttggaagcgctagcagtgaagagaaggttgatcttctcaagactaagtttgggtatgatgacgctttcaattataaggaagaaaaggatcttagtgctgccctaaagaggtgtttcccagaaggaatagacatatactttgagaacgtgggaggtaaaatgttagaggcagtgctcgaaaacatgaggacacatggccgaatcgcagcgtgtggaatgatatcacaatacaatctaaagaaaccagaagttttacataacacagccaccattgttcacaaacgcatccgtgttcaaggttttgctgctgtcgaattctttgataggtactccaagtttttggacttcatacttccacatgtaagagaagggaagttaacatatgttgaggatatatcccaaggacttgagaatggaccttctgctttgattggactcttccacggtaagaacgtcgggaaacaacttgtcgaagttgctcgcgtgtga

SEQ ID NO: 78693 - protein, 353 aa, Arabidopsis thaliana
  peptide (1)..(353): Ceres Seq. ID no. 12644167
  misc_feature (134)..(350): Pfam Name: Zinc-binding dehydrogenase Pfam Description: Zinc-binding dehydrogenase
  misc_feature (1)..(353): Homolog of NCBI NO: 15240812 NR Description: oxidoreductase-like protein; protein id:
  misc_feature (1)..(352): Homolog of NCBI NO: 15240806 NR Description: quinone oxidoreductase -like protein; protein id: supported by cDNA: 13314., supported by cDNA: gi_15912200 thaliana] >gi|9758494|dbj|BAB09040.1| allyl alcohol
  misc_feature (1)..(352): Homolog of NCBI NO: 21537356 NR Description: quinone oxidoreductase-like protein [Arabidopsis
  misc_feature (1)..(352): Homolog of NCBI NO: 21536967 NR Description: quinone oxidoreductase-like protein [Arabidopsis
  misc_feature (1)..(352): Homolog of NCBI NO: 15240810 NR Description: quinone oxidoreductase -like protein; protein id:
  misc_feature (9)..(352): Homolog of NCBI NO: 22326861 NR Description: quinone oxidoreductase - like protein; protein At5g17000.1, supported by cDNA: gi_16604343, supported by cDNA: [Arabidopsis thaliana] >gi|16604344|gb|AAL24178.1|
  misc_feature (9)..(352): Homolog of NCBI NO: 17529140 NR Description: putative quinone oxidoreductase [Arabidopsis
  misc_feature (9)..(352): Homolog of NCBI NO: 15237888 NR Description: quinone oxidoreductase -like protein; protein id:
  misc_feature (1)..(352): Homolog of NCBI NO: 21593645 NR Description: allyl alcohol dehydrogenase, putative
  misc_feature (11)..(352): Homolog of NCBI NO: 15237890 NR Description: quinone oxidoreductase - like protein; protein At5g16990.1, supported by cDNA: gi_17529037, supported by cDNA:
MANIGVVTTATNNQVIFRNYVNGFPKESDLYIAASTVDLRVPPGSMAVLVKNLYLSCDPHSRTRMGKPDPSSPASMAHAFTIGKPISGFGVAKAIDSGHPNYKTGDLLWGRVGWEEYSVITPTPSSHFKIHHTDVPLSFYTGLLGIPGLTAYIGFYEICSPKKGETVFVSAASGAVGQLVGQFAKMAGCYVVGSASSEEKVDLLKTKFGYDDAFNYKEEKDLSAALKRCFPEGIDIYFENVGGKMLEAVLENMRTHGRIAACGMISQYNLKKPEVLHNTATIVHKRIRVQGFAAVEFFDRYSKFLDFILPHVREGKLTYVEDISQGLENGPSALIGLFHGKNVGKQLVEVARV

SEQ ID NO: 78694 - protein, 308 aa, Arabidopsis thaliana
  peptide (1)..(308): Ceres Seq. ID no. 12644168
  misc_feature (89)..(305): Pfam Name: Zinc-binding dehydrogenase Pfam Description: Zinc-binding dehydrogenase
  misc_feature (1)..(308): Homolog of NCBI NO: 15240812 NR Description: oxidoreductase-like protein; protein id:
  misc_feature (1)..(307): Homolog of NCBI NO: 15240806 NR Description: quinone oxidoreductase -like protein; protein id: supported by cDNA: 13314., supported by cDNA: gi_15912200 thaliana] >gi|9758494|dbj|BAB09040.1| allyl alcohol
  misc_feature (1)..(307): Homolog of NCBI NO: 21537356 NR Description: quinone oxidoreductase-like protein [Arabidopsis
  misc_feature (1)..(307): Homolog of NCBI NO: 21536967 NR Description: quinone oxidoreductase-like protein [Arabidopsis
  misc_feature (1)..(307): Homolog of NCBI NO: 15240810 NR Description: quinone oxidoreductase -like protein; protein id:
  misc_feature (1)..(307): Homolog of NCBI NO: 22326861 NR Description: quinone oxidoreductase - like protein; protein At5g17000.1, supported by cDNA: gi_16604343, supported by cDNA: [Arabidopsis thaliana] >gi|16604344|gb|AAL24178.1|
  misc_feature (1)..(307): Homolog of NCBI NO: 17529140 NR Description: putative quinone oxidoreductase [Arabidopsis
  misc_feature (1)..(307): Homolog of NCBI NO: 15237888 NR Description: quinone oxidoreductase -like protein; protein id:
  misc_feature (1)..(307): Homolog of NCBI NO: 21593645 NR Description: allyl alcohol dehydrogenase, putative
  misc_feature (1)..(307): Homolog of NCBI NO: 15237890 NR Description: quinone oxidoreductase - like protein; protein At5g16990.1, supported by cDNA: gi_17529037, supported by cDNA:
MAVLVKNLYLSCDPHSRTRMGKPDPSSPASMAHAFTIGKPISGFGVAKAIDSGHPNYKTGDLLWGRVGWEEYSVITPTPSSHFKIHHTDVPLSFYTGLLGIPGLTAYIGFYEICSPKKGETVFVSAASGAVGQLVGQFAKMAGCYVVGSASSEEKVDLLKTKFGYDDAFNYKEEKDLSAALKRCFPEGIDIYFENVGGKMLEAVLENMRTHGRIAACGMISQYNLKKPEVLHNTATIVHKRIRVQGFAAVEFFDRYSKFLDFILPHVREGKLTYVEDISQGLENGPSALIGLFHGKNVGKQLVEVARV

SEQ ID NO: 78695 - protein, 289 aa, Arabidopsis thaliana
  peptide (1)..(289): Ceres Seq. ID no. 12644169
  misc_feature (70)..(286): Pfam Name: Zinc-binding dehydrogenase Pfam Description: Zinc-binding dehydrogenase
  misc_feature (1)..(289): Homolog of NCBI NO: 15240812 NR Description: oxidoreductase-like protein; protein id:
  misc_feature (1)..(288): Homolog of NCBI NO: 15240806 NR Description: quinone oxidoreductase -like protein; protein id: supported by cDNA: 13314., supported by cDNA: gi_15912200 thaliana] >gi|9758494|dbj|BAB09040.1| allyl alcohol
  misc_feature (1)..(288): Homolog of NCBI NO: 21537356 NR Description: quinone oxidoreductase-like protein [Arabidopsis
  misc_feature (1)..(288): Homolog of NCBI NO: 21536967 NR Description: quinone oxidoreductase-like protein [Arabidopsis
  misc_feature (1)..(288): Homolog of NCBI NO: 15240810 NR Description: quinone oxidoreductase -like protein; protein id:
  misc_feature (1)..(288): Homolog of NCBI NO: 22326861 NR Description: quinone oxidoreductase - like protein; protein At5g17000.1, supported by cDNA: gi_16604343, supported by cDNA: [Arabidopsis thaliana] >gi|16604344|gb|AAL24178.1|
  misc_feature (1)..(288): Homolog of NCBI NO: 17529140 NR Description: putative quinone oxidoreductase [Arabidopsis
  misc_feature (1)..(288): Homolog of NCBI NO: 15237888 NR Description: quinone oxidoreductase -like protein; protein id:
  misc_feature (1)..(288): Homolog of NCBI NO: 21593645 NR Description: allyl alcohol dehydrogenase, putative
  misc_feature (1)..(288): Homolog of NCBI NO: 15237890 NR Description: quinone oxidoreductase - like protein; protein At5g16990.1, supported by cDNA: gi_17529037, supported by cDNA:
MGKPDPSSPASMAHAFTIGKPISGFGVAKAIDSGHPNYKTGDLLWGRVGWEEYSVITPTPSSHFKIHHTDVPLSFYTGLLGIPGLTAYIGFYEICSPKKGETVFVSAASGAVGQLVGQFAKMAGCYVVGSASSEEKVDLLKTKFGYDDAFNYKEEKDLSAALKRCFPEGIDIYFENVGGKMLEAVLENMRTHGRIAACGMISQYNLKKPEVLHNTATIVHKRIRVQGFAAVEFFDRYSKFLDFILPHVREGKLTYVEDISQGLENGPSALIGLFHGKNVGKQLVEVARV

SEQ ID NO: 78696 - DNA, 1893 bp, Arabidopsis thaliana
  misc_feature (1)..(1893): Ceres Seq. ID no. 12644214
  misc_feature: MA Experiment ID: 20000307 Result: Down-regulated in Transcription
  misc_feature: MA Experiment 20000307 PARAMETER Experiment Name: At_Germinating_Seeds_Sub_P Parameter: Age (hr) Value: 24 vs. 0
  misc_feature: MA Experiment 20000307 PARAMETER Experiment Name: At_Germinating_Seeds_Sub_P Parameter: Organism Value: A. thaliana
  misc_feature: MA Experiment 20000307 PARAMETER Experiment Name: At_Germinating_Seeds_Sub_P Parameter: Plant Line Value: WS
  misc_feature: MA Experiment 20000307 PARAMETER Experiment Name: At_Germinating_Seeds_Sub_P Parameter: Tissue Value: Germinating Seeds
  misc_feature: MA Experiment ID: 20000315 Result: Down-regulated in Transcription
  misc_feature: MA Experiment 20000315 PARAMETER Experiment Name: At_14day_Shoots-Roots_Sub_P Parameter: Age (day) Value: 14
  misc_feature: MA Experiment 20000315 PARAMETER Experiment Name: At_14day_Shoots-Roots_Sub_P Parameter: Organism Value: A. thaliana
  misc_feature: MA Experiment 20000315 PARAMETER Experiment Name: At_14day_Shoots-Roots_Sub_P Parameter: Plant Line Value: WS
  misc_feature: MA Experiment 20000315 PARAMETER Experiment Name: At_14day_Shoots-Roots_Sub_P Parameter: Tissue Value: Shoots vs. Whole Plant
  misc_feature: MA Experiment ID: 20000328 Result: Down-regulated in Transcription
  misc_feature: MA Experiment 20000328 PARAMETER Experiment Name: At_42deg_Heat_Sub_P Parameter: Age (day) Value: 14
  misc_feature: MA Experiment 20000328 PARAMETER Experiment Name: At_42deg_Heat_Sub_P Parameter: Organism Value: A. thaliana
  misc_feature: MA Experiment 20000328 PARAMETER Experiment Name: At_42deg_Heat_Sub_P Parameter: Plant Line Value: WS
  misc_feature: MA Experiment 20000328 PARAMETER Experiment Name: At_42deg_Heat_Sub_P Parameter: Temperature (deg C) Value: 42 vs. 22
  misc_feature: MA Experiment 20000328 PARAMETER Experiment Name: At_42deg_Heat_Sub_P Parameter: Timepoint (hr) Value: 6
  misc_feature: MA Experiment 20000328 PARAMETER Experiment Name: At_42deg_Heat_Sub_P Parameter: Tissue Value: Aerial
  misc_feature: MA Experiment ID: 20000355 Result: Down-regulated in Transcription
  misc_feature: MA Experiment 20000355 PARAMETER Experiment Name: At_Siliques_Sub_P Parameter: Age (day) Value: 21
  misc_feature: MA Experiment 20000355 PARAMETER Experiment Name: At_Siliques_Sub_P Parameter: Organism Value: A. thaliana
  misc_feature: MA Experiment 20000355 PARAMETER Experiment Name: At_Siliques_Sub_P Parameter: Plant Line Value: WS
  misc_feature: MA Experiment 20000355 PARAMETER Experiment Name: At_Siliques_Sub_P Parameter: Tissue Value: Less Than 5mm Siliques vs. Whole Plant
  misc_feature: MA Experiment ID: 20000440 Result: Down-regulated in Transcription
  misc_feature: MA Experiment 20000440 PARAMETER Experiment Name: At_Closed-Flower__Sub_P Parameter: Tissue Value: Closed Flower vs. Whole Plant
atgatcaatctttctctgtctctgacaaaatcttggtccaatacaatcatatggatgctctttgtgatcccctcttgtgttttctcagttgttgatgagcaacacaaacactgcagtcctaggtttaaatgcggaaaccagtcagaactctattatcccttttggatatctgagagaaaagagtgcggtcacccagatttcgaggtcaactgcagcggagattttgcagagcttactgtatccacagttaagttccaaatccttgagatgaactatgagtttgaaatcataagactagccagaatggattatcgcaacaatctttgtcctcagcatcctgcgaatgcatctatcaaccatgatgtccttccattttctcccgacaccaagctgtcaactttttatcacgactgccaatcaacggtagatgtacatcccaatgattacattaaacagcttaactgtgaggattatatcggtgggaaaagttactttgtctcgtcctcttcacattctggggatagagctaccttagctgcattgagtgcatcgtgcgaaggggtcgatattccagtctctcggtcagccttgaagacagtagagaaaaatcagagtctggaggctatgaagaaggctattgatgagggtttcgaacttggcttcaacaatgaatgttcccaatgcgcaatatcagggggcgcttgtggctttgatcagagattgaaagcatttgtttgctattgtgcggatgagcctcacgagagcatcggattcgcttctggattcttgggtgccacacttatcggcggatgtttactctgtatcttcatccggagaaggaagaaactagcaacacaatacacaaacaaagtcttcagctacgaagaactcgaggaagccactgaaaatttctccaaagaactcggagatggaggcttcggtactgtctactacggtacactaaaagacggacgagcagtagctgtgaaacgactcttcgaaagatcactaaaacgcgtggaacaattcaagaacgaaatcgatatcttgaaatccctaaaacacccgaacctagtgattctatacggatgcacaacaagacatagcagagagttactcctagtatacgaatacatctccaatggcacactcgctgaacatctccatggaaaccaagcacaatctcgccctatttgttggcctgctcgactccaaatagccatcgaaaccgctagcgccttgtcctatctccacgcctcagggatcatacacagagacgttaagactactaacattctcttagatagcaattaccaagtcaaagtagctgatttcggactctcacggttgtttccgatggatcaaactcacatctccactgctccacaaggtactccaggatatgtagatcctgagtattaccaatgttaccgattaaacgagaagagtgacgtttacagcttcggagtcgtactctccgaactaatctcatcgaaagaagctgttgatatcaccagacaccgccacgatattaacctcgccaacatggcgatttcgaaaatccaaaacgacgccgtacatgagctcgcggatctatcactcggattcgcgagagatccttcggtgaagaagatgatgtcgtcggttgctgaattagcattccgatgtttgcaacaggagagagacgtacggccatcgatggatgagatcgttgaggttttgagagtgattcagaaggatgggataagtgattcgaaggatgtggttgtggagattgatgtgaacggtggtgatgatgttggattgttgaagcatggtgttcctccgccgttatcgccggagactgataaaacgacggcgagtagttcgaatactacggcgagttcgttttga

SEQ ID NO: 78697 - protein, 630 aa, Arabidopsis thaliana
  peptide (1)..(630): Ceres Seq. ID no. 12644215
  misc_feature (14)..(237): Homolog of NCBI NO: 10177797 NR Description: contains similarity to protein
  misc_feature (290)..(628): Homolog of NCBI NO: 25404646 NR Description: probable wall-associated kinase T4O24.5
  misc_feature (33)..(290): Homolog of NCBI NO: 25404646 NR Description: probable wall-associated kinase T4O24.5
  misc_feature (290)..(628): Homolog of NCBI NO: 12597754 NR Description: protein kinase, putative [Arabidopsis thaliana]
  misc_feature (33)..(290): Homolog of NCBI NO: 12597754 NR Description: protein kinase, putative [Arabidopsis thaliana]
  misc_feature (290)..(628): Homolog of NCBI NO: 30697422 NR Description: serine/threonine protein kinase family
  misc_feature (33)..(252): Homolog of NCBI NO: 30697422 NR Description: serine/threonine protein kinase family
  misc_feature (290)..(630): Homolog of NCBI NO: 22327431 NR Description: protein kinase - like protein; protein id: supported by cDNA: gi_18175790 [Arabidopsis thaliana] putative protein kinase [Arabidopsis thaliana]
  misc_feature (256)..(293): Homolog of NCBI NO: 22327431 NR Description: protein kinase - like protein; protein id: supported by cDNA: gi_18175790 [Arabidopsis thaliana] putative protein kinase [Arabidopsis thaliana]
  misc_feature (290)..(628): Homolog of NCBI NO: 24417464 NR Description: unknown [Arabidopsis thaliana]
MINLSLSLTKSWSNTIIWMLFVIPSCVFSVVDEQHKHCSPRFKCGNQSELYYPFWISERKECGHPDFEVNCSGDFAELTVSTVKFQILEMNYEFEIIRLARMDYRNNLCPQHPANASINHDVLPFSPDTKLSTFYHDCQSTVDVHPNDYIKQLNCEDYIGGKSYFVSSSSHSGDRATLAALSASCEGVDIPVSRSALKTVEKNQSLEAMKKAIDEGFELGFNNECSQCAISGGACGFDQRLKAFVCYCADEPHESIGFASGFLGATLIGGCLLCIFIRRRKKLATQYTNKVFSYEELEEATENFSKELGDGGFGTVYYGTLKDGRAVAVKRLFERSLKRVEQFKNEIDILKSLKHPNLVILYGCTTRHSRELLLVYEYISNGTLAEHLHGNQAQSRPICWPARLQIAIETASALSYLHASGIIHRDVKTTNILLDSNYQVKVADFGLSRLFPMDQTHISTAPQGTPGYVDPEYYQCYRLNEKSDVYSFGVVLSELISSKEAVDITRHRHDINLANMAISKIQNDAVHELADLSLGFARDPSVKKMMSSVAELAFRCLQQERDVRPSMDEIVEVLRVIQKDGISDSKDVVVEIDVNGGDDVGLLKHGVPPPLSPETDKTTASSSNTTASSF

SEQ ID NO: 78698 - protein, 612 aa, Arabidopsis thaliana
  peptide (1)..(612): Ceres Seq. ID no. 12644216
  misc_feature (1)..(219): Homolog of NCBI NO: 10177797 NR Description: contains similarity to protein
  misc_feature (272)..(610): Homolog of NCBI NO: 25404646 NR Description: probable wall-associated kinase T4O24.5
  misc_feature (15)..(272): Homolog of NCBI NO: 25404646 NR Description: probable wall-associated kinase T4O24.5
  misc_feature (272)..(610): Homolog of NCBI NO: 12597754 NR Description: protein kinase, putative [Arabidopsis thaliana]
  misc_feature (15)..(272): Homolog of NCBI NO: 12597754 NR Description: protein kinase, putative [Arabidopsis thaliana]
  misc_feature (272)..(610): Homolog of NCBI NO: 30697422 NR Description: serine/threonine protein kinase family
  misc_feature (15)..(234): Homolog of NCBI NO: 30697422 NR Description: serine/threonine protein kinase family
  misc_feature (272)..(612): Homolog of NCBI NO: 22327431 NR Description: protein kinase - like protein; protein id: supported by cDNA: gi_18175790 [Arabidopsis thaliana] putative protein kinase [Arabidopsis thaliana]
  misc_feature (238)..(275): Homolog of NCBI NO: 22327431 NR Description: protein kinase - like protein; protein id: supported by cDNA: gi_18175790 [Arabidopsis thaliana] putative protein kinase [Arabidopsis thaliana]
  misc_feature (272)..(610): Homolog of NCBI NO: 24417464 NR Description: unknown [Arabidopsis thaliana]
MLFVIPSCVFSVVDEQHKHCSPRFKCGNQSELYYPFWISERKECGHPDFEVNCSGDFAELTVSTVKFQILEMNYEFEIIRLARMDYRNNLCPQHPANASINHDVLPFSPDTKLSTFYHDCQSTVDVHPNDYIKQLNCEDYIGGKSYFVSSSSHSGDRATLAALSASCEGVDIPVSRSALKTVEKNQSLEAMKKAIDEGFELGFNNECSQCAISGGACGFDQRLKAFVCYCADEPHESIGFASGFLGATLIGGCLLCIFIRRRKKLATQYTNKVFSYEELEEATENFSKELGDGGFGTVYYGTLKDGRAVAVKRLFERSLKRVEQFKNEIDILKSLKHPNLVILYGCTTRHSRELLLVYEYISNGTLAEHLHGNQAQSRPICWPARLQIAIETASALSYLHASGIIHRDVKTTNILLDSNYQVKVADFGLSRLFPMDQTHISTAPQGTPGYVDPEYYQCYRLNEKSDVYSFGVVLSELISSKEAVDITRHRHDINLANMAISKIQNDAVHELADLSLGFARDPSVKKMMSSVAELAFRCLQQERDVRPSMDEIVEVLRVIQKDGISDSKDVVVEIDVNGGDDVGLLKHGVPPPLSPETDKTTASSSNTTASSF

SEQ ID NO: 78699 - protein, 541 aa, Arabidopsis thaliana
  peptide (1)..(541): Ceres Seq. ID no. 12644217
  misc_feature (1)..(148): Homolog of NCBI NO: 10177797 NR Description: contains similarity to protein
  misc_feature (201)..(539): Homolog of NCBI NO: 25404646 NR Description: probable wall-associated kinase T4O24.5
  misc_feature (1)..(201): Homolog of NCBI NO: 25404646 NR Description: probable wall-associated kinase T4O24.5
  misc_feature (201)..(539): Homolog of NCBI NO: 12597754 NR Description: protein kinase, putative [Arabidopsis thaliana]
  misc_feature (1)..(201): Homolog of NCBI NO: 12597754 NR Description: protein kinase, putative [Arabidopsis thaliana]
  misc_feature (201)..(539): Homolog of NCBI NO: 30697422 NR Description: serine/threonine protein kinase family
  misc_feature (1)..(163): Homolog of NCBI NO: 30697422 NR Description: serine/threonine protein kinase family
  misc_feature (201)..(541): Homolog of NCBI NO: 22327431 NR Description: protein kinase - like protein; protein id: supported by cDNA: gi_18175790 [Arabidopsis thaliana] putative protein kinase [Arabidopsis thaliana]
  misc_feature (167)..(204): Homolog of NCBI NO: 22327431 NR Description: protein kinase - like protein; protein id: supported by cDNA: gi_18175790 [Arabidopsis thaliana] putative protein kinase [Arabidopsis thaliana]
  misc_feature (201)..(539): Homolog of NCBI NO: 24417464 NR Description: unknown [Arabidopsis thaliana]
MNYEFEIIRLARMDYRNNLCPQHPANASINHDVLPFSPDTKLSTFYHDCQSTVDVHPNDYIKQLNCEDYIGGKSYFVSSSSHSGDRATLAALSASCEGVDIPVSRSALKTVEKNQSLEAMKKAIDEGFELGFNNECSQCAISGGACGFDQRLKAFVCYCADEPHESIGFASGFLGATLIGGCLLCIFIRRRKKLATQYTNKVFSYEELEEATENFSKELGDGGFGTVYYGTLKDGRAVAVKRLFERSLKRVEQFKNEIDILKSLKHPNLVILYGCTTRHSRELLLVYEYISNGTLAEHLHGNQAQSRPICWPARLQIAIETASALSYLHASGIIHRDVKTTNILLDSNYQVKVADFGLSRLFPMDQTHISTAPQGTPGYVDPEYYQCYRLNEKSDVYSFGVVLSELISSKEAVDITRHRHDINLANMAISKIQNDAVHELADLSLGFARDPSVKKMMSSVAELAFRCLQQERDVRPSMDEIVEVLRVIQKDGISDSKDVVVEIDVNGGDDVGLLKHGVPPPLSPETDKTTASSSNTTASSF

SEQ ID NO: 78700 - DNA, 1857 bp, Arabidopsis thaliana
  misc_feature (1)..(1857): Ceres Seq. ID no. 12644226
  misc_feature: MA Experiment ID: 20000315 Result: Down-regulated in Transcription
  misc_feature: MA Experiment 20000315 PARAMETER Experiment Name: At_14day_Shoots-Roots_Sub_P Parameter: Age (day) Value: 14
  misc_feature: MA Experiment 20000315 PARAMETER Experiment Name: At_14day_Shoots-Roots_Sub_P Parameter: Organism Value: A. thaliana
  misc_feature: MA Experiment 20000315 PARAMETER Experiment Name: At_14day_Shoots-Roots_Sub_P Parameter: Plant Line Value: WS
  misc_feature: MA Experiment 20000315 PARAMETER Experiment Name: At_14day_Shoots-Roots_Sub_P Parameter: Tissue Value: Shoots vs. Whole Plant
  misc_feature: MA Experiment ID: 20000327 Result: Down-regulated in Transcription
  misc_feature: MA Experiment 20000327 PARAMETER Experiment Name: At_42deg_Heat_Sub_P Parameter: Age (day) Value: 14
  misc_feature: MA Experiment 20000327 PARAMETER Experiment Name: At_42deg_Heat_Sub_P Parameter: Organism Value: A. thaliana
  misc_feature: MA Experiment 20000327 PARAMETER Experiment Name: At_42deg_Heat_Sub_P Parameter: Plant Line Value: WS
  misc_feature: MA Experiment 20000327 PARAMETER Experiment Name: At_42deg_Heat_Sub_P Parameter: Temperature (deg C) Value: 42 vs. 22
  misc_feature: MA Experiment 20000327 PARAMETER Experiment Name: At_42deg_Heat_Sub_P Parameter: Timepoint (hr) Value: 1
  misc_feature: MA Experiment 20000327 PARAMETER Experiment Name: At_42deg_Heat_Sub_P Parameter: Tissue Value: Aerial
  misc_feature: MA Experiment ID: 20000347 Result: Up-regulated in Transcription
  misc_feature: MA Experiment 20000347 PARAMETER Experiment Name: At_2mM_SA_Sub_P Parameter: Age (day) Value: 14
  misc_feature: MA Experiment 20000347 PARAMETER Experiment Name: At_2mM_SA_Sub_P Parameter: Organism Value: A. thaliana
  misc_feature: MA Experiment 20000347 PARAMETER Experiment Name: At_2mM_SA_Sub_P Parameter: Plant Line Value: WS
  misc_feature: MA Experiment 20000347 PARAMETER Experiment Name: At_2mM_SA_Sub_P Parameter: Timepoint (hr) Value: 6
  misc_feature: MA Experiment 20000347 PARAMETER Experiment Name: At_2mM_SA_Sub_P Parameter: Tissue Value: Aerial
  misc_feature: MA Experiment 20000347 PARAMETER Experiment Name: At_2mM_SA_Sub_P Parameter: Treatment Value: 2mM SA vs. No Treatment
  misc_feature: MA Experiment ID: 20000349 Result: Up-regulated in Transcription
  misc_feature: MA Experiment 20000349 PARAMETER Experiment Name: At_100uM_ABA_Sub_P Parameter: Age (day) Value: 14
  misc_feature: MA Experiment 20000349 PARAMETER Experiment Name: At_100uM_ABA_Sub_P Parameter: Organism Value: A. thaliana
  misc_feature: MA Experiment 20000349 PARAMETER Experiment Name: At_100uM_ABA_Sub_P Parameter: Plant Line Value: WS
  misc_feature: MA Experiment 20000349 PARAMETER Experiment Name: At_100uM_ABA_Sub_P Parameter: Timepoint (hr) Value: 6
  misc_feature: MA Experiment 20000349 PARAMETER Experiment Name: At_100uM_ABA_Sub_P Parameter: Tissue Value: Aerial
  misc_feature: MA Experiment 20000349 PARAMETER Experiment Name: At_100uM_ABA_Sub_P Parameter: Treatment Value: 100uM ABA vs. No Treatment
  misc_feature: MA Experiment ID: 20000355 Result: Down-regulated in Transcription
  misc_feature: MA Experiment 20000355 PARAMETER Experiment Name: At_Siliques_Sub_P Parameter: Age (day) Value: 21
  misc_feature: MA Experiment 20000355 PARAMETER Experiment Name: At_Siliques_Sub_P Parameter: Organism Value: A. thaliana
  misc_feature: MA Experiment 20000355 PARAMETER Experiment Name: At_Siliques_Sub_P Parameter: Plant Line Value: WS
  misc_feature: MA Experiment 20000355 PARAMETER Experiment Name: At_Siliques_Sub_P Parameter: Tissue Value: Less Than 5mm Siliques vs. Whole Plant
  misc_feature: MA Experiment ID: 20000440 Result: Down-regulated in Transcription
  misc_feature: MA Experiment 20000440 PARAMETER Experiment Name: At_Closed-Flower__Sub_P Parameter: Tissue Value: Closed Flower vs. Whole Plant
atgggatctcaaacagctaggttctgtctgatcttgttattcttgttttattatcttccttgtgctctaagccaagatgatttatggggctgtggtactccgtttcggtgtggaaacatcacagctggttttcctttcttgggagggattcgcggtgaagtttgcggtcaccattctctgaaactaaactgcaacaaacactcaaacacaacctctcttatcttctcaggccacaactacactgtcctctatatagacaacaacaacaattccgtcactcttggactttcaagacaagatttctcaggtcctttctgctctgcttcattctcctccacacttttatcttcaggtctcttccagaatttaccatcttacaaaagcctcactgtgttctacgcttgtgaccctcgtcgccatttccttgggaatttcacatgtccagtgaaaggtcttggctctattattcaaaactctacatatggtatactttgtgatgggagtttcagtgttccagttcctacgagttttgtttcggaggaggaagttttggatttgacccatttagagagtgttcttagaaaaggatttgaagtgaagcttaatatagatgagataccttgtccactagaatgtttttcctctcgtgcaaattgcctctttcttgccggatcttgctgcaaatatcatgatcgtacaacgacctgcggtggtgatacaggagatttattacgtgagataatccctaacactcgctccatactgataacaattggacaagttgtagggttccatgtatttataattgtggtgatgattatagcattcttgttctggaggagaaaaaaagtaaatgatctgagaaagcagaacctcgaggcgcttgtaacctcgagacgatatagttatagacaaatcaagaaaattacaaaatcatttacagaagtagttggacgaggaggatttggaactgtatataaagggaatttacgcgatggtcgtaaagtagccgtgaagattttgaaggattcaaatggaaattgcgaagatttcatcaacgaagttgcaagcataagccaaacatctcatgttaacattgtttctctacttggtttttgctttgaaaaatccaaaagagcgattgtgtatgaatttctagagaatgggtctctagatcagtcttcgaatcttgatgtgagtacactttatggaatcgcgctaggcgtggctcggggaatagagtacttgcactttggctgcaaaaaaaggattgtgcattttgacattaaaccacagaatgtactattagatgaaaatctcaaacccaaagttgctgattttggcctcgctaagctttgtgagaagcaagaaagcatattgtcattgcttgacacgagaggaactataggatacattgctccagagttgttttcaagagtgtatgggaatgtatctcacaagtcggatgtgtacagctatggaatgttggttcttgagatgactggagcaaggaacaaagaaagagtccaaaatgctgattcgaacaatagctcagcttactttccagattggatctttaaggatcttgaaaatggagattacgtaaagcttcttgccgatggactaacccgagaggaagaagatattgcgaaaaagatgatcttggtgggtctatggtgtattcagttccgcccatcagaccgtccatcaatgaacaaagttgtagggatgatggaaggaaatttggattctcttgatccccctcctaagcctcttttgcatatgccaatgcaaaataataatgcagaatcatctcagccatcagaggaggacagctcaatttactcagaagtatga

SEQ ID NO: 78701 - protein, 618 aa, Arabidopsis thaliana
  peptide (1)..(618): Ceres Seq. ID no. 12644227
  misc_feature (315)..(618): Homolog of NCBI NO: 15240863 NR Description: receptor serine/threonine protein kinase -like;
  misc_feature (1)..(246): Homolog of NCBI NO: 15240863 NR Description: receptor serine/threonine protein kinase -like;
  misc_feature (243)..(263): Homolog of NCBI NO: 15240863 NR Description: receptor serine/threonine protein kinase -like;
  misc_feature (78)..(618): Homolog of NCBI NO: 10177799 NR Description: receptor serine/threonine kinase-like protein
  misc_feature (292)..(618): Homolog of NCBI NO: 10177800 NR Description: receptor protein kinase-like protein [Arabidopsis
  misc_feature (1)..(263): Homolog of NCBI NO: 10177800 NR Description: receptor protein kinase-like protein [Arabidopsis
  misc_feature (285)..(618): Homolog of NCBI NO: 15240864 NR Description: receptor serine/threonine protein kinase - like;
  misc_feature (1)..(309): Homolog of NCBI NO: 15240864 NR Description: receptor serine/threonine protein kinase - like;
  misc_feature (9)..(618): Homolog of NCBI NO: 15219783 NR Description: receptor serine/threonine kinase PR5K, putative; id: At1g66920.1 [Arabidopsis thaliana] >gi|25404651|pir||A96693
  misc_feature (4)..(618): Homolog of NCBI NO: 15240865 NR Description: receptor serine/threonine protein kinase - like; id: At5g38260.1 [Arabidopsis thaliana]
MGSQTARFCLILLFLFYYLPCALSQDDLWGCGTPFRCGNITAGFPFLGGIRGEVCGHHSLKLNCNKHSNTTSLIFSGHNYTVLYIDNNNNSVTLGLSRQDFSGPFCSASFSSTLLSSGLFQNLPSYKSLTVFYACDPRRHFLGNFTCPVKGLGSIIQNSTYGILCDGSFSVPVPTSFVSEEEVLDLTHLESVLRKGFEVKLNIDEIPCPLECFSSRANCLFLAGSCCKYHDRTTTCGGDTGDLLREIIPNTRSILITIGQVVGFHVFIIVVMIIAFLFWRRKKVNDLRKQNLEALVTSRRYSYRQIKKITKSFTEVVGRGGFGTVYKGNLRDGRKVAVKILKDSNGNCEDFINEVASISQTSHVNIVSLLGFCFEKSKRAIVYEFLENGSLDQSSNLDVSTLYGIALGVARGIEYLHFGCKKRIVHFDIKPQNVLLDENLKPKVADFGLAKLCEKQESILSLLDTRGTIGYIAPELFSRVYGNVSHKSDVYSYGMLVLEMTGARNKERVQNADSNNSSAYFPDWIFKDLENGDYVKLLADGLTREEEDIAKKMILVGLWCIQFRPSDRPSMNKVVGMMEGNLDSLDPPPKPLLHMPMQNNNAESSQPSEEDSSIYSEV

SEQ ID NO: 78702 - protein, 347 aa, Arabidopsis thaliana
  peptide (1)..(347): Ceres Seq. ID no. 12644228
  misc_feature (44)..(347): Homolog of NCBI NO: 15240863 NR Description: receptor serine/threonine protein kinase -like;
  misc_feature (1)..(347): Homolog of NCBI NO: 10177799 NR Description: receptor serine/threonine kinase-like protein
  misc_feature (21)..(347): Homolog of NCBI NO: 10177800 NR Description: receptor protein kinase-like protein [Arabidopsis
  misc_feature (14)..(347): Homolog of NCBI NO: 15240864 NR Description: receptor serine/threonine protein kinase - like;
  misc_feature (1)..(38): Homolog of NCBI NO: 15240864 NR Description: receptor serine/threonine protein kinase - like;
  misc_feature (1)..(347): Homolog of NCBI NO: 15219783 NR Description: receptor serine/threonine kinase PR5K, putative; id: At1g66920.1 [Arabidopsis thaliana] >gi|25404651|pir||A96693
  misc_feature (1)..(347): Homolog of NCBI NO: 15240865 NR Description: receptor serine/threonine protein kinase - like; id: At5g38260.1 [Arabidopsis thaliana]
  misc_feature (1)..(342): Homolog of NCBI NO: 15219806 NR Description: receptor-like kinase, putative; protein id:
  misc_feature (1)..(347): Homolog of NCBI NO: 15219785 NR Description: receptor-like kinase, putative; protein id:
  misc_feature (1)..(347): Homolog of NCBI NO: 9755446 NR Description: Putative protein kinase [Arabidopsis thaliana]
MIIAFLFWRRKKVNDLRKQNLEALVTSRRYSYRQIKKITKSFTEVVGRGGFGTVYKGNLRDGRKVAVKILKDSNGNCEDFINEVASISQTSHVNIVSLLGFCFEKSKRAIVYEFLENGSLDQSSNLDVSTLYGIALGVARGIEYLHFGCKKRIVHFDIKPQNVLLDENLKPKVADFGLAKLCEKQESILSLLDTRGTIGYIAPELFSRVYGNVSHKSDVYSYGMLVLEMTGARNKERVQNADSNNSSAYFPDWIFKDLENGDYVKLLADGLTREEEDIAKKMILVGLWCIQFRPSDRPSMNKVVGMMEGNLDSLDPPPKPLLHMPMQNNNAESSQPSEEDSSIYSEV

SEQ ID NO: 78703 - DNA, 1839 bp, Arabidopsis thaliana
  misc_feature (1)..(1839): Ceres Seq. ID no. 12644229
  misc_feature: MA Experiment ID: 20000315 Result: Down-regulated in Transcription
  misc_feature: MA Experiment 20000315 PARAMETER Experiment Name: At_14day_Shoots-Roots_Sub_P Parameter: Age (day) Value: 14
  misc_feature: MA Experiment 20000315 PARAMETER Experiment Name: At_14day_Shoots-Roots_Sub_P Parameter: Organism Value: A. thaliana
  misc_feature: MA Experiment 20000315 PARAMETER Experiment Name: At_14day_Shoots-Roots_Sub_P Parameter: Plant Line Value: WS
  misc_feature: MA Experiment 20000315 PARAMETER Experiment Name: At_14day_Shoots-Roots_Sub_P Parameter: Tissue Value: Shoots vs. Whole Plant
  misc_feature: MA Experiment ID: 20000328 Result: Down-regulated in Transcription
  misc_feature: MA Experiment 20000328 PARAMETER Experiment Name: At_42deg_Heat_Sub_P Parameter: Age (day) Value: 14
  misc_feature: MA Experiment 20000328 PARAMETER Experiment Name: At_42deg_Heat_Sub_P Parameter: Organism Value: A. thaliana
  misc_feature: MA Experiment 20000328 PARAMETER Experiment Name: At_42deg_Heat_Sub_P Parameter: Plant Line Value: WS
  misc_feature: MA Experiment 20000328 PARAMETER Experiment Name: At_42deg_Heat_Sub_P Parameter: Temperature (deg C) Value: 42 vs. 22
  misc_feature: MA Experiment 20000328 PARAMETER Experiment Name: At_42deg_Heat_Sub_P Parameter: Timepoint (hr) Value: 6
  misc_feature: MA Experiment 20000328 PARAMETER Experiment Name: At_42deg_Heat_Sub_P Parameter: Tissue Value: Aerial
  misc_feature: MA Experiment ID: 20000347 Result: Up-regulated in Transcription
  misc_feature: MA Experiment 20000347 PARAMETER Experiment Name: At_2mM_SA_Sub_P Parameter: Age (day) Value: 14
  misc_feature: MA Experiment 20000347 PARAMETER Experiment Name: At_2mM_SA_Sub_P Parameter: Organism Value: A. thaliana
  misc_feature: MA Experiment 20000347 PARAMETER Experiment Name: At_2mM_SA_Sub_P Parameter: Plant Line Value: WS
  misc_feature: MA Experiment 20000347 PARAMETER Experiment Name: At_2mM_SA_Sub_P Parameter: Timepoint (hr) Value: 6
  misc_feature: MA Experiment 20000347 PARAMETER Experiment Name: At_2mM_SA_Sub_P Parameter: Tissue Value: Aerial
  misc_feature: MA Experiment 20000347 PARAMETER Experiment Name: At_2mM_SA_Sub_P Parameter: Treatment Value: 2mM SA vs. No Treatment
  misc_feature: MA Experiment ID: 20000355 Result: Down-regulated in Transcription
  misc_feature: MA Experiment 20000355 PARAMETER Experiment Name: At_Siliques_Sub_P Parameter: Age (day) Value: 21
  misc_feature: MA Experiment 20000355 PARAMETER Experiment Name: At_Siliques_Sub_P Parameter: Organism Value: A. thaliana
  misc_feature: MA Experiment 20000355 PARAMETER Experiment Name: At_Siliques_Sub_P Parameter: Plant Line Value: WS
  misc_feature: MA Experiment 20000355 PARAMETER Experiment Name: At_Siliques_Sub_P Parameter: Tissue Value: Less Than 5mm Siliques vs. Whole Plant
  misc_feature: MA Experiment ID: 20000440 Result: Down-regulated in Transcription
  misc_feature: MA Experiment 20000440 PARAMETER Experiment Name: At_Closed-Flower__Sub_P Parameter: Tissue Value: Closed Flower vs. Whole Plant
atgggatttcaaacagctagtttttttctgatcttgttattcttgttttatcatcttccttgtgttccaagccagcaagaacgaagtaggttatgtaaaccttttcagtgtggcgacatcaccgtcggttttcccttctggggagagaatcgccaaagtgattgcggtcacttttctctgaaactaaactgcaacaaaccctcaaacacaacctctcttacaatctcaggccacaactacagtgtcctccatatagacaacaaatccaacattcttagcctatccagacaagatttctcaggtcctttctgttctgcttcattctcttccacacctttgcgttcagatctcttccagaatttgcaaccttacagaaacctcactgtgttctatatgtgtgaccctcgtcgccatttctttgggaatttcacatgtccagtgaaaggtcttggctctgtggttcagaactctacgtatcgtaaactttgtgataaaagttttagcgtcacagttcctacgagttatgttccagaggaagaagctctgaatttgacacatttggaaagtgttttgaggaaagggttagaggtgaagctgaagataagtgagatgtctggtcaagaatgtgtaaccactgatggaaactctggcttcacacggttttgctgcacgaacgtatcaggaccagaaatcagttgccttacttcaataactactatgaataatggaacttacagcgataatcgccctttcctggtaacaattggaacagggtcaatactatgtgtatgtgtggtgctgtttctagcattttatcttaacgagagaagaatagcaaaggctgcgagaattcagcacctcgaggcgcttggaaccctgagagggtacaattataaacaaatcaagaaaattacaaaatcatttacagaagtagttggacgaggaggatttggaactgtatatagagggagattacgcgatggtcgaaaggttgccgtgaaggtcttgaaagattcaaagggaaactgtgaagatttcatcaacgaagtcgcaagcatgagccaaacatctcatgttaacattgtaactctgcttggtttctgctatgaaggatccaaaagggcgatcatatatgaatttctagagaatggatctctggatcagtcgttgaatcttgatgtgagtacactttatggaatcgcgctaggcgtggcacggggacttgagtacctgcactatggctgcaaaaccaggattgtgcattttgacattaaacctcagaatgtactgttagatgaaaatctcagacccaaagttgctgattttggactcgctaagctctgtgagaagcaagaaagcatcttatcattgcttgataccagaggaacaataggatacattgctccagagttgttttcaagaatgtacggaagcgtgtctcacaagtcagatgtgtacagctatgggatgttggttcttgagatgatcggagcaaggaacaaagaaagagtccaaaatgctgatccgaacaatagctcggcttactttccggattggatctacaaggatcttgaaaattttgataacacaaggcttcttggcgatggactaacccgagaggaagaaaaaaatgcgaaaaagatgatcttggtgggtctatggtgtattcagttccgtccatcagaccgtccatcaatgaacaaagttgtagagatgatggaaggaagtttggattctcttgatccccctcctaagcctcttttgcatatgccaatgcaaaacaataatgcagaatcatctcagctatcagtggaaagctcaatttactccgaagtatga

SEQ ID NO: 78704 - protein, 612 aa, Arabidopsis thaliana
  peptide (1)..(612): Ceres Seq. ID no. 12644230
  misc_feature (310)..(612): Homolog of NCBI NO: 15240863 NR Description: receptor serine/threonine protein kinase -like;
  misc_feature (1)..(223): Homolog of NCBI NO: 15240863 NR Description: receptor serine/threonine protein kinase -like;
  misc_feature (78)..(612): Homolog of NCBI NO: 10177799 NR Description: receptor serine/threonine kinase-like protein
  misc_feature (284)..(612): Homolog of NCBI NO: 10177800 NR Description: receptor protein kinase-like protein [Arabidopsis
  misc_feature (1)..(612): Homolog of NCBI NO: 15219783 NR Description: receptor serine/threonine kinase PR5K, putative; id: At1g66920.1 [Arabidopsis thaliana] >gi|25404651|pir||A96693
  misc_feature (287)..(612): Homolog of NCBI NO: 15240864 NR Description: receptor serine/threonine protein kinase - like;
  misc_feature (1)..(394): Homolog of NCBI NO: 15240864 NR Description: receptor serine/threonine protein kinase - like;
  misc_feature (1)..(401): Homolog of NCBI NO: 10177800 NR Description: receptor protein kinase-like protein [Arabidopsis
  misc_feature (23)..(612): Homolog of NCBI NO: 15219785 NR Description: receptor-like kinase, putative; protein id:
  misc_feature (9)..(612): Homolog of NCBI NO: 15240865 NR Description: receptor serine/threonine protein kinase - like; id: At5g38260.1 [Arabidopsis thaliana]
MGFQTASFFLILLFLFYHLPCVPSQQERSRLCKPFQCGDITVGFPFWGENRQSDCGHFSLKLNCNKPSNTTSLTISGHNYSVLHIDNKSNILSLSRQDFSGPFCSASFSSTPLRSDLFQNLQPYRNLTVFYMCDPRRHFFGNFTCPVKGLGSVVQNSTYRKLCDKSFSVTVPTSYVPEEEALNLTHLESVLRKGLEVKLKISEMSGQECVTTDGNSGFTRFCCTNVSGPEISCLTSITTMNNGTYSDNRPFLVTIGTGSILCVCVVLFLAFYLNERRIAKAARIQHLEALGTLRGYNYKQIKKITKSFTEVVGRGGFGTVYRGRLRDGRKVAVKVLKDSKGNCEDFINEVASMSQTSHVNIVTLLGFCYEGSKRAIIYEFLENGSLDQSLNLDVSTLYGIALGVARGLEYLHYGCKTRIVHFDIKPQNVLLDENLRPKVADFGLAKLCEKQESILSLLDTRGTIGYIAPELFSRMYGSVSHKSDVYSYGMLVLEMIGARNKERVQNADPNNSSAYFPDWIYKDLENFDNTRLLGDGLTREEEKNAKKMILVGLWCIQFRPSDRPSMNKVVEMMEGSLDSLDPPPKPLLHMPMQNNNAESSQLSVESSIYSEV

SEQ ID NO: 78705 - protein, 481 aa, Arabidopsis thaliana
  peptide (1)..(481): Ceres Seq. ID no. 12644231
  misc_feature (179)..(481): Homolog of NCBI NO: 15240863 NR Description: receptor serine/threonine protein kinase -like;
  misc_feature (1)..(92): Homolog of NCBI NO: 15240863 NR Description: receptor serine/threonine protein kinase -like;
  misc_feature (1)..(481): Homolog of NCBI NO: 10177799 NR Description: receptor serine/threonine kinase-like protein
  misc_feature (153)..(481): Homolog of NCBI NO: 10177800 NR Description: receptor protein kinase-like protein [Arabidopsis
  misc_feature (1)..(481): Homolog of NCBI NO: 15219783 NR Description: receptor serine/threonine kinase PR5K, putative; id: At1g66920.1 [Arabidopsis thaliana] >gi|25404651|pir||A96693
  misc_feature (156)..(481): Homolog of NCBI NO: 15240864 NR Description: receptor serine/threonine protein kinase - like;
  misc_feature (1)..(263): Homolog of NCBI NO: 15240864 NR Description: receptor serine/threonine protein kinase - like;
  misc_feature (1)..(270): Homolog of NCBI NO: 10177800 NR Description: receptor protein kinase-like protein [Arabidopsis
  misc_feature (1)..(481): Homolog of NCBI NO: 15219785 NR Description: receptor-like kinase, putative; protein id:
  misc_feature (1)..(481): Homolog of NCBI NO: 15240865 NR Description: receptor serine/threonine protein kinase - like; id: At5g38260.1 [Arabidopsis thaliana]
MCDPRRHFFGNFTCPVKGLGSVVQNSTYRKLCDKSFSVTVPTSYVPEEEALNLTHLESVLRKGLEVKLKISEMSGQECVTTDGNSGFTRFCCTNVSGPEISCLTSITTMNNGTYSDNRPFLVTIGTGSILCVCVVLFLAFYLNERRIAKAARIQHLEALGTLRGYNYKQIKKITKSFTEVVGRGGFGTVYRGRLRDGRKVAVKVLKDSKGNCEDFINEVASMSQTSHVNIVTLLGFCYEGSKRAIIYEFLENGSLDQSLNLDVSTLYGIALGVARGLEYLHYGCKTRIVHFDIKPQNVLLDENLRPKVADFGLAKLCEKQESILSLLDTRGTIGYIAPELFSRMYGSVSHKSDVYSYGMLVLEMIGARNKERVQNADPNNSSAYFPDWIYKDLENFDNTRLLGDGLTREEEKNAKKMILVGLWCIQFRPSDRPSMNKVVEMMEGSLDSLDPPPKPLLHMPMQNNNAESSQLSVESSIYSEV

SEQ ID NO: 78706 - protein, 409 aa, Arabidopsis thaliana
  peptide (1)..(409): Ceres Seq. ID no. 12644232
  misc_feature (107)..(409): Homolog of NCBI NO: 15240863 NR Description: receptor serine/threonine protein kinase -like;
  misc_feature (1)..(20): Homolog of NCBI NO: 15240863 NR Description: receptor serine/threonine protein kinase -like;
  misc_feature (1)..(409): Homolog of NCBI NO: 10177799 NR Description: receptor serine/threonine kinase-like protein
  misc_feature (81)..(409): Homolog of NCBI NO: 10177800 NR Description: receptor protein kinase-like protein [Arabidopsis
  misc_feature (1)..(409): Homolog of NCBI NO: 15219783 NR Description: receptor serine/threonine kinase PR5K, putative; id: At1g66920.1 [Arabidopsis thaliana] >gi|25404651|pir||A96693
  misc_feature (84)..(409): Homolog of NCBI NO: 15240864 NR Description: receptor serine/threonine protein kinase - like;
  misc_feature (1)..(191): Homolog of NCBI NO: 15240864 NR Description: receptor serine/threonine protein kinase - like;
  misc_feature (1)..(198): Homolog of NCBI NO: 10177800 NR Description: receptor protein kinase-like protein [Arabidopsis
  misc_feature (1)..(409): Homolog of NCBI NO: 15219785 NR Description: receptor-like kinase, putative; protein id:
  misc_feature (1)..(409): Homolog of NCBI NO: 15240865 NR Description: receptor serine/threonine protein kinase - like; id: At5g38260.1 [Arabidopsis thaliana]
MSGQECVTTDGNSGFTRFCCTNVSGPEISCLTSITTMNNGTYSDNRPFLVTIGTGSILCVCVVLFLAFYLNERRIAKAARIQHLEALGTLRGYNYKQIKKITKSFTEVVGRGGFGTVYRGRLRDGRKVAVKVLKDSKGNCEDFINEVASMSQTSHVNIVTLLGFCYEGSKRAIIYEFLENGSLDQSLNLDVSTLYGIALGVARGLEYLHYGCKTRIVHFDIKPQNVLLDENLRPKVADFGLAKLCEKQESILSLLDTRGTIGYIAPELFSRMYGSVSHKSDVYSYGMLVLEMIGARNKERVQNADPNNSSAYFPDWIYKDLENFDNTRLLGDGLTREEEKNAKKMILVGLWCIQFRPSDRPSMNKVVEMMEGSLDSLDPPPKPLLHMPMQNNNAESSQLSVESSIYSEV

SEQ ID NO: 78707 - DNA, 1422 bp, Arabidopsis thaliana
  misc_feature (1)..(1422): Ceres Seq. ID no. 12644280
  misc_feature: MA Experiment ID: 20000173 Result: Up-regulated in Transcription
  misc_feature: MA Experiment 20000173 PARAMETER Experiment Name: At_42deg_Heat_P Parameter: Age (day) Value: 14
  misc_feature: MA Experiment 20000173 PARAMETER Experiment Name: At_42deg_Heat_P Parameter: Organism Value: A. thaliana
  misc_feature: MA Experiment 20000173 PARAMETER Experiment Name: At_42deg_Heat_P Parameter: Plant Line Value: WS
  misc_feature: MA Experiment 20000173 PARAMETER Experiment Name: At_42deg_Heat_P Parameter: Temperature (deg C) Value: 42 vs. 22
  misc_feature: MA Experiment 20000173 PARAMETER Experiment Name: At_42deg_Heat_P Parameter: Timepoint (hr) Value: 6
  misc_feature: MA Experiment 20000173 PARAMETER Experiment Name: At_42deg_Heat_P Parameter: Tissue Value: Aerial
  misc_feature: MA Experiment ID: 20000185 Result: Up-regulated in Transcription
  misc_feature: MA Experiment 20000185 PARAMETER Experiment Name: At_Roots__P Parameter: Age (day) Value: 7 vs. 21
  misc_feature: MA Experiment 20000185 PARAMETER Experiment Name: At_Roots__P Parameter: Organism Value: A. thaliana
  misc_feature: MA Experiment 20000185 PARAMETER Experiment Name: At_Roots__P Parameter: Tissue Value: Roots vs. Whole Plant
  misc_feature: MA Experiment ID: 20000436 Result: Down-regulated in Transcription
  misc_feature: MA Experiment 20000436 PARAMETER Experiment Name: At_Drought_P Parameter: Age (day) Value: 7
  misc_feature: MA Experiment 20000436 PARAMETER Experiment Name: At_Drought_P Parameter: Organism Value: A. thaliana
  misc_feature: MA Experiment 20000436 PARAMETER Experiment Name: At_Drought_P Parameter: Plant Line Value: WS
  misc_feature: MA Experiment 20000436 PARAMETER Experiment Name: At_Drought_P Parameter: Timepoint (hr) Value: 12
  misc_feature: MA Experiment 20000436 PARAMETER Experiment Name: At_Drought_P Parameter: Tissue Value: Whole Plant
  misc_feature: MA Experiment 20000436 PARAMETER Experiment Name: At_Drought_P Parameter: Treatment Value: Drought vs. No Drought
  misc_feature: MA Experiment ID: 20000439 Result: Up-regulated in Transcription
  misc_feature: MA Experiment 20000439 PARAMETER Experiment Name: At_Roots__P Parameter: Age (day) Value: 14 vs. 21
  misc_feature: MA Experiment 20000439 PARAMETER Experiment Name: At_Roots__P Parameter: Organism Value: A. thaliana
  misc_feature: MA Experiment 20000439 PARAMETER Experiment Name: At_Roots__P Parameter: Tissue Value: Roots vs. Whole Plant
  misc_feature: MA Experiment ID: 20000451 Result: Down-regulated in Transcription
  misc_feature: MA Experiment 20000451 PARAMETER Experiment Name: At_CS6879_Shoots-Roots_P Parameter: Age (day) Value: 14
  misc_feature: MA Experiment 20000451 PARAMETER Experiment Name: At_CS6879_Shoots-Roots_P Parameter: Organism Value: A. thaliana
  misc_feature: MA Experiment 20000451 PARAMETER Experiment Name: At_CS6879_Shoots-Roots_P Parameter: Plant Line Value: CS6879 vs. WS
  misc_feature: MA Experiment 20000451 PARAMETER Experiment Name: At_CS6879_Shoots-Roots_P Parameter: Tissue Value: Roots
  misc_feature: MA Experiment ID: 20000460 Result: Up-regulated in Transcription
  misc_feature: MA Experiment 20000460 PARAMETER Experiment Name: At_10percent_PEG_P Parameter: Age (day) Value: 12
  misc_feature: MA Experiment 20000460 PARAMETER Experiment Name: At_10percent_PEG_P Parameter: Organism Value: A. thaliana
  misc_feature: MA Experiment 20000460 PARAMETER Experiment Name: At_10percent_PEG_P Parameter: Plant Line Value: WS
  misc_feature: MA Experiment 20000460 PARAMETER Experiment Name: At_10percent_PEG_P Parameter: Timepoint (day) Value: 12
  misc_feature: MA Experiment 20000460 PARAMETER Experiment Name: At_10percent_PEG_P Parameter: Tissue Value: Whole Plant
  misc_feature: MA Experiment 20000460 PARAMETER Experiment Name: At_10percent_PEG_P Parameter: Treatment Value: 10percent PEG vs. No Treatment
  misc_feature: MA Experiment ID: 20000527 Result: Up-regulated in Transcription
  misc_feature: MA Experiment 20000527 PARAMETER Experiment Name: At_10percent_PEG_P Parameter: Age (day) Value: 20
  misc_feature: MA Experiment 20000527 PARAMETER Experiment Name: At_10percent_PEG_P Parameter: Organism Value: A. thaliana
  misc_feature: MA Experiment 20000527 PARAMETER Experiment Name: At_10percent_PEG_P Parameter: Plant Line Value: WS
  misc_feature: MA Experiment 20000527 PARAMETER Experiment Name: At_10percent_PEG_P Parameter: Timepoint (day) Value: 20
  misc_feature: MA Experiment 20000527 PARAMETER Experiment Name: At_10percent_PEG_P Parameter: Tissue Value: Whole Plant
  misc_feature: MA Experiment 20000527 PARAMETER Experiment Name: At_10percent_PEG_P Parameter: Treatment Value: 10percent PEG vs. No Treatment
atgttgcttactatattaaaatcactcctcgtgatattcgtgactacgatattgagagttttatacgacaccatatcgtgctactggctaacacctagacgaatcaagaagatcatggaacagcaaggcgtaacgggtcctaaaccgcgtccgttaaccggaaatatccttgaaatctcggccatggtttcgcaatccgcttccaaggattgtgactctattcaccatgacatcgtcggccgccttctcccgcattacgttgcttggtccaaacaatacgggaagaggtttattgtgtggaacgggacggatcctcggctttgcttaacggaaacggaattgataaaggagttgctgatgaaacacaacggtggatacgcaaggcatatggtggagtgcacaagcaagctagttgagaggttgaggaaggaagttggggaaggagcaaatgaggtggagataggagaggagatgcataaactcacggctgatattatatcgaggacaaagttcggaagcagctttgagaaaggcaaagagcttttcaaccacctcactgtcctccagcgccgttgcgctcaagccacccgccacctctgctttcccggcagccggtttcttccaagcaaatacaacagagagatcaagtctctgaaaaaagaagttgagcgtttgttgattgagatcatacaaagcaggcgagactgcgctgaaatgggtaggagtagcactcacggtgacgaccttctcgggcttctcttgaacgaaatggatattgacaagaacaataacaataacaacaacaatcttcagttgataatggatgaatgcaagacattcttctttgctggccatgaaaccacggctttgctcctcacatggacaacaatgctcctcgccgataatcccacatggcaggaaaaagtccgtgaggaggtcagggaggtctttggccgcaatggccttccctcagtcgatcaactatctaagctaacctcgttaagcaaagtgattaacgagtcactaagactttaccctccagctactcttctaccaaggatggcatttgaagatctaaaactaggtgatctaaccattcctaaaggtttatcaatatggataccggttcttgctatccatcacagtgaagaattatggggtaaagacgcgaaccaattcaatcccgaacgttttggaggcagaccattcgcgtctggtcgccatttcatcccatttgcagccggtccacggaactgcatcggacaacagtttgcgttgatggaagctaaaataatattagccacgttaatttcaaagtttaacttcacaatatcaaagaattataggcatgccccaatcgttgtgcttactataaaacctaagtatggagttcaagtgatattgaagccattggtttcatga

SEQ ID NO: 78708 - protein, 473 aa, Arabidopsis thaliana
  peptide (1)..(473): Ceres Seq. ID no. 12644281
  misc_feature (125)..(473): Homolog of NCBI NO: 15240917 NR Description: cytochrome p450, putative; protein id: At5g38450.1
  misc_feature (1)..(132): Homolog of NCBI NO: 15240917 NR Description: cytochrome p450, putative; protein id: At5g38450.1
  misc_feature (125)..(471): Homolog of NCBI NO: 15219831 NR Description: cytochrome P450, putative; protein id: [Arabidopsis thaliana] >gi|25282618|pir||A96695 hypothetical
  misc_feature (1)..(123): Homolog of NCBI NO: 15219831 NR Description: cytochrome P450, putative; protein id: [Arabidopsis thaliana] >gi|25282618|pir||A96695 hypothetical
  misc_feature (125)..(471): Homolog of NCBI NO: 25553701 NR Description: putative cytochrome P450 [Oryza sativa (japonica
  misc_feature (17)..(119): Homolog of NCBI NO: 25553701 NR Description: putative cytochrome P450 [Oryza sativa (japonica
  misc_feature (130)..(471): Homolog of NCBI NO: 15226472 NR Description: cytochrome p450, putative; protein id: [Arabidopsis thaliana] >gi|7430708|pir||T02192 probable
  misc_feature (2)..(119): Homolog of NCBI NO: 15226472 NR Description: cytochrome p450, putative; protein id: [Arabidopsis thaliana] >gi|7430708|pir||T02192 probable
  misc_feature (133)..(471): Homolog of NCBI NO: 21805645 NR Description: cytochrome P450 monooxygenase CYP72A5 [Zea mays
  misc_feature (11)..(128): Homolog of NCBI NO: 21805645 NR Description: cytochrome P450 monooxygenase CYP72A5 [Zea mays
MLLTILKSLLVIFVTTILRVLYDTISCYWLTPRRIKKIMEQQGVTGPKPRPLTGNILEISAMVSQSASKDCDSIHHDIVGRLLPHYVAWSKQYGKRFIVWNGTDPRLCLTETELIKELLMKHNGGYARHMVECTSKLVERLRKEVGEGANEVEIGEEMHKLTADIISRTKFGSSFEKGKELFNHLTVLQRRCAQATRHLCFPGSRFLPSKYNREIKSLKKEVERLLIEIIQSRRDCAEMGRSSTHGDDLLGLLLNEMDIDKNNNNNNNNLQLIMDECKTFFFAGHETTALLLTWTTMLLADNPTWQEKVREEVREVFGRNGLPSVDQLSKLTSLSKVINESLRLYPPATLLPRMAFEDLKLGDLTIPKGLSIWIPVLAIHHSEELWGKDANQFNPERFGGRPFASGRHFIPFAAGPRNCIGQQFALMEAKIILATLISKFNFTISKNYRHAPIVVLTIKPKYGVQVILKPLVS

SEQ ID NO: 78709 - protein, 435 aa, Arabidopsis thaliana
  peptide (1)..(435): Ceres Seq. ID no. 12644282
  misc_feature (87)..(435): Homolog of NCBI NO: 15240917 NR Description: cytochrome p450, putative; protein id: At5g38450.1
  misc_feature (1)..(94): Homolog of NCBI NO: 15240917 NR Description: cytochrome p450, putative; protein id: At5g38450.1
  misc_feature (87)..(433): Homolog of NCBI NO: 15219831 NR Description: cytochrome P450, putative; protein id: [Arabidopsis thaliana] >gi|25282618|pir||A96695 hypothetical
  misc_feature (1)..(85): Homolog of NCBI NO: 15219831 NR Description: cytochrome P450, putative; protein id: [Arabidopsis thaliana] >gi|25282618|pir||A96695 hypothetical
  misc_feature (87)..(433): Homolog of NCBI NO: 25553701 NR Description: putative cytochrome P450 [Oryza sativa (japonica
  misc_feature (1)..(81): Homolog of NCBI NO: 25553701 NR Description: putative cytochrome P450 [Oryza sativa (japonica
  misc_feature (92)..(433): Homolog of NCBI NO: 15226472 NR Description: cytochrome p450, putative; protein id: [Arabidopsis thaliana] >gi|7430708|pir||T02192 probable
  misc_feature (1)..(81): Homolog of NCBI NO: 15226472 NR Description: cytochrome p450, putative; protein id: [Arabidopsis thaliana] >gi|7430708|pir||T02192 probable
  misc_feature (95)..(433): Homolog of NCBI NO: 21805645 NR Description: cytochrome P450 monooxygenase CYP72A5 [Zea mays
  misc_feature (1)..(90): Homolog of NCBI NO: 21805645 NR Description: cytochrome P450 monooxygenase CYP72A5 [Zea mays
MEQQGVTGPKPRPLTGNILEISAMVSQSASKDCDSIHHDIVGRLLPHYVAWSKQYGKRFIVWNGTDPRLCLTETELIKELLMKHNGGYARHMVECTSKLVERLRKEVGEGANEVEIGEEMHKLTADIISRTKFGSSFEKGKELFNHLTVLQRRCAQATRHLCFPGSRFLPSKYNREIKSLKKEVERLLIEIIQSRRDCAEMGRSSTHGDDLLGLLLNEMDIDKNNNNNNNNLQLIMDECKTFFFAGHETTALLLTWTTMLLADNPTWQEKVREEVREVFGRNGLPSVDQLSKLTSLSKVINESLRLYPPATLLPRMAFEDLKLGDLTIPKGLSIWIPVLAIHHSEELWGKDANQFNPERFGGRPFASGRHFIPFAAGPRNCIGQQFALMEAKIILATLISKFNFTISKNYRHAPIVVLTIKPKYGVQVILKPLVS

SEQ ID NO: 78710 - protein, 412 aa, Arabidopsis thaliana
  peptide (1)..(412): Ceres Seq. ID no. 12644283
  misc_feature (64)..(412): Homolog of NCBI NO: 15240917 NR Description: cytochrome p450, putative; protein id: At5g38450.1
  misc_feature (1)..(71): Homolog of NCBI NO: 15240917 NR Description: cytochrome p450, putative; protein id: At5g38450.1
  misc_feature (64)..(410): Homolog of NCBI NO: 15219831 NR Description: cytochrome P450, putative; protein id: [Arabidopsis thaliana] >gi|25282618|pir||A96695 hypothetical
  misc_feature (1)..(62): Homolog of NCBI NO: 15219831 NR Description: cytochrome P450, putative; protein id: [Arabidopsis thaliana] >gi|25282618|pir||A96695 hypothetical
  misc_feature (64)..(410): Homolog of NCBI NO: 25553701 NR Description: putative cytochrome P450 [Oryza sativa (japonica
  misc_feature (1)..(58): Homolog of NCBI NO: 25553701 NR Description: putative cytochrome P450 [Oryza sativa (japonica
  misc_feature (69)..(410): Homolog of NCBI NO: 15226472 NR Description: cytochrome p450, putative; protein id: [Arabidopsis thaliana] >gi|7430708|pir||T02192 probable
  misc_feature (1)..(58): Homolog of NCBI NO: 15226472 NR Description: cytochrome p450, putative; protein id: [Arabidopsis thaliana] >gi|7430708|pir||T02192 probable
  misc_feature (72)..(410): Homolog of NCBI NO: 21805645 NR Description: cytochrome P450 monooxygenase CYP72A5 [Zea mays
  misc_feature (1)..(67): Homolog of NCBI NO: 21805645 NR Description: cytochrome P450 monooxygenase CYP72A5 [Zea mays
MVSQSASKDCDSIHHDIVGRLLPHYVAWSKQYGKRFIVWNGTDPRLCLTETELIKELLMKHNGGYARHMVECTSKLVERLRKEVGEGANEVEIGEEMHKLTADIISRTKFGSSFEKGKELFNHLTVLQRRCAQATRHLCFPGSRFLPSKYNREIKSLKKEVERLLIEIIQSRRDCAEMGRSSTHGDDLLGLLLNEMDIDKNNNNNNNNLQLIMDECKTFFFAGHETTALLLTWTTMLLADNPTWQEKVREEVREVFGRNGLPSVDQLSKLTSLSKVINESLRLYPPATLLPRMAFEDLKLGDLTIPKGLSIWIPVLAIHHSEELWGKDANQFNPERFGGRPFASGRHFIPFAAGPRNCIGQQFALMEAKIILATLISKFNFTISKNYRHAPIVVLTIKPKYGVQVILKPLVS

SEQ ID NO: 78711 - DNA, 1380 bp, Arabidopsis thaliana
  misc_feature (1)..(1380): Ceres Seq. ID no. 12644372
  misc_feature: MA Experiment ID: 108435 Result: Down-regulated in Transcription
  misc_feature: MA Experiment 108435 PARAMETER Experiment Name: At_stm_Mutants_cDNA_P Parameter: Plant Line Value: wt Landsburg vs stm
  misc_feature: MA Experiment 108435 PARAMETER Experiment Name: At_stm_Mutants_cDNA_P Parameter: Tissue Value: Shoot Apical Meristem Region
  misc_feature: MA Experiment ID: 108461 Result: Down-regulated in Transcription
  misc_feature: MA Experiment 108461 PARAMETER Experiment Name: At_Germinating_Seeds_cDNA_P Parameter: Age (day) Value: 1 vs. 0
  misc_feature: MA Experiment 108461 PARAMETER Experiment Name: At_Germinating_Seeds_cDNA_P Parameter: Tissue Value: Germinating Seeds
  misc_feature: MA Experiment ID: 108462 Result: Up-regulated in Transcription
  misc_feature: MA Experiment 108462 PARAMETER Experiment Name: At_Germinating_Seeds_cDNA_P Parameter: Age (day) Value: 2 vs. 0
  misc_feature: MA Experiment 108462 PARAMETER Experiment Name: At_Germinating_Seeds_cDNA_P Parameter: Tissue Value: Germinating Seeds
  misc_feature: MA Experiment ID: 108463 Result: Up-regulated in Transcription
  misc_feature: MA Experiment 108463 PARAMETER Experiment Name: At_Germinating_Seeds_cDNA_P Parameter: Age (day) Value: 3 vs. 0
  misc_feature: MA Experiment 108463 PARAMETER Experiment Name: At_Germinating_Seeds_cDNA_P Parameter: Tissue Value: Germinating Seeds
  misc_feature: MA Experiment ID: 108464 Result: Up-regulated in Transcription
  misc_feature: MA Experiment 108464 PARAMETER Experiment Name: At_Germinating_Seeds_cDNA_P Parameter: Age (day) Value: 4 vs. 0
  misc_feature: MA Experiment 108464 PARAMETER Experiment Name: At_Germinating_Seeds_cDNA_P Parameter: Tissue Value: Germinating Seeds
  misc_feature: MA Experiment ID: 108569 Result: Up-regulated in Transcription
  misc_feature: MA Experiment 108569 PARAMETER Experiment Name: At_0.001%_MeJA__cDNA_P Parameter: Timepoint (hr) Value: 6
  misc_feature: MA Experiment 108569 PARAMETER Experiment Name: At_0.001%_MeJA__cDNA_P Parameter: Tissue Value: Aerial
  misc_feature: MA Experiment 108569 PARAMETER Experiment Name: At_0.001%_MeJA__cDNA_P Parameter: Treatment Value: 0.001% MeJA vs. No Treatment
  misc_feature: MA Experiment ID: 108572 Result: Up-regulated in Transcription
  misc_feature: MA Experiment 108572 PARAMETER Experiment Name: At_Drought_cDNA_P Parameter: Timepoint (hr) Value: 1
  misc_feature: MA Experiment 108572 PARAMETER Experiment Name: At_Drought_cDNA_P Parameter: Tissue Value: Aerial
  misc_feature: MA Experiment 108572 PARAMETER Experiment Name: At_Drought_cDNA_P Parameter: Treatment Value: Drought vs. No Drought
  misc_feature: MA Experiment ID: 108573 Result: Up-regulated in Transcription
  misc_feature: MA Experiment 108573 PARAMETER Experiment Name: At_Drought_cDNA_P Parameter: Timepoint (hr) Value: 6
  misc_feature: MA Experiment 108573 PARAMETER Experiment Name: At_Drought_cDNA_P Parameter: Tissue Value: Aerial
  misc_feature: MA Experiment 108573 PARAMETER Experiment Name: At_Drought_cDNA_P Parameter: Treatment Value: Drought vs. No Drought
  misc_feature: MA Experiment ID: 108576 Result: Down-regulated in Transcription
  misc_feature: MA Experiment 108576 PARAMETER Experiment Name: At_42deg_Heat_cDNA_P Parameter: Temperature (deg C) Value: 42 vs. 22
  misc_feature: MA Experiment 108576 PARAMETER Experiment Name: At_42deg_Heat_cDNA_P Parameter: Timepoint (hr) Value: 1
  misc_feature: MA Experiment 108576 PARAMETER Experiment Name: At_42deg_Heat_cDNA_P Parameter: Tissue Value: Aerial
  misc_feature: MA Experiment ID: 108595 Result: Down-regulated in Transcription
  misc_feature: MA Experiment 108595 PARAMETER Experiment Name: At_Ler-pi_Ovule_cDNA_P Parameter: Plant Line Value: null
  misc_feature: MA Experiment ID: 20000113 Result: Up-regulated in Transcription
  misc_feature: MA Experiment 20000113 PARAMETER Experiment Name: At_42deg_Heat_cDNA_P Parameter: Temperature (deg C) Value: 42 vs. 22
  misc_feature: MA Experiment 20000113 PARAMETER Experiment Name: At_42deg_Heat_cDNA_P Parameter: Timepoint (hr) Value: 8
  misc_feature: MA Experiment 20000113 PARAMETER Experiment Name: At_42deg_Heat_cDNA_P Parameter: Tissue Value: Aerial
  misc_feature: MA Experiment ID: 20000180 Result: Up-regulated in Transcription
  misc_feature: MA Experiment 20000180 PARAMETER Experiment Name: At_Germinating_Seeds_P Parameter: Age (hr) Value: 24 vs. 0
  misc_feature: MA Experiment 20000180 PARAMETER Experiment Name: At_Germinating_Seeds_P Parameter: Tissue Value: Germinating Seeds
  misc_feature: MA Experiment ID: 20000224 Result: Down-regulated in Transcription
  misc_feature: MA Experiment ID: 20000227 Result: Down-regulated in Transcription
  misc_feature: MA Experiment 20000227 PARAMETER Experiment Name: At_Root-Tips-vs-Tops_P Parameter: Tissue Value: Root Tips vs. Root Tops
  misc_feature: MA Experiment ID: 20000234 Result: Down-regulated in Transcription
  misc_feature: MA Experiment 20000234 PARAMETER Experiment Name: At_Siliques_P Parameter: Age (day) Value: 21
  misc_feature: MA Experiment 20000234 PARAMETER Experiment Name: At_Siliques_P Parameter: Organism Value: A. thaliana
  misc_feature: MA Experiment 20000234 PARAMETER Experiment Name: At_Siliques_P Parameter: Plant Line Value: WS
  misc_feature: MA Experiment 20000234 PARAMETER Experiment Name: At_Siliques_P Parameter: Tissue Value: Less Than 5mm Siliques vs. Whole Plant
  misc_feature: MA Experiment ID: 20000265 Result: Down-regulated in Transcription
  misc_feature: MA Experiment 20000265 PARAMETER Experiment Name: At_Open_Flower_P Parameter: Age (day) Value: 21
  misc_feature: MA Experiment 20000265 PARAMETER Experiment Name: At_Open_Flower_P Parameter: Plant Line Value: WS
  misc_feature: MA Experiment 20000265 PARAMETER Experiment Name: At_Open_Flower_P Parameter: Tissue Value: Closed Flower vs. Whole Plant
  misc_feature: MA Experiment ID: 20000286 Result: Down-regulated in Transcription
  misc_feature: MA Experiment 20000286 PARAMETER Experiment Name: At_Open_Flower_P Parameter: Age (day) Value: 21
  misc_feature: MA Experiment 20000286 PARAMETER Experiment Name: At_Open_Flower_P Parameter: Plant Line Value: WS
  misc_feature: MA Experiment 20000286 PARAMETER Experiment Name: At_Open_Flower_P Parameter: Tissue Value: Half Open vs. Whole Plant
  misc_feature: MA Experiment ID: 20000308 Result: Down-regulated in Transcription
  misc_feature: MA Experiment 20000308 PARAMETER Experiment Name: At_100mM_NaCl__P Parameter: Age (day) Value: 17
  misc_feature: MA Experiment 20000308 PARAMETER Experiment Name: At_100mM_NaCl__P Parameter: Organism Value: A. thaliana
  misc_feature: MA Experiment 20000308 PARAMETER Experiment Name: At_100mM_NaCl__P Parameter: Plant Line Value: WS
  misc_feature: MA Experiment 20000308 PARAMETER Experiment Name: At_100mM_NaCl__P Parameter: Timepoint (hr) Value: 72
  misc_feature: MA Experiment 20000308 PARAMETER Experiment Name: At_100mM_NaCl__P Parameter: Tissue Value: Whole Plant
  misc_feature: MA Experiment 20000308 PARAMETER Experiment Name: At_100mM_NaCl__P Parameter: Treatment Value: 100mM NaCl vs. No Treatment
  misc_feature: MA Experiment ID: 20000439 Result: Down-regulated in Transcription
  misc_feature: MA Experiment 20000439 PARAMETER Experiment Name: At_Roots__P Parameter: Age (day) Value: 14 vs. 21
  misc_feature: MA Experiment 20000439 PARAMETER Experiment Name: At_Roots__P Parameter: Organism Value: A. thaliana
  misc_feature: MA Experiment 20000439 PARAMETER Experiment Name: At_Roots__P Parameter: Tissue Value: Roots vs. Whole Plant
  misc_feature: MA Experiment ID: 20000441 Result: Up-regulated in Transcription
  misc_feature: MA Experiment 20000441 PARAMETER Experiment Name: At_1uM_BR-BRZ__P Parameter: Tissue Value: Shoot Apices
  misc_feature: MA Experiment 20000441 PARAMETER Experiment Name: At_1uM_BR-BRZ__P Parameter: Treatment Value: 1uM BR vs. No Treatment
  misc_feature: MA Experiment ID: 20000443 Result: Up-regulated in Transcription
  misc_feature: MA Experiment 20000443 PARAMETER Experiment Name: At_1uM_BR-BRZ__P Parameter: Tissue Value: Shoot Apices
  misc_feature: MA Experiment 20000443 PARAMETER Experiment Name: At_1uM_BR-BRZ__P Parameter: Treatment Value: 1uM BRZ vs. No Treatment
  misc_feature: MA Experiment ID: 20000578 Result: Down-regulated in Transcription
  misc_feature: MA Experiment 20000578 PARAMETER Experiment Name: At_CS3726__P Parameter: Organism Value: A. thaliana
  misc_feature: MA Experiment 20000578 PARAMETER Experiment Name: At_CS3726__P Parameter: Plant Line Value: CS3726
  misc_feature: MA Experiment 20000578 PARAMETER Experiment Name: At_CS3726__P Parameter: Tissue Value: Whole Plant
  misc_feature: MA Experiment ID: 20001248 Result: Up-regulated in Transcription
  misc_feature: MA Experiment 20001248 PARAMETER Experiment Name: At_Far-red-induction_P Parameter: Age (day) Value: 7
  misc_feature: MA Experiment 20001248 PARAMETER Experiment Name: At_Far-red-induction_P Parameter: Light Value: Far-red vs. White
  misc_feature: MA Experiment 20001248 PARAMETER Experiment Name: At_Far-red-induction_P Parameter: Organism Value: A. thaliana
  misc_feature: MA Experiment 20001248 PARAMETER Experiment Name: At_Far-red-induction_P Parameter: Plant Line Value: Columbia
  misc_feature: MA Experiment 20001248 PARAMETER Experiment Name: At_Far-red-induction_P Parameter: Timepoint (hr) Value: 4
  misc_feature: MA Experiment 20001248 PARAMETER Experiment Name: At_Far-red-induction_P Parameter: Tissue Value: Whole Plant
  misc_feature: MA Experiment ID: 20001450 Result: Up-regulated in Transcription
  misc_feature: MA Experiment 20001450 PARAMETER Experiment Name: At_Far-red-induction_P Parameter: Age (day) Value: 7
  misc_feature: MA Experiment 20001450 PARAMETER Experiment Name: At_Far-red-induction_P Parameter: Light Value: Far-red vs. White
  misc_feature: MA Experiment 20001450 PARAMETER Experiment Name: At_Far-red-induction_P Parameter: Organism Value: A. thaliana
  misc_feature: MA Experiment 20001450 PARAMETER Experiment Name: At_Far-red-induction_P Parameter: Plant Line Value: Columbia
  misc_feature: MA Experiment 20001450 PARAMETER Experiment Name: At_Far-red-induction_P Parameter: Timepoint (hr) Value: 8
  misc_feature: MA Experiment 20001450 PARAMETER Experiment Name: At_Far-red-induction_P Parameter: Tissue Value: Whole Plant
  misc_feature: MA Experiment ID: 20001451 Result: Up-regulated in Transcription
  misc_feature: MA Experiment 20001451 PARAMETER Experiment Name: At_Far-red-induction_P Parameter: Age (day) Value: 7
  misc_feature: MA Experiment 20001451 PARAMETER Experiment Name: At_Far-red-induction_P Parameter: Light Value: Far-red vs. White
  misc_feature: MA Experiment 20001451 PARAMETER Experiment Name: At_Far-red-induction_P Parameter: Organism Value: A. thaliana
  misc_feature: MA Experiment 20001451 PARAMETER Experiment Name: At_Far-red-induction_P Parameter: Plant Line Value: Columbia
  misc_feature: MA Experiment 20001451 PARAMETER Experiment Name: At_Far-red-induction_P Parameter: Timepoint (hr) Value: 24
  misc_feature: MA Experiment 20001451 PARAMETER Experiment Name: At_Far-red-induction_P Parameter: Tissue Value: Whole Plant
  misc_feature: MA Experiment ID: 20001459 Result: Up-regulated in Transcription
  misc_feature: MA Experiment 20001459 PARAMETER Experiment Name: At_50mM_NH4NO3_L-to-H_P Parameter: Age (day) Value: Undefined
  misc_feature: MA Experiment 20001459 PARAMETER Experiment Name: At_50mM_NH4NO3_L-to-H_P Parameter: Organism Value: Undefined
  misc_feature: MA Experiment 20001459 PARAMETER Experiment Name: At_50mM_NH4NO3_L-to-H_P Parameter: Plant Line Value: Undefined
  misc_feature: MA Experiment 20001459 PARAMETER Experiment Name: At_50mM_NH4NO3_L-to-H_P Parameter: Timepoint (hr) Value: 4
  misc_feature: MA Experiment 20001459 PARAMETER Experiment Name: At_50mM_NH4NO3_L-to-H_P Parameter: Tissue Value: Siliques
  misc_feature: MA Experiment 20001459 PARAMETER Experiment Name: At_50mM_NH4NO3_L-to-H_P Parameter: Treatment Value: 50mM NH4NO3 vs. 100mM Manitol
  misc_feature: MA Experiment ID: 20001558 Result: Down-regulated in Transcription
  misc_feature: MA Experiment 20001558 PARAMETER Experiment Name: At_Drought_Soil_Dry_P Parameter: Age (day) Value: 27
  misc_feature: MA Experiment 20001558 PARAMETER Experiment Name: At_Drought_Soil_Dry_P Parameter: Organism Value: A. thaliana
  misc_feature: MA Experiment 20001558 PARAMETER Experiment Name: At_Drought_Soil_Dry_P Parameter: Plant Line Value: WS
  misc_feature: MA Experiment 20001558 PARAMETER Experiment Name: At_Drought_Soil_Dry_P Parameter: Post Timepoint (hr) Value: 6
  misc_feature: MA Experiment 20001558 PARAMETER Experiment Name: At_Drought_Soil_Dry_P Parameter: Post-Treatment Value: Re-Water vs. No Drought
  misc_feature: MA Experiment 20001558 PARAMETER Experiment Name: At_Drought_Soil_Dry_P Parameter: Timepoint (day) Value: 13
  misc_feature: MA Experiment 20001558 PARAMETER Experiment Name: At_Drought_Soil_Dry_P Parameter: Treatment Value: Drought vs. No Drought
  misc_feature: MA Experiment ID: 20001559 Result: Down-regulated in Transcription
  misc_feature: MA Experiment 20001559 PARAMETER Experiment Name: At_Drought_Soil_Dry_P Parameter: Age (day) Value: 28
  misc_feature: MA Experiment 20001559 PARAMETER Experiment Name: At_Drought_Soil_Dry_P Parameter: Organism Value: A. thaliana
  misc_feature: MA Experiment 20001559 PARAMETER Experiment Name: At_Drought_Soil_Dry_P Parameter: Plant Line Value: WS
  misc_feature: MA Experiment 20001559 PARAMETER Experiment Name: At_Drought_Soil_Dry_P Parameter: Post Timepoint (hr) Value: 29
  misc_feature: MA Experiment 20001559 PARAMETER Experiment Name: At_Drought_Soil_Dry_P Parameter: Post-Treatment Value: Re-Water vs. No Drought
  misc_feature: MA Experiment 20001559 PARAMETER Experiment Name: At_Drought_Soil_Dry_P Parameter: Timepoint (day) Value: 14
  misc_feature: MA Experiment 20001559 PARAMETER Experiment Name: At_Drought_Soil_Dry_P Parameter: Treatment Value: Drought vs. No Drought
  misc_feature: MA Experiment ID: 20001560 Result: Down-regulated in Transcription
  misc_feature: MA Experiment 20001560 PARAMETER Experiment Name: At_Drought_Soil_Dry_P Parameter: Age (day) Value: 28
  misc_feature: MA Experiment 20001560 PARAMETER Experiment Name: At_Drought_Soil_Dry_P Parameter: Organism Value: A. thaliana
  misc_feature: MA Experiment 20001560 PARAMETER Experiment Name: At_Drought_Soil_Dry_P Parameter: Plant Line Value: WS
  misc_feature: MA Experiment 20001560 PARAMETER Experiment Name: At_Drought_Soil_Dry_P Parameter: Post Timepoint (hr) Value: None
  misc_feature: MA Experiment 20001560 PARAMETER Experiment Name: At_Drought_Soil_Dry_P Parameter: Post-Treatment Value: None
  misc_feature: MA Experiment 20001560 PARAMETER Experiment Name: At_Drought_Soil_Dry_P Parameter: Timepoint (day) Value: 14
  misc_feature: MA Experiment 20001560 PARAMETER Experiment Name: At_Drought_Soil_Dry_P Parameter: Treatment Value: Drought vs. No Drought
  misc_feature: MA Experiment ID: 20001757 Result: Up-regulated in Transcription
  misc_feature: MA Experiment 20001757 PARAMETER Experiment Name: At_50mM_NH4NO3_L-to-H_P Parameter: Timepoint (hr) Value: 6
  misc_feature: MA Experiment 20001757 PARAMETER Experiment Name: At_50mM_NH4NO3_L-to-H_P Parameter: Tissue Value: Leaf
  misc_feature: MA Experiment 20001757 PARAMETER Experiment Name: At_50mM_NH4NO3_L-to-H_P Parameter: Treatment Value: 50mM NH4NO3 vs 100mM Mannitol
  misc_feature: MA Experiment ID: 20001768 Result: Up-regulated in Transcription
  misc_feature: MA Experiment 20001768 PARAMETER Experiment Name: At_Far-red-enriched-adult_P Parameter: Age (day) Value: 28
  misc_feature: MA Experiment 20001768 PARAMETER Experiment Name: At_Far-red-enriched-adult_P Parameter: Light Value: Far-red enriched vs. White
  misc_feature: MA Experiment 20001768 PARAMETER Experiment Name: At_Far-red-enriched-adult_P Parameter: Organism Value: A. thaliana
  misc_feature: MA Experiment 20001768 PARAMETER Experiment Name: At_Far-red-enriched-adult_P Parameter: Plant Line Value: Columbia
  misc_feature: MA Experiment 20001768 PARAMETER Experiment Name: At_Far-red-enriched-adult_P Parameter: Timepoint (hr) Value: 1
  misc_feature: MA Experiment 20001768 PARAMETER Experiment Name: At_Far-red-enriched-adult_P Parameter: Tissue Value: Aerial
  misc_feature: MA Experiment ID: 20001771 Result: Up-regulated in Transcription
  misc_feature: MA Experiment 20001771 PARAMETER Experiment Name: At_Far-red-enriched-adult_P Parameter: Age (day) Value: 28
  misc_feature: MA Experiment 20001771 PARAMETER Experiment Name: At_Far-red-enriched-adult_P Parameter: Light Value: Far-red enriched vs. White
  misc_feature: MA Experiment 20001771 PARAMETER Experiment Name: At_Far-red-enriched-adult_P Parameter: Organism Value: A. thaliana
  misc_feature: MA Experiment 20001771 PARAMETER Experiment Name: At_Far-red-enriched-adult_P Parameter: Plant Line Value: Columbia
  misc_feature: MA Experiment 20001771 PARAMETER Experiment Name: At_Far-red-enriched-adult_P Parameter: Timepoint (hr) Value: 16
  misc_feature: MA Experiment 20001771 PARAMETER Experiment Name: At_Far-red-enriched-adult_P Parameter: Tissue Value: Aerial
  misc_feature: MA Experiment ID: 20001906 Result: Down-regulated in Transcription
  misc_feature: MA Experiment 20001906 PARAMETER Experiment Name: At_Drought_Reproduction_P Parameter: Age (day) Value: 35
  misc_feature: MA Experiment 20001906 PARAMETER Experiment Name: At_Drought_Reproduction_P Parameter: Organism Value: A. thaliana
  misc_feature: MA Experiment 20001906 PARAMETER Experiment Name: At_Drought_Reproduction_P Parameter: Plant Line Value: WS
  misc_feature: MA Experiment 20001906 PARAMETER Experiment Name: At_Drought_Reproduction_P Parameter: Timepoint (day) Value: 5
  misc_feature: MA Experiment 20001906 PARAMETER Experiment Name: At_Drought_Reproduction_P Parameter: Tissue Value: Siliques
  misc_feature: MA Experiment 20001906 PARAMETER Experiment Name: At_Drought_Reproduction_P Parameter: Treatment Value: Drought vs. No Drought
  misc_feature: MA Experiment ID: 20001907 Result: Down-regulated in Transcription
  misc_feature: MA Experiment 20001907 PARAMETER Experiment Name: At_Drought_Reproduction_P Parameter: Age (day) Value: 37
  misc_feature: MA Experiment 20001907 PARAMETER Experiment Name: At_Drought_Reproduction_P Parameter: Organism Value: A. thaliana
  misc_feature: MA Experiment 20001907 PARAMETER Experiment Name: At_Drought_Reproduction_P Parameter: Plant Line Value: WS
  misc_feature: MA Experiment 20001907 PARAMETER Experiment Name: At_Drought_Reproduction_P Parameter: Timepoint (day) Value: 7
  misc_feature: MA Experiment 20001907 PARAMETER Experiment Name: At_Drought_Reproduction_P Parameter: Tissue Value: Siliques
  misc_feature: MA Experiment 20001907 PARAMETER Experiment Name: At_Drought_Reproduction_P Parameter: Treatment Value: Drought vs. No Drought
  misc_feature: MA Experiment ID: 20001908 Result: Down-regulated in Transcription
  misc_feature: MA Experiment 20001908 PARAMETER Experiment Name: At_Drought_Reproduction_P Parameter: Age (day) Value: 40
  misc_feature: MA Experiment 20001908 PARAMETER Experiment Name: At_Drought_Reproduction_P Parameter: Organism Value: A. thaliana
  misc_feature: MA Experiment 20001908 PARAMETER Experiment Name: At_Drought_Reproduction_P Parameter: Plant Line Value: WS
  misc_feature: MA Experiment 20001908 PARAMETER Experiment Name: At_Drought_Reproduction_P Parameter: Timepoint (day) Value: 10
  misc_feature: MA Experiment 20001908 PARAMETER Experiment Name: At_Drought_Reproduction_P Parameter: Tissue Value: Siliques
  misc_feature: MA Experiment 20001908 PARAMETER Experiment Name: At_Drought_Reproduction_P Parameter: Treatment Value: Drought vs. No Drought
aaacaaaaacttcaaagagagagagagagagagttttgtgaactcaagaaaataaaaaaagttatagttaatgggattcggcttagagagtatcaaatcaatctccggcggatggggcgcggcggcgcgttcctgtgacgcttgtaaatcagttaccgccgccgtgttctgtcgagttgactcagctttcttatgcatagcatgtgacacaagaatccattccttcactcgccacgagcgcgtgtgggtttgtgaagtttgtgaacaagctcccgccgccgtcacttgcaaagccgacgccgccgctctttgcgtcagttgtgatgccgatattcactctgctaatcctctcgctagccgtcacgaacgtgtccccgtcgaaactttcttcgactcagccgaaaccgccgtcgccaaaatctcagcttcttcgacttttggtatccttggctcatccaccaccgttgatttaaccgctgttccggttatggctgatgatctcggtttatgtccgtggttacttcctaatgatttcaacgaaccggctaaaatcgaaatcggaactgaaaacatgaaaggttcttctgactttatgttttctgatttcgatcggcttattgatttcgagtttccgaattcgttcaatcatcatcaaaacaacgccggaggagatagtcttgttccggttcagacgaaaacagagcctctcccgttaactaacaatgatcattgcttcgatattgatttctgcagatcaaagctctctgctttcacttacccttctcaatcagtcagccacagtgtttcgacttcttctattgaatacggtgtagttcctgacggaaacacaaacaactctgttaaccggagcacgatcactagctcgacgactggtggtgatcatcaagcgagctctatggatagagaagctagggttttgaggtacagagagaagagaaagaacaggaaatttgagaagacgattcgttacgcttcgaggaaagcttatgcagagtcacggccaaggatcaaaggccggtttgcgaaaagaacagagacagaaaacgacgacattttccttagtcatgtttatgcttcagcagcacacgcacagtacggtgtcgtaccaacgttctgattcgaatctacggtggataaacaatcaacctgaagacttcatatcttccaccgttgatttacagtcggtgtataataagtatagtgagtcttaccgtagacaaacatcttatcctctttaccgttttaattactttttttttacgcgctctcactgccactgtaactctttttttttttcttcctatatatgtatgcttatttttatttagaaaatgttatgaaatcatataatttggtaat

SEQ ID NO: 78712 - protein, 355 aa, Arabidopsis thaliana; identical to SEQ ID NO: 27540
  peptide (1)..(355): Ceres Seq. ID no. 12644373
  misc_feature (56)..(103): Pfam Name: B-box zinc finger Pfam Description: B-box zinc finger
  misc_feature (1)..(355): Homolog of NCBI NO: 18424009 NR Description: CONSTANS-like B-box zinc finger protein-like; id: At5g57660.1, supported by cDNA: 6639., supported by cDNA: supported by cDNA: gi_19347870, supported by cDNA: gi_21281082
  misc_feature (1)..(355): Homolog of NCBI NO: 21594050 NR Description: CONSTANS-like B-box zinc finger protein-like
  misc_feature (1)..(355): Homolog of NCBI NO: 17433047 NR Description: Zinc finger protein constans-like 15
  misc_feature (18)..(355): Homolog of NCBI NO: 4091806 NR Description: CONSTANS-like protein 2 [Malus x domestica]
  misc_feature (18)..(355): Homolog of NCBI NO: 4091804 NR Description: CONSTANS-like protein 1 [Malus x domestica]
  misc_feature (184)..(355): Homolog of NCBI NO: 15224620 NR Description: CONSTANS B-box zinc finger family protein; id: At2g24790.1, supported by cDNA: 17434., supported by cDNA: [Arabidopsis thaliana] >gi|17433082|sp|Q9SK53|COL8_ARATH Zinc
  misc_feature (184)..(355): Homolog of NCBI NO: 21553854 NR Description: zinc finger protein constans-like 8 [Arabidopsis
  misc_feature (17)..(173): Homolog of NCBI NO: 15224620 NR Description: CONSTANS B-box zinc finger family protein; id: At2g24790.1, supported by cDNA: 17434., supported by cDNA: [Arabidopsis thaliana] >gi|17433082|sp|Q9SK53|COL8_ARATH Zinc
  misc_feature (17)..(173): Homolog of NCBI NO: 21553854 NR Description: zinc finger protein constans-like 8 [Arabidopsis
  misc_feature (18)..(178): Homolog of NCBI NO: 7488604 NR Description: CONSTANS protein homolog COL1 - radish

SEQ ID NO: 78713 - protein, 216 aa, Arabidopsis thaliana; identical to SEQ ID NO: 27541
  peptide (1)..(216): Ceres Seq. ID no. 12644374
  misc_feature (151)..(190): Pfam Name: CCT motif Pfam Description: CCT motif
  misc_feature (1)..(216): Homolog of NCBI NO: 18424009 NR Description: CONSTANS-like B-box zinc finger protein-like; id: At5g57660.1, supported by cDNA: 6639., supported by cDNA: supported by cDNA: gi_19347870, supported by cDNA: gi_21281082
  misc_feature (1)..(216): Homolog of NCBI NO: 21594050 NR Description: CONSTANS-like B-box zinc finger protein-like
  misc_feature (1)..(216): Homolog of NCBI NO: 17433047 NR Description: Zinc finger protein constans-like 15
  misc_feature (1)..(216): Homolog of NCBI NO: 4091806 NR Description: CONSTANS-like protein 2 [Malus x domestica]
  misc_feature (1)..(216): Homolog of NCBI NO: 4091804 NR Description: CONSTANS-like protein 1 [Malus x domestica]
  misc_feature (45)..(216): Homolog of NCBI NO: 15224620 NR Description: CONSTANS B-box zinc finger family protein; id: At2g24790.1, supported by cDNA: 17434., supported by cDNA: [Arabidopsis thaliana] >gi|17433082|sp|Q9SK53|COL8_ARATH Zinc
  misc_feature (45)..(216): Homolog of NCBI NO: 21553854 NR Description: zinc finger protein constans-like 8 [Arabidopsis
  misc_feature (1)..(34): Homolog of NCBI NO: 15224620 NR Description: CONSTANS B-box zinc finger family protein; id: At2g24790.1, supported by cDNA: 17434., supported by cDNA: [Arabidopsis thaliana] >gi|17433082|sp|Q9SK53|COL8_ARATH Zinc
  misc_feature (1)..(34): Homolog of NCBI NO: 21553854 NR Description: zinc finger protein constans-like 8 [Arabidopsis
  misc_feature (1)..(39): Homolog of NCBI NO: 7488604 NR Description: CONSTANS protein homolog COL1 - radish

SEQ ID NO: 78714 - protein, 188 aa, Arabidopsis thaliana; identical to SEQ ID NO: 27542
  peptide (1)..(188): Ceres Seq. ID no. 12644375
  misc_feature (123)..(162): Pfam Name: CCT motif Pfam Description: CCT motif
  misc_feature (1)..(188): Homolog of NCBI NO: 18424009 NR Description: CONSTANS-like B-box zinc finger protein-like; id: At5g57660.1, supported by cDNA: 6639., supported by cDNA: supported by cDNA: gi_19347870, supported by cDNA: gi_21281082
  misc_feature (1)..(188): Homolog of NCBI NO: 21594050 NR Description: CONSTANS-like B-box zinc finger protein-like
  misc_feature (1)..(188): Homolog of NCBI NO: 17433047 NR Description: Zinc finger protein constans-like 15
  misc_feature (1)..(188): Homolog of NCBI NO: 4091806 NR Description: CONSTANS-like protein 2 [Malus x domestica]
  misc_feature (1)..(188): Homolog of NCBI NO: 4091804 NR Description: CONSTANS-like protein 1 [Malus x domestica]
  misc_feature (17)..(188): Homolog of NCBI NO: 15224620 NR Description: CONSTANS B-box zinc finger family protein; id: At2g24790.1, supported by cDNA: 17434., supported by cDNA: [Arabidopsis thaliana] >gi|17433082|sp|Q9SK53|COL8_ARATH Zinc
  misc_feature (17)..(188): Homolog of NCBI NO: 21553854 NR Description: zinc finger protein constans-like 8 [Arabidopsis
  misc_feature (1)..(11): Homolog of NCBI NO: 7488604 NR Description: CONSTANS protein homolog COL1 - radish
  misc_feature (28)..(188): Homolog of NCBI NO: 7488604 NR Description: CONSTANS protein homolog COL1 - radish
  misc_feature (4)..(188): Homolog of NCBI NO: 4557093 NR Description: zinc finger protein [Pinus radiata]

SEQ ID NO: 78715 - DNA, 1194 bp, Arabidopsis thaliana
  misc_feature (1)..(1194): Ceres Seq. ID no. 12644441
  misc_feature: MA Experiment ID: 20000355 Result: Down-regulated in Transcription
  misc_feature: MA Experiment 20000355 PARAMETER Experiment Name: At_Siliques_Sub_P Parameter: Age (day) Value: 21
  misc_feature: MA Experiment 20000355 PARAMETER Experiment Name: At_Siliques_Sub_P Parameter: Organism Value: A. thaliana
  misc_feature: MA Experiment 20000355 PARAMETER Experiment Name: At_Siliques_Sub_P Parameter: Plant Line Value: WS
  misc_feature: MA Experiment 20000355 PARAMETER Experiment Name: At_Siliques_Sub_P Parameter: Tissue Value: Less Than 5mm Siliques vs. Whole Plant
atggcattaacccttttgtctcacgaattatctgacctctgtatcggtaagccacctttacggtgtctctccgtcgccacagccaccgtagctgacgccatcgccgctctcaaatcctctgacgaaccgttcctcaccgtatggagctgtaatcacgatgagaaaacagatgataatgataagtgtgagtgtttgggtaagatctgtatggctgatgtaatctgttacctatccaaattcgacaacaatgttttgtctctttcctctgctttcgacgcatctgtctctgttcttcttcccaaatctcgtgccctcgtcgtccatgttcaatcttcttgcagtttgattgaagctattgatctgataatcaaaggagcacagaatctgattgttccgattcatacgaaatcaatcacaaagagaagacaacaacaaaaacttctgaaacgaaacgtcgtcgtttcactcaccaacgcaacttcaacaacccacaaaaacagccgagaattctgctggatcacacaagaagacattattcgattccttctcgattccattagcgttttctctccattaccgtcgctttctatctccgatcttggagttatcaatagtacacacactatcctcgccgttgattactactcctcagctgcttccgccgtctctgccatctctcgtgccatcttggacaatgtctctgtcgcggtggttggtaaaggatgcgagatttcaccgatgacactcgcttgctgcgatgaaactgccgtagcagcggttgctacactctctgccggagatttaatgtcctatatcgacggtagtggtccgccggagagtctagttggagtagttaggaatcgtttggaagataaagggatggttggattaatctcactcattgattctttgtcgttgtcgtcggggtcttcctcggatgaagaatctccggcggggaagacgagaatgacttcttcgtatgggaggtcggtgagtagcgcggcgaggatggctaggaaatcggtggcgatagtgtgtaatcggaagagttctttaatggcggtgatgatacaagctattgctcatagagtgagttatgtgtgggtgattgatgaagatggttgtttgattggtatggttacttttgttgatatattgaaactttttagggaatttttggatgatgaaaactaa

SEQ ID NO: 78716 - protein, 397 aa, Arabidopsis thaliana
  peptide (1)..(397): Ceres Seq. ID no. 12644442
  misc_feature (344)..(390): Pfam Name: CBS domain Pfam Description: CBS domain
  misc_feature (1)..(378): Homolog of NCBI NO: 15238832 NR Description: putative protein; protein id: At5g53750.1 thaliana] >gi|9759069|dbj|BAB09547.1|
  misc_feature (1)..(396): Homolog of NCBI NO: 27754524 NR Description: unknown protein [Arabidopsis thaliana]
  misc_feature (1)..(396): Homolog of NCBI NO: 30687603 NR Description: expressed protein [Arabidopsis thaliana]
  misc_feature (1)..(380): Homolog of NCBI NO: 7486257 NR Description: hypothetical protein F27G19.60 - Arabidopsis >gi|4972071|emb|CAB43878.1| hypothetical protein [Arabidopsis >gi|7269600|emb|CAB81396.1| hypothetical protein [Arabidopsis
  misc_feature (169)..(393): Homolog of NCBI NO: 37535750 NR Description: unknown protein [Oryza sativa (japonica
  misc_feature (1)..(143): Homolog of NCBI NO: 37535750 NR Description: unknown protein [Oryza sativa (japonica
  misc_feature (1)..(385): Homolog of NCBI NO: 19386732 NR Description: P0678F11.21 [Oryza sativa (japonica
  misc_feature (65)..(386): Homolog of NCBI NO: 15218643 NR Description: hypothetical protein; protein id: At1g65320.1 thaliana] >gi|26449327|dbj|BAC41791.1| unknown protein
  misc_feature (115)..(386): Homolog of NCBI NO: 7487793 NR Description: hypothetical protein T8F5.10 - Arabidopsis
MALTLLSHELSDLCIGKPPLRCLSVATATVADAIAALKSSDEPFLTVWSCNHDEKTDDNDKCECLGKICMADVICYLSKFDNNVLSLSSAFDASVSVLLPKSRALVVHVQSSCSLIEAIDLIIKGAQNLIVPIHTKSITKRRQQQKLLKRNVVVSLTNATSTTHKNSREFCWITQEDIIRFLLDSISVFSPLPSLSISDLGVINSTHTILAVDYYSSAASAVSAISRAILDNVSVAVVGKGCEISPMTLACCDETAVAAVATLSAGDLMSYIDGSGPPESLVGVVRNRLEDKGMVGLISLIDSLSLSSGSSSDEESPAGKTRMTSSYGRSVSSAARMARKSVAIVCNRKSSLMAVMIQAIAHRVSYVWVIDEDGCLIGMVTFVDILKLFREFLDDEN

SEQ ID NO: 78717 - protein, 328 aa, Arabidopsis thaliana
  peptide (1)..(328): Ceres Seq. ID no. 12644443
  misc_feature (275)..(321): Pfam Name: CBS domain Pfam Description: CBS domain
  misc_feature (1)..(309): Homolog of NCBI NO: 15238832 NR Description: putative protein; protein id: At5g53750.1 thaliana] >gi|9759069|dbj|BAB09547.1|
  misc_feature (1)..(327): Homolog of NCBI NO: 27754524 NR Description: unknown protein [Arabidopsis thaliana]
  misc_feature (1)..(327): Homolog of NCBI NO: 30687603 NR Description: expressed protein [Arabidopsis thaliana]
  misc_feature (1)..(311): Homolog of NCBI NO: 7486257 NR Description: hypothetical protein F27G19.60 - Arabidopsis >gi|4972071|emb|CAB43878.1| hypothetical protein [Arabidopsis >gi|7269600|emb|CAB81396.1| hypothetical protein [Arabidopsis
  misc_feature (100)..(324): Homolog of NCBI NO: 37535750 NR Description: unknown protein [Oryza sativa (japonica
  misc_feature (1)..(74): Homolog of NCBI NO: 37535750 NR Description: unknown protein [Oryza sativa (japonica
  misc_feature (1)..(316): Homolog of NCBI NO: 19386732 NR Description: P0678F11.21 [Oryza sativa (japonica
  misc_feature (1)..(317): Homolog of NCBI NO: 15218643 NR Description: hypothetical protein; protein id: At1g65320.1 thaliana] >gi|26449327|dbj|BAC41791.1| unknown protein
  misc_feature (46)..(317): Homolog of NCBI NO: 7487793 NR Description: hypothetical protein T8F5.10 - Arabidopsis
MADVICYLSKFDNNVLSLSSAFDASVSVLLPKSRALVVHVQSSCSLIEAIDLIIKGAQNLIVPIHTKSITKRRQQQKLLKRNVVVSLTNATSTTHKNSREFCWITQEDIIRFLLDSISVFSPLPSLSISDLGVINSTHTILAVDYYSSAASAVSAISRAILDNVSVAVVGKGCEISPMTLACCDETAVAAVATLSAGDLMSYIDGSGPPESLVGVVRNRLEDKGMVGLISLIDSLSLSSGSSSDEESPAGKTRMTSSYGRSVSSAARMARKSVAIVCNRKSSLMAVMIQAIAHRVSYVWVIDEDGCLIGMVTFVDILKLFREFLDDEN

SEQ ID NO: 78718 - DNA, 1407 bp, Arabidopsis thaliana
  misc_feature (1)..(1407): Ceres Seq. ID no. 12644485
  misc_feature: MA Experiment ID: 108435 Result: Up-regulated in Transcription
  misc_feature: MA Experiment 108435 PARAMETER Experiment Name: At_stm_Mutants_cDNA_P Parameter: Plant Line Value: wt Landsburg vs stm
  misc_feature: MA Experiment 108435 PARAMETER Experiment Name: At_stm_Mutants_cDNA_P Parameter: Tissue Value: Shoot Apical Meristem Region
  misc_feature: MA Experiment ID: 108461 Result: Up-regulated in Transcription
  misc_feature: MA Experiment 108461 PARAMETER Experiment Name: At_Germinating_Seeds_cDNA_P Parameter: Age (day) Value: 1 vs. 0
  misc_feature: MA Experiment 108461 PARAMETER Experiment Name: At_Germinating_Seeds_cDNA_P Parameter: Tissue Value: Germinating Seeds
  misc_feature: MA Experiment ID: 108462 Result: Up-regulated in Transcription
  misc_feature: MA Experiment 108462 PARAMETER Experiment Name: At_Germinating_Seeds_cDNA_P Parameter: Age (day) Value: 2 vs. 0
  misc_feature: MA Experiment 108462 PARAMETER Experiment Name: At_Germinating_Seeds_cDNA_P Parameter: Tissue Value: Germinating Seeds
  misc_feature: MA Experiment ID: 108463 Result: Up-regulated in Transcription
  misc_feature: MA Experiment 108463 PARAMETER Experiment Name: At_Germinating_Seeds_cDNA_P Parameter: Age (day) Value: 3 vs. 0
  misc_feature: MA Experiment 108463 PARAMETER Experiment Name: At_Germinating_Seeds_cDNA_P Parameter: Tissue Value: Germinating Seeds
  misc_feature: MA Experiment ID: 108464 Result: Up-regulated in Transcription
  misc_feature: MA Experiment 108464 PARAMETER Experiment Name: At_Germinating_Seeds_cDNA_P Parameter: Age (day) Value: 4 vs. 0
  misc_feature: MA Experiment 108464 PARAMETER Experiment Name: At_Germinating_Seeds_cDNA_P Parameter: Tissue Value: Germinating Seeds
  misc_feature: MA Experiment ID: 108488 Result: Down-regulated in Transcription
  misc_feature: MA Experiment ID: 108489 Result: Down-regulated in Transcription
  misc_feature: MA Experiment ID: 108574 Result: Up-regulated in Transcription
  misc_feature: MA Experiment 108574 PARAMETER Experiment Name: At_Wounding__cDNA_P Parameter: Timepoint (hr) Value: 1
  misc_feature: MA Experiment 108574 PARAMETER Experiment Name: At_Wounding__cDNA_P Parameter: Tissue Value: Aerial
  misc_feature: MA Experiment 108574 PARAMETER Experiment Name: At_Wounding__cDNA_P Parameter: Treatment Value: Wounding vs. No Wounding
  misc_feature: MA Experiment ID: 108579 Result: Up-regulated in Transcription
  misc_feature: MA Experiment 108579 PARAMETER Experiment Name: At_4deg_Cold_cDNA_P Parameter: Temperature (deg C) Value: 4 vs. 22
  misc_feature: MA Experiment 108579 PARAMETER Experiment Name: At_4deg_Cold_cDNA_P Parameter: Timepoint (hr) Value: 6
  misc_feature: MA Experiment 108579 PARAMETER Experiment Name: At_4deg_Cold_cDNA_P Parameter: Tissue Value: Aerial
  misc_feature: MA Experiment ID: 108668 Result: Down-regulated in Transcription
  misc_feature: MA Experiment 108668 PARAMETER Experiment Name: At_2mM_SA_cDNA_P Parameter: Plant Line Value: WS
  misc_feature: MA Experiment 108668 PARAMETER Experiment Name: At_2mM_SA_cDNA_P Parameter: Timepoint (hr) Value: 6
  misc_feature: MA Experiment 108668 PARAMETER Experiment Name: At_2mM_SA_cDNA_P Parameter: Treatment Value: 2mM SA vs. No Treatment
  misc_feature: MA Experiment ID: 20000093 Result: Down-regulated in Transcription
  misc_feature: MA Experiment 20000093 PARAMETER Experiment Name: At_42deg_Heat_cDNA_P Parameter: Temperature (deg C) Value: 42 vs. 22
  misc_feature: MA Experiment 20000093 PARAMETER Experiment Name: At_42deg_Heat_cDNA_P Parameter: Timepoint (hr) Value: 0.5
  misc_feature: MA Experiment 20000093 PARAMETER Experiment Name: At_42deg_Heat_cDNA_P Parameter: Tissue Value: Aerial
  misc_feature: MA Experiment ID: 20000171 Result: Up-regulated in Transcription
  misc_feature: MA Experiment 20000171 PARAMETER Experiment Name: At_42deg_Heat_P Parameter: Age (day) Value: 14
  misc_feature: MA Experiment 20000171 PARAMETER Experiment Name: At_42deg_Heat_P Parameter: Organism Value: A. thaliana
  misc_feature: MA Experiment 20000171 PARAMETER Experiment Name: At_42deg_Heat_P Parameter: Plant Line Value: WS
  misc_feature: MA Experiment 20000171 PARAMETER Experiment Name: At_42deg_Heat_P Parameter: Temperature (deg C) Value: 42 vs. 22
  misc_feature: MA Experiment 20000171 PARAMETER Experiment Name: At_42deg_Heat_P Parameter: Timepoint (hr) Value: 1
  misc_feature: MA Experiment 20000171 PARAMETER Experiment Name: At_42deg_Heat_P Parameter: Tissue Value: Aerial
  misc_feature: MA Experiment ID: 20000173 Result: Up-regulated in Transcription
  misc_feature: MA Experiment 20000173 PARAMETER Experiment Name: At_42deg_Heat_P Parameter: Age (day) Value: 14
  misc_feature: MA Experiment 20000173 PARAMETER Experiment Name: At_42deg_Heat_P Parameter: Organism Value: A. thaliana
  misc_feature: MA Experiment 20000173 PARAMETER Experiment Name: At_42deg_Heat_P Parameter: Plant Line Value: WS
  misc_feature: MA Experiment 20000173 PARAMETER Experiment Name: At_42deg_Heat_P Parameter: Temperature (deg C) Value: 42 vs. 22
  misc_feature: MA Experiment 20000173 PARAMETER Experiment Name: At_42deg_Heat_P Parameter: Timepoint (hr) Value: 6
  misc_feature: MA Experiment 20000173 PARAMETER Experiment Name: At_42deg_Heat_P Parameter: Tissue Value: Aerial
  misc_feature: MA Experiment ID: 20000180 Result: Up-regulated in Transcription
  misc_feature: MA Experiment 20000180 PARAMETER Experiment Name: At_Germinating_Seeds_P Parameter: Age (hr) Value: 24 vs. 0
  misc_feature: MA Experiment 20000180 PARAMETER Experiment Name: At_Germinating_Seeds_P Parameter: Tissue Value: Germinating Seeds
  misc_feature: MA Experiment ID: 20000182 Result: Down-regulated in Transcription
  misc_feature: MA Experiment 20000182 PARAMETER Experiment Name: At_2mM_SA_P Parameter: Age (day) Value: 14
  misc_feature: MA Experiment 20000182 PARAMETER Experiment Name: At_2mM_SA_P Parameter: Organism Value: A. thaliana
  misc_feature: MA Experiment 20000182 PARAMETER Experiment Name: At_2mM_SA_P Parameter: Plant Line Value: WS
  misc_feature: MA Experiment 20000182 PARAMETER Experiment Name: At_2mM_SA_P Parameter: Timepoint (hr) Value: 6
  misc_feature: MA Experiment 20000182 PARAMETER Experiment Name: At_2mM_SA_P Parameter: Tissue Value: Aerial
  misc_feature: MA Experiment 20000182 PARAMETER Experiment Name: At_2mM_SA_P Parameter: Treatment Value: 2mM SA vs. No Treatment
  misc_feature: MA Experiment ID: 20000184 Result: Up-regulated in Transcription
  misc_feature: MA Experiment 20000184 PARAMETER Experiment Name: At_Shoots__P Parameter: Age (day) Value: 7
  misc_feature: MA Experiment 20000184 PARAMETER Experiment Name: At_Shoots__P Parameter: Tissue Value: Shoots vs. Whole Plant
  misc_feature: MA Experiment ID: 20000234 Result: Up-regulated in Transcription
  misc_feature: MA Experiment 20000234 PARAMETER Experiment Name: At_Siliques_P Parameter: Age (day) Value: 21
  misc_feature: MA Experiment 20000234 PARAMETER Experiment Name: At_Siliques_P Parameter: Organism Value: A. thaliana
  misc_feature: MA Experiment 20000234 PARAMETER Experiment Name: At_Siliques_P Parameter: Plant Line Value: WS
  misc_feature: MA Experiment 20000234 PARAMETER Experiment Name: At_Siliques_P Parameter: Tissue Value: Less Than 5mm Siliques vs. Whole Plant
  misc_feature: MA Experiment ID: 20000264 Result: Up-regulated in Transcription
  misc_feature: MA Experiment 20000264 PARAMETER Experiment Name: At_Open_Flower_P Parameter: Age (day) Value: 21
  misc_feature: MA Experiment 20000264 PARAMETER Experiment Name: At_Open_Flower_P Parameter: Plant Line Value: WS
  misc_feature: MA Experiment 20000264 PARAMETER Experiment Name: At_Open_Flower_P Parameter: Tissue Value: Open Flower vs. Whole Plant
  misc_feature: MA Experiment ID: 20000267 Result: Up-regulated in Transcription
  misc_feature: MA Experiment 20000267 PARAMETER Experiment Name: At_Drought_P Parameter: Age (day) Value: 7
  misc_feature: MA Experiment 20000267 PARAMETER Experiment Name: At_Drought_P Parameter: Organism Value: A. thaliana
  misc_feature: MA Experiment 20000267 PARAMETER Experiment Name: At_Drought_P Parameter: Plant Line Value: WS
  misc_feature: MA Experiment 20000267 PARAMETER Experiment Name: At_Drought_P Parameter: Timepoint (hr) Value: 6
  misc_feature: MA Experiment 20000267 PARAMETER Experiment Name: At_Drought_P Parameter: Tissue Value: Whole Plant
  misc_feature: MA Experiment 20000267 PARAMETER Experiment Name: At_Drought_P Parameter: Treatment Value: Drought vs. No Drought
  misc_feature: MA Experiment ID: 20000268 Result: Up-regulated in Transcription
  misc_feature: MA Experiment 20000268 PARAMETER Experiment Name: At_100mM_NaCl__P Parameter: Age (day) Value: 14
  misc_feature: MA Experiment 20000268 PARAMETER Experiment Name: At_100mM_NaCl__P Parameter: Organism Value: A. thaliana
  misc_feature: MA Experiment 20000268 PARAMETER Experiment Name: At_100mM_NaCl__P Parameter: Plant Line Value: WS
  misc_feature: MA Experiment 20000268 PARAMETER Experiment Name: At_100mM_NaCl__P Parameter: Timepoint (hr) Value: 6
  misc_feature: MA Experiment 20000268 PARAMETER Experiment Name: At_100mM_NaCl__P Parameter: Tissue Value: Whole Plant
  misc_feature: MA Experiment 20000268 PARAMETER Experiment Name: At_100mM_NaCl__P Parameter: Treatment Value: 100mM NaCl vs. No Treatment
  misc_feature: MA Experiment ID: 20000308 Result: Up-regulated in Transcription
  misc_feature: MA Experiment 20000308 PARAMETER Experiment Name: At_100mM_NaCl__P Parameter: Age (day) Value: 17
  misc_feature: MA Experiment 20000308 PARAMETER Experiment Name: At_100mM_NaCl__P Parameter: Organism Value: A. thaliana
  misc_feature: MA Experiment 20000308 PARAMETER Experiment Name: At_100mM_NaCl__P Parameter: Plant Line Value: WS
  misc_feature: MA Experiment 20000308 PARAMETER Experiment Name: At_100mM_NaCl__P Parameter: Timepoint (hr) Value: 72
  misc_feature: MA Experiment 20000308 PARAMETER Experiment Name: At_100mM_NaCl__P Parameter: Tissue Value: Whole Plant
  misc_feature: MA Experiment 20000308 PARAMETER Experiment Name: At_100mM_NaCl__P Parameter: Treatment Value: 100mM NaCl vs. No Treatment
  misc_feature: MA Experiment ID: 20000506 Result: Up-regulated in Transcription
  misc_feature: MA Experiment 20000506 PARAMETER Experiment Name: At_Wounding_P Parameter: Organism Value: A. thaliana
  misc_feature: MA Experiment 20000506 PARAMETER Experiment Name: At_Wounding_P Parameter: Plant Line Value: WS
  misc_feature: MA Experiment 20000506 PARAMETER Experiment Name: At_Wounding_P Parameter: Timepoint (hr) Value: 6
  misc_feature: MA Experiment 20000506 PARAMETER Experiment Name: At_Wounding_P Parameter: Tissue Value: Aerial
  misc_feature: MA Experiment 20000506 PARAMETER Experiment Name: At_Wounding_P Parameter: Treatment Value: Wounding vs. No Wounding
  misc_feature: MA Experiment ID: 20000573 Result: Down-regulated in Transcription
  misc_feature: MA Experiment 20000573 PARAMETER Experiment Name: At_100uM_ABA_Mutants__P Parameter: Organism Value: A. thaliana
  misc_feature: MA Experiment 20000573 PARAMETER Experiment Name: At_100uM_ABA_Mutants__P Parameter: Plant Line Value: CS22 vs. Ler wt
  misc_feature: MA Experiment 20000573 PARAMETER Experiment Name: At_100uM_ABA_Mutants__P Parameter: Timepoint (hr) Value: N/A
  misc_feature: MA Experiment 20000573 PARAMETER Experiment Name: At_100uM_ABA_Mutants__P Parameter: Tissue Value: Whole Plant
  misc_feature: MA Experiment 20000573 PARAMETER Experiment Name: At_100uM_ABA_Mutants__P Parameter: Treatment Value: None
  misc_feature: MA Experiment ID: 20000574 Result: Down-regulated in Transcription
  misc_feature: MA Experiment 20000574 PARAMETER Experiment Name: At_100uM_ABA_Mutants__P Parameter: Organism Value: A. thaliana
  misc_feature: MA Experiment 20000574 PARAMETER Experiment Name: At_100uM_ABA_Mutants__P Parameter: Plant Line Value: CS23 vs. Ler wt
  misc_feature: MA Experiment 20000574 PARAMETER Experiment Name: At_100uM_ABA_Mutants__P Parameter: Timepoint (hr) Value: N/A
  misc_feature: MA Experiment 20000574 PARAMETER Experiment Name: At_100uM_ABA_Mutants__P Parameter: Tissue Value: Whole Plant
  misc_feature: MA Experiment 20000574 PARAMETER Experiment Name: At_100uM_ABA_Mutants__P Parameter: Treatment Value: None
  misc_feature: MA Experiment ID: 20001248 Result: Down-regulated in Transcription
  misc_feature: MA Experiment 20001248 PARAMETER Experiment Name: At_Far-red-induction_P Parameter: Age (day) Value: 7
  misc_feature: MA Experiment 20001248 PARAMETER Experiment Name: At_Far-red-induction_P Parameter: Light Value: Far-red vs. White
  misc_feature: MA Experiment 20001248 PARAMETER Experiment Name: At_Far-red-induction_P Parameter: Organism Value: A. thaliana
  misc_feature: MA Experiment 20001248 PARAMETER Experiment Name: At_Far-red-induction_P Parameter: Plant Line Value: Columbia
  misc_feature: MA Experiment 20001248 PARAMETER Experiment Name: At_Far-red-induction_P Parameter: Timepoint (hr) Value: 4
  misc_feature: MA Experiment 20001248 PARAMETER Experiment Name: At_Far-red-induction_P Parameter: Tissue Value: Whole Plant
  misc_feature: MA Experiment ID: 20001450 Result: Down-regulated in Transcription
  misc_feature: MA Experiment 20001450 PARAMETER Experiment Name: At_Far-red-induction_P Parameter: Age (day) Value: 7
  misc_feature: MA Experiment 20001450 PARAMETER Experiment Name: At_Far-red-induction_P Parameter: Light Value: Far-red vs. White
  misc_feature: MA Experiment 20001450 PARAMETER Experiment Name: At_Far-red-induction_P Parameter: Organism Value: A. thaliana
  misc_feature: MA Experiment 20001450 PARAMETER Experiment Name: At_Far-red-induction_P Parameter: Plant Line Value: Columbia
  misc_feature: MA Experiment 20001450 PARAMETER Experiment Name: At_Far-red-induction_P Parameter: Timepoint (hr) Value: 8
  misc_feature: MA Experiment 20001450 PARAMETER Experiment Name: At_Far-red-induction_P Parameter: Tissue Value: Whole Plant
  misc_feature: MA Experiment ID: 20001458 Result: Down-regulated in Transcription
  misc_feature: MA Experiment 20001458 PARAMETER Experiment Name: At_50mM_NH4NO3_L-to-H_P Parameter: Age (day) Value: Undefined
  misc_feature: MA Experiment 20001458 PARAMETER Experiment Name: At_50mM_NH4NO3_L-to-H_P Parameter: Organism Value: Undefined
  misc_feature: MA Experiment 20001458 PARAMETER Experiment Name: At_50mM_NH4NO3_L-to-H_P Parameter: Plant Line Value: Undefined
  misc_feature: MA Experiment 20001458 PARAMETER Experiment Name: At_50mM_NH4NO3_L-to-H_P Parameter: Timepoint (hr) Value: 2
  misc_feature: MA Experiment 20001458 PARAMETER Experiment Name: At_50mM_NH4NO3_L-to-H_P Parameter: Tissue Value: Siliques
  misc_feature: MA Experiment 20001458 PARAMETER Experiment Name: At_50mM_NH4NO3_L-to-H_P Parameter: Treatment Value: 50mM NH4NO3 vs. 100mM Manitol
  misc_feature: MA Experiment ID: 20001554 Result: Up-regulated in Transcription
  misc_feature: MA Experiment 20001554 PARAMETER Experiment Name: At_Drought_Soil_Dry_P Parameter: Age (day) Value: 21
  misc_feature: MA Experiment 20001554 PARAMETER Experiment Name: At_Drought_Soil_Dry_P Parameter: Organism Value: A. thaliana
  misc_feature: MA Experiment 20001554 PARAMETER Experiment Name: At_Drought_Soil_Dry_P Parameter: Plant Line Value: WS
  misc_feature: MA Experiment 20001554 PARAMETER Experiment Name: At_Drought_Soil_Dry_P Parameter: Post Timepoint (hr) Value: None
  misc_feature: MA Experiment 20001554 PARAMETER Experiment Name: At_Drought_Soil_Dry_P Parameter: Post-Treatment Value: None
  misc_feature: MA Experiment 20001554 PARAMETER Experiment Name: At_Drought_Soil_Dry_P Parameter: Timepoint (day) Value: 7
  misc_feature: MA Experiment 20001554 PARAMETER Experiment Name: At_Drought_Soil_Dry_P Parameter: Treatment Value: Drought vs. No Drought
  misc_feature: MA Experiment ID: 20001555 Result: Up-regulated in Transcription
  misc_feature: MA Experiment 20001555 PARAMETER Experiment Name: At_Drought_Soil_Dry_P Parameter: Age (day) Value: 24
  misc_feature: MA Experiment 20001555 PARAMETER Experiment Name: At_Drought_Soil_Dry_P Parameter: Organism Value: A. thaliana
  misc_feature: MA Experiment 20001555 PARAMETER Experiment Name: At_Drought_Soil_Dry_P Parameter: Plant Line Value: WS
  misc_feature: MA Experiment 20001555 PARAMETER Experiment Name: At_Drought_Soil_Dry_P Parameter: Post Timepoint (hr) Value: None
  misc_feature: MA Experiment 20001555 PARAMETER Experiment Name: At_Drought_Soil_Dry_P Parameter: Post-Treatment Value: None
  misc_feature: MA Experiment 20001555 PARAMETER Experiment Name: At_Drought_Soil_Dry_P Parameter: Timepoint (day) Value: 10
  misc_feature: MA Experiment 20001555 PARAMETER Experiment Name: At_Drought_Soil_Dry_P Parameter: Treatment Value: Drought vs. No Drought
  misc_feature: MA Experiment ID: 20001556 Result: Up-regulated in Transcription
  misc_feature: MA Experiment 20001556 PARAMETER Experiment Name: At_Drought_Soil_Dry_P Parameter: Age (day) Value: 26
  misc_feature: MA Experiment 20001556 PARAMETER Experiment Name: At_Drought_Soil_Dry_P Parameter: Organism Value: A. thaliana
  misc_feature: MA Experiment 20001556 PARAMETER Experiment Name: At_Drought_Soil_Dry_P Parameter: Plant Line Value: WS
  misc_feature: MA Experiment 20001556 PARAMETER Experiment Name: At_Drought_Soil_Dry_P Parameter: Post Timepoint (hr) Value: None
  misc_feature: MA Experiment 20001556 PARAMETER Experiment Name: At_Drought_Soil_Dry_P Parameter: Post-Treatment Value: None
  misc_feature: MA Experiment 20001556 PARAMETER Experiment Name: At_Drought_Soil_Dry_P Parameter: Timepoint (day) Value: 12
  misc_feature: MA Experiment 20001556 PARAMETER Experiment Name: At_Drought_Soil_Dry_P Parameter: Treatment Value: Drought vs. No Drought
  misc_feature: MA Experiment ID: 20001557 Result: Up-regulated in Transcription
  misc_feature: MA Experiment 20001557 PARAMETER Experiment Name: At_Drought_Soil_Dry_P Parameter: Age (day) Value: 27
  misc_feature: MA Experiment 20001557 PARAMETER Experiment Name: At_Drought_Soil_Dry_P Parameter: Organism Value: A. thaliana
  misc_feature: MA Experiment 20001557 PARAMETER Experiment Name: At_Drought_Soil_Dry_P Parameter: Plant Line Value: WS
  misc_feature: MA Experiment 20001557 PARAMETER Experiment Name: At_Drought_Soil_Dry_P Parameter: Post Timepoint (hr) Value: 3
  misc_feature: MA Experiment 20001557 PARAMETER Experiment Name: At_Drought_Soil_Dry_P Parameter: Post-Treatment Value: Re-Water vs. No Drought
  misc_feature: MA Experiment 20001557 PARAMETER Experiment Name: At_Drought_Soil_Dry_P Parameter: Timepoint (day) Value: 13
  misc_feature: MA Experiment 20001557 PARAMETER Experiment Name: At_Drought_Soil_Dry_P Parameter: Treatment Value: Drought vs. No Drought
  misc_feature: MA Experiment ID: 20001560 Result: Up-regulated in Transcription
  misc_feature: MA Experiment 20001560 PARAMETER Experiment Name: At_Drought_Soil_Dry_P Parameter: Age (day) Value: 28
  misc_feature: MA Experiment 20001560 PARAMETER Experiment Name: At_Drought_Soil_Dry_P Parameter: Organism Value: A. thaliana
  misc_feature: MA Experiment 20001560 PARAMETER Experiment Name: At_Drought_Soil_Dry_P Parameter: Plant Line Value: WS
  misc_feature: MA Experiment 20001560 PARAMETER Experiment Name: At_Drought_Soil_Dry_P Parameter: Post Timepoint (hr) Value: None
  misc_feature: MA Experiment 20001560 PARAMETER Experiment Name: At_Drought_Soil_Dry_P Parameter: Post-Treatment Value: None
  misc_feature: MA Experiment 20001560 PARAMETER Experiment Name: At_Drought_Soil_Dry_P Parameter: Timepoint (day) Value: 14
  misc_feature: MA Experiment 20001560 PARAMETER Experiment Name: At_Drought_Soil_Dry_P Parameter: Treatment Value: Drought vs. No Drought
  misc_feature: MA Experiment ID: 20001757 Result: Down-regulated in Transcription
  misc_feature: MA Experiment 20001757 PARAMETER Experiment Name: At_50mM_NH4NO3_L-to-H_P Parameter: Timepoint (hr) Value: 6
  misc_feature: MA Experiment 20001757 PARAMETER Experiment Name: At_50mM_NH4NO3_L-to-H_P Parameter: Tissue Value: Leaf
  misc_feature: MA Experiment 20001757 PARAMETER Experiment Name: At_50mM_NH4NO3_L-to-H_P Parameter: Treatment Value: 50mM NH4NO3 vs 100mM Mannitol
  misc_feature: MA Experiment ID: 20001761 Result: Down-regulated in Transcription
  misc_feature: MA Experiment 20001761 PARAMETER Experiment Name: At_50mM_NH4NO3_L-to-H_P Parameter: Timepoint (hr) Value: 4
  misc_feature: MA Experiment 20001761 PARAMETER Experiment Name: At_50mM_NH4NO3_L-to-H_P Parameter: Tissue Value: Siliques
  misc_feature: MA Experiment 20001761 PARAMETER Experiment Name: At_50mM_NH4NO3_L-to-H_P Parameter: Treatment Value: 50mM NH4NO3 vs 100mM Mannitol
  misc_feature: MA Experiment ID: 20001904 Result: Up-regulated in Transcription
  misc_feature: MA Experiment 20001904 PARAMETER Experiment Name: At_Drought_Reproduction_P Parameter: Age (day) Value: 37
  misc_feature: MA Experiment 20001904 PARAMETER Experiment Name: At_Drought_Reproduction_P Parameter: Organism Value: A. thaliana
  misc_feature: MA Experiment 20001904 PARAMETER Experiment Name: At_Drought_Reproduction_P Parameter: Plant Line Value: WS
  misc_feature: MA Experiment 20001904 PARAMETER Experiment Name: At_Drought_Reproduction_P Parameter: Timepoint (day) Value: 7
  misc_feature: MA Experiment 20001904 PARAMETER Experiment Name: At_Drought_Reproduction_P Parameter: Tissue Value: Rosettes
  misc_feature: MA Experiment 20001904 PARAMETER Experiment Name: At_Drought_Reproduction_P Parameter: Treatment Value: Drought vs. No Drought
atgggtgtttttggatcgaatgaatcgtcaagcatgagtattgtgatgtatccgtggttagcctttggtcacatgactccttttcttcacctatccaacaagctcgcagagaaaggtcacaagattgttttcttgcttcccaagaaagcactaaaccagcttgaacctcttaatctctacccaaatctcatcactttccacaccatctctatccctcaggtcaaagggctccctccgggtgcggagacaaactccgacgtccctttcttcttgacacatttgcttgcagttgcaatggaccaaacccggccagaggtcgagaccattttccgtacaatcaaaccggacttggttttctatgattctgcccattggataccggaaattgctaaaccgatcggtgctaaaaccgtttgcttcaacatcgttagcgctgcgtcaatcgcactgtctcttgtcccttctgcggagagagaggtcattgatggcaaggaaatgtcaggggaggagttagctaagacgcctctaggttacccatcttcgaaagtagtcttacgtccgcacgaagcaaaatccctgagtttcgtgtggaggaagcacgaggcgattggctctttctttgatgggaaagttaccgcgatgagaaactgcgacgcaatcgctataaggacttgccgtgagacagaaggcaaattctgcgattacataagtaggcagtacagtaaaccggtttacctaacaggaccggttctccctggatcccaacctaatcagccctccttagatcctcaatgggcggagtggctagccaaattcaaccacggttcggttgtgttctgcgctttcggtagccaacccgttgtaaacaagatagatcagtttcaagaactctgtttaggtctagaatcaactggttttccgtttctggttgccattaagcctccttcgggtgtatcaaccgtcgaggaagccttaccggaaggattcaaagagagggttcaaggacgtggcgttgtgtttggaggttggattcagcaaccgttggtgttgaaccatccttcagtgggttgttttgttagccattgcgggtttgggtcgatgtgggagtcgttgatgagtgattgtcagatcgttttggttccgcagcacggagaacagattttgaacgcaaggctgatgacggaggagatggaggtggcggttgaagtggagagggaaaagaaagggtggttctcgcggcaaagcttggagaatgctgtgaagagtgtgatggaggaaggtagtgagatcggtgagaaagtgaggaagaatcatgacaagtggagatgtgttttgactgactctggtttttcagatggttatattgataagtttgaacaaaatttaattgaacttgtgaagtcatga

SEQ ID NO: 78719 - protein, 468 aa, Arabidopsis thaliana
  peptide (1)..(468): Ceres Seq. ID no. 12644486
  misc_feature (12)..(439): Pfam Name: UDP-glucoronosyl and UDP-glucosyl transferase Pfam Description: UDP-glucoronosyl and UDP-glucosyl transferase
  misc_feature (1)..(468): Homolog of NCBI NO: 15239543 NR Description: flavonol 3-O-glucosyltransferase-like; protein id:
  misc_feature (10)..(468): Homolog of NCBI NO: 15239525 NR Description: flavonol 3-O-glucosyltransferase-like protein;
  misc_feature (14)..(466): Homolog of NCBI NO: 15234196 NR Description: UDP rhamnose--anthocyanidin-3-glucoside
  misc_feature (16)..(466): Homolog of NCBI NO: 15217796 NR Description: anthocyanidin-3-glucoside rhamnosyltransferase, protein id: At1g64920.1 [Arabidopsis thaliana]
  misc_feature (14)..(466): Homolog of NCBI NO: 15234195 NR Description: UDP rhamnose-anthocyanidin-3-glucoside
  misc_feature (16)..(466): Homolog of NCBI NO: 21593514 NR Description: UDP rhamnose-anthocyanidin-3-glucoside
  misc_feature (14)..(456): Homolog of NCBI NO: 15982889 NR Description: AT4g27560/T29A15_50 [Arabidopsis thaliana]
  misc_feature (10)..(462): Homolog of NCBI NO: 15230017 NR Description: flavonol 3-O-Glucosyltransferase, putative;
  misc_feature (228)..(464): Homolog of NCBI NO: 28393204 NR Description: unknown protein [Arabidopsis thaliana]
  misc_feature (16)..(229): Homolog of NCBI NO: 28393204 NR Description: unknown protein [Arabidopsis thaliana]
MGVFGSNESSSMSIVMYPWLAFGHMTPFLHLSNKLAEKGHKIVFLLPKKALNQLEPLNLYPNLITFHTISIPQVKGLPPGAETNSDVPFFLTHLLAVAMDQTRPEVETIFRTIKPDLVFYDSAHWIPEIAKPIGAKTVCFNIVSAASIALSLVPSAEREVIDGKEMSGEELAKTPLGYPSSKVVLRPHEAKSLSFVWRKHEAIGSFFDGKVTAMRNCDAIAIRTCRETEGKFCDYISRQYSKPVYLTGPVLPGSQPNQPSLDPQWAEWLAKFNHGSVVFCAFGSQPVVNKIDQFQELCLGLESTGFPFLVAIKPPSGVSTVEEALPEGFKERVQGRGVVFGGWIQQPLVLNHPSVGCFVSHCGFGSMWESLMSDCQIVLVPQHGEQILNARLMTEEMEVAVEVEREKKGWFSRQSLENAVKSVMEEGSEIGEKVRKNHDKWRCVLTDSGFSDGYIDKFEQNLIELVKS

SEQ ID NO: 78720 - protein, 457 aa, Arabidopsis thaliana
  peptide (1)..(457): Ceres Seq. ID no. 12644487
  misc_feature (1)..(428): Pfam Name: UDP-glucoronosyl and UDP-glucosyl transferase Pfam Description: UDP-glucoronosyl and UDP-glucosyl transferase
  misc_feature (1)..(457): Homolog of NCBI NO: 15239543 NR Description: flavonol 3-O-glucosyltransferase-like; protein id:
  misc_feature (1)..(457): Homolog of NCBI NO: 15239525 NR Description: flavonol 3-O-glucosyltransferase-like protein;
  misc_feature (3)..(455): Homolog of NCBI NO: 15234196 NR Description: UDP rhamnose--anthocyanidin-3-glucoside
  misc_feature (5)..(455): Homolog of NCBI NO: 15217796 NR Description: anthocyanidin-3-glucoside rhamnosyltransferase, protein id: At1g64920.1 [Arabidopsis thaliana]
  misc_feature (3)..(455): Homolog of NCBI NO: 15234195 NR Description: UDP rhamnose-anthocyanidin-3-glucoside
  misc_feature (5)..(455): Homolog of NCBI NO: 21593514 NR Description: UDP rhamnose-anthocyanidin-3-glucoside
  misc_feature (3)..(445): Homolog of NCBI NO: 15982889 NR Description: AT4g27560/T29A15_50 [Arabidopsis thaliana]
  misc_feature (1)..(451): Homolog of NCBI NO: 15230017 NR Description: flavonol 3-O-Glucosyltransferase, putative;
  misc_feature (217)..(453): Homolog of NCBI NO: 28393204 NR Description: unknown protein [Arabidopsis thaliana]
  misc_feature (5)..(218): Homolog of NCBI NO: 28393204 NR Description: unknown protein [Arabidopsis thaliana]
MSIVMYPWLAFGHMTPFLHLSNKLAEKGHKIVFLLPKKALNQLEPLNLYPNLITFHTISIPQVKGLPPGAETNSDVPFFLTHLLAVAMDQTRPEVETIFRTIKPDLVFYDSAHWIPEIAKPIGAKTVCFNIVSAASIALSLVPSAEREVIDGKEMSGEELAKTPLGYPSSKVVLRPHEAKSLSFVWRKHEAIGSFFDGKVTAMRNCDAIAIRTCRETEGKFCDYISRQYSKPVYLTGPVLPGSQPNQPSLDPQWAEWLAKFNHGSVVFCAFGSQPVVNKIDQFQELCLGLESTGFPFLVAIKPPSGVSTVEEALPEGFKERVQGRGVVFGGWIQQPLVLNHPSVGCFVSHCGFGSMWESLMSDCQIVLVPQHGEQILNARLMTEEMEVAVEVEREKKGWFSRQSLENAVKSVMEEGSEIGEKVRKNHDKWRCVLTDSGFSDGYIDKFEQNLIELVKS

SEQ ID NO: 78721 - protein, 453 aa, Arabidopsis thaliana
  peptide (1)..(453): Ceres Seq. ID no. 12644488
  misc_feature (1)..(424): Pfam Name: UDP-glucoronosyl and UDP-glucosyl transferase Pfam Description: UDP-glucoronosyl and UDP-glucosyl transferase
  misc_feature (1)..(453): Homolog of NCBI NO: 15239543 NR Description: flavonol 3-O-glucosyltransferase-like; protein id:
  misc_feature (1)..(453): Homolog of NCBI NO: 15239525 NR Description: flavonol 3-O-glucosyltransferase-like protein;
  misc_feature (1)..(451): Homolog of NCBI NO: 15234196 NR Description: UDP rhamnose--anthocyanidin-3-glucoside
  misc_feature (1)..(451): Homolog of NCBI NO: 15217796 NR Description: anthocyanidin-3-glucoside rhamnosyltransferase, protein id: At1g64920.1 [Arabidopsis thaliana]
  misc_feature (1)..(451): Homolog of NCBI NO: 15234195 NR Description: UDP rhamnose-anthocyanidin-3-glucoside
  misc_feature (1)..(451): Homolog of NCBI NO: 21593514 NR Description: UDP rhamnose-anthocyanidin-3-glucoside
  misc_feature (1)..(441): Homolog of NCBI NO: 15982889 NR Description: AT4g27560/T29A15_50 [Arabidopsis thaliana]
  misc_feature (1)..(447): Homolog of NCBI NO: 15230017 NR Description: flavonol 3-O-Glucosyltransferase, putative;
  misc_feature (213)..(449): Homolog of NCBI NO: 28393204 NR Description: unknown protein [Arabidopsis thaliana]
  misc_feature (1)..(214): Homolog of NCBI NO: 28393204 NR Description: unknown protein [Arabidopsis thaliana]
MYPWLAFGHMTPFLHLSNKLAEKGHKIVFLLPKKALNQLEPLNLYPNLITFHTISIPQVKGLPPGAETNSDVPFFLTHLLAVAMDQTRPEVETIFRTIKPDLVFYDSAHWIPEIAKPIGAKTVCFNIVSAASIALSLVPSAEREVIDGKEMSGEELAKTPLGYPSSKVVLRPHEAKSLSFVWRKHEAIGSFFDGKVTAMRNCDAIAIRTCRETEGKFCDYISRQYSKPVYLTGPVLPGSQPNQPSLDPQWAEWLAKFNHGSVVFCAFGSQPVVNKIDQFQELCLGLESTGFPFLVAIKPPSGVSTVEEALPEGFKERVQGRGVVFGGWIQQPLVLNHPSVGCFVSHCGFGSMWESLMSDCQIVLVPQHGEQILNARLMTEEMEVAVEVEREKKGWFSRQSLENAVKSVMEEGSEIGEKVRKNHDKWRCVLTDSGFSDGYIDKFEQNLIELVKS

SEQ ID NO: 78722 - DNA, 615 bp, Arabidopsis thaliana
  misc_feature (1)..(615): Ceres Seq. ID no. 12644562
  misc_feature: MA Experiment ID: 20000307 Result: Up-regulated in Transcription
  misc_feature: MA Experiment 20000307 PARAMETER Experiment Name: At_Germinating_Seeds_Sub_P Parameter: Age (hr) Value: 24 vs. 0
  misc_feature: MA Experiment 20000307 PARAMETER Experiment Name: At_Germinating_Seeds_Sub_P Parameter: Organism Value: A. thaliana
  misc_feature: MA Experiment 20000307 PARAMETER Experiment Name: At_Germinating_Seeds_Sub_P Parameter: Plant Line Value: WS
  misc_feature: MA Experiment 20000307 PARAMETER Experiment Name: At_Germinating_Seeds_Sub_P Parameter: Tissue Value: Germinating Seeds
  misc_feature: MA Experiment ID: 20000327 Result: Down-regulated in Transcription
  misc_feature: MA Experiment 20000327 PARAMETER Experiment Name: At_42deg_Heat_Sub_P Parameter: Age (day) Value: 14
  misc_feature: MA Experiment 20000327 PARAMETER Experiment Name: At_42deg_Heat_Sub_P Parameter: Organism Value: A. thaliana
  misc_feature: MA Experiment 20000327 PARAMETER Experiment Name: At_42deg_Heat_Sub_P Parameter: Plant Line Value: WS
  misc_feature: MA Experiment 20000327 PARAMETER Experiment Name: At_42deg_Heat_Sub_P Parameter: Temperature (deg C) Value: 42 vs. 22
  misc_feature: MA Experiment 20000327 PARAMETER Experiment Name: At_42deg_Heat_Sub_P Parameter: Timepoint (hr) Value: 1
  misc_feature: MA Experiment 20000327 PARAMETER Experiment Name: At_42deg_Heat_Sub_P Parameter: Tissue Value: Aerial
  misc_feature: MA Experiment ID: 20000328 Result: Down-regulated in Transcription
  misc_feature: MA Experiment 20000328 PARAMETER Experiment Name: At_42deg_Heat_Sub_P Parameter: Age (day) Value: 14
  misc_feature: MA Experiment 20000328 PARAMETER Experiment Name: At_42deg_Heat_Sub_P Parameter: Organism Value: A. thaliana
  misc_feature: MA Experiment 20000328 PARAMETER Experiment Name: At_42deg_Heat_Sub_P Parameter: Plant Line Value: WS
  misc_feature: MA Experiment 20000328 PARAMETER Experiment Name: At_42deg_Heat_Sub_P Parameter: Temperature (deg C) Value: 42 vs. 22
  misc_feature: MA Experiment 20000328 PARAMETER Experiment Name: At_42deg_Heat_Sub_P Parameter: Timepoint (hr) Value: 6
  misc_feature: MA Experiment 20000328 PARAMETER Experiment Name: At_42deg_Heat_Sub_P Parameter: Tissue Value: Aerial
  misc_feature: MA Experiment ID: 20000355 Result: Down-regulated in Transcription
  misc_feature: MA Experiment 20000355 PARAMETER Experiment Name: At_Siliques_Sub_P Parameter: Age (day) Value: 21
  misc_feature: MA Experiment 20000355 PARAMETER Experiment Name: At_Siliques_Sub_P Parameter: Organism Value: A. thaliana
  misc_feature: MA Experiment 20000355 PARAMETER Experiment Name: At_Siliques_Sub_P Parameter: Plant Line Value: WS
  misc_feature: MA Experiment 20000355 PARAMETER Experiment Name: At_Siliques_Sub_P Parameter: Tissue Value: Less Than 5mm Siliques vs. Whole Plant
  misc_feature: MA Experiment ID: 20000440 Result: Down-regulated in Transcription
  misc_feature: MA Experiment 20000440 PARAMETER Experiment Name: At_Closed-Flower__Sub_P Parameter: Tissue Value: Closed Flower vs. Whole Plant
atggcgactaaagtatatatcgtgtactactctatgtatggtcatgttgagaaattggctgaagaaataaggaaaggagctgcttctgttgaaggtgttgaagctaaactatggcaggtaccagagacgcttcacgaagaggcactctctaagatgagcgcaccaccaaagagtgaatccccaatcataaccccgaatgagctagctgaagctgatgggtttgtctttggtttcccaacaagatttggtatgatggctgctcagttcaaagcctttttggatgcaaccggtggactctggagggctcaggcactcgccggtaaaccagctggtatcttctacagcactggctctcaaggtggtggccaagaaaccacagcattgacggcaataactcagctggttcaccacgggatgttatttgtcccaatcggttacacatttggcgcgggaatgttcgaaatggagaatgtgaaaggtggaagcccatatggagctggaacatttgcaggagacggttcaaggcagccaacagagctggagctacagcaagcatttcaccaaggccagtacattgccagcatcaccaagaagctcaagggatctactgcttag

SEQ ID NO: 78723 - protein, 204 aa, Arabidopsis thaliana [sequence omitted]

SEQ ID NO: 78724 - protein, 193 aa, Arabidopsis thaliana; identical to SEQ ID NO: 39070
  peptide (1)..(193): Ceres Seq. ID no. 12644564
  misc_feature (3)..(141): Pfam Name: NADPH-dependent FMN reductase Pfam Description: NADPH-dependent FMN reductase
  misc_feature (1)..(193): Homolog of NCBI NO: 15239652 NR Description: quinone reductase, putative; protein id:
  misc_feature (1)..(193): Homolog of NCBI NO: 30687535 NR Description: quinone reductase family [Arabidopsis thaliana]
  misc_feature (1)..(192): Homolog of NCBI NO: 5031275 NR Description: unknown [Prunus armeniaca]
  misc_feature (1)..(191): Homolog of NCBI NO: 21068664 NR Description: putative quinone oxidoreductase [Cicer arietinum]
  misc_feature (1)..(193): Homolog of NCBI NO: 7445353 NR Description: hypothetical protein M4I22.80 - Arabidopsis >gi|3269288|emb|CAA19721.1| putative protein [Arabidopsis >gi|7269580|emb|CAB79582.1| putative protein [Arabidopsis
  misc_feature (1)..(191): Homolog of NCBI NO: 38636776 NR Description: putative quinone-oxidoreductase QR2 [Oryza sativa
  misc_feature (1)..(193): Homolog of NCBI NO: 12484052 NR Description: quinone-oxidoreductase QR2 [Triphysaria
  misc_feature (1)..(191): Homolog of NCBI NO: 34910128 NR Description: putative 1,4-benzoquinone reductase [Oryza sativa
  misc_feature (27)..(189): Homolog of NCBI NO: 37724581 NR Description: putative quinone reductase [Vitis vinifera]
  misc_feature (1)..(189): Homolog of NCBI NO: 2564066 NR Description: LEDI-3 protein [Lithospermum erythrorhizon]

SEQ ID NO: 78725 - protein, 153 aa, Arabidopsis thaliana; identical to SEQ ID NO: 39071
  peptide (1)..(153): Ceres Seq. ID no. 12644565
  misc_feature (1)..(101): Pfam Name: NADPH-dependent FMN reductase Pfam Description: NADPH-dependent FMN reductase
  misc_feature (1)..(153): Homolog of NCBI NO: 15239652 NR Description: quinone reductase, putative; protein id:
  misc_feature (1)..(153): Homolog of NCBI NO: 30687535 NR Description: quinone reductase family [Arabidopsis thaliana]
  misc_feature (1)..(152): Homolog of NCBI NO: 5031275 NR Description: unknown [Prunus armeniaca]
  misc_feature (1)..(151): Homolog of NCBI NO: 21068664 NR Description: putative quinone oxidoreductase [Cicer arietinum]
  misc_feature (1)..(153): Homolog of NCBI NO: 7445353 NR Description: hypothetical protein M4I22.80 - Arabidopsis >gi|3269288|emb|CAA19721.1| putative protein [Arabidopsis >gi|7269580|emb|CAB79582.1| putative protein [Arabidopsis
  misc_feature (1)..(151): Homolog of NCBI NO: 38636776 NR Description: putative quinone-oxidoreductase QR2 [Oryza sativa
  misc_feature (1)..(153): Homolog of NCBI NO: 12484052 NR Description: quinone-oxidoreductase QR2 [Triphysaria
  misc_feature (1)..(151): Homolog of NCBI NO: 34910128 NR Description: putative 1,4-benzoquinone reductase [Oryza sativa
  misc_feature (1)..(149): Homolog of NCBI NO: 37724581 NR Description: putative quinone reductase [Vitis vinifera]
  misc_feature (1)..(149): Homolog of NCBI NO: 2564066 NR Description: LEDI-3 protein [Lithospermum erythrorhizon]

SEQ ID NO: 78726 - DNA, 1050 bp, Arabidopsis thaliana
  misc_feature (1)..(1050): Ceres Seq. ID no. 12644605
  misc_feature: MA Experiment ID: 108433 Result: Down-regulated in Transcription
  misc_feature: MA Experiment 108433 PARAMETER Experiment Name: At_rhl_Mutant2_cDNA_P Parameter: Age (day) Value: 7
  misc_feature: MA Experiment 108433 PARAMETER Experiment Name: At_rhl_Mutant2_cDNA_P Parameter: Organism Value: A. thaliana
  misc_feature: MA Experiment 108433 PARAMETER Experiment Name: At_rhl_Mutant2_cDNA_P Parameter: Plant Line Value: rhl Mutant vs. wt landsburg
  misc_feature: MA Experiment 108433 PARAMETER Experiment Name: At_rhl_Mutant2_cDNA_P Parameter: Tissue Value: Roots
  misc_feature: MA Experiment ID: 108434 Result: Down-regulated in Transcription
  misc_feature: MA Experiment 108434 PARAMETER Experiment Name: At_Root_Tips_cDNA_P Parameter: Tissue Value: Root Tips
  misc_feature: MA Experiment ID: 108461 Result: Up-regulated in Transcription
  misc_feature: MA Experiment 108461 PARAMETER Experiment Name: At_Germinating_Seeds_cDNA_P Parameter: Age (day) Value: 1 vs. 0
  misc_feature: MA Experiment 108461 PARAMETER Experiment Name: At_Germinating_Seeds_cDNA_P Parameter: Tissue Value: Germinating Seeds
  misc_feature: MA Experiment ID: 108462 Result: Up-regulated in Transcription
  misc_feature: MA Experiment 108462 PARAMETER Experiment Name: At_Germinating_Seeds_cDNA_P Parameter: Age (day) Value: 2 vs. 0
  misc_feature: MA Experiment 108462 PARAMETER Experiment Name: At_Germinating_Seeds_cDNA_P Parameter: Tissue Value: Germinating Seeds
  misc_feature: MA Experiment ID: 108464 Result: Up-regulated in Transcription
  misc_feature: MA Experiment 108464 PARAMETER Experiment Name: At_Germinating_Seeds_cDNA_P Parameter: Age (day) Value: 4 vs. 0
  misc_feature: MA Experiment 108464 PARAMETER Experiment Name: At_Germinating_Seeds_cDNA_P Parameter: Tissue Value: Germinating Seeds
  misc_feature: MA Experiment ID: 108488 Result: Up-regulated in Transcription
  misc_feature: MA Experiment ID: 108594 Result: Down-regulated in Transcription
  misc_feature: MA Experiment 108594 PARAMETER Experiment Name: At_Ler-rhl_Root_cDNA_P Parameter: Plant Line Value: null
atggctgccatagcttctactctctctctttcttcaaccaaacctcagagacttttcgattcttccttccatggctcagccatctccgcagctcctatctccatcggtctcaaaccacgatctttctccgttcgcgccacaaccgctggttacgacttgaacgctttcacgttcgacccgatcaaggaatcgatcgtgtcacgtgagatgacgagaaggtacatgacggatatgatcacttatgctgagactgatgtcgtcgtcgttggtgctggatctgctggtttatctgctgcttatgagatcagtaagaaccctaatgttcaagttgccattattgagcaatctgttagtcctggtggtggtgcttggctcggtggtcagcttttctccgccatgattgttcgcaaaccagctcacttgttccttgacgagattggtgtggcttacgatgagcaagacacctacgttgtggttaagcacgcggctctgttcacatcaaccatcatgagcaagcttttggctcgtcctaatgtgaagctcttcaacgctgtggctgctgaggatttgattgtgaaaggaaacagagttggtggtgtggtgactaactgggctcttgtggctcagaaccaccacacacaatcgtgtatggaccctaatgttatggaagcgaagattgtggttagctcttgtggtcatgatggtccttttggagctactggtgttaagaggttgaagagtattgggatgattgatcatgttcctgggatgaaagctttggacatgaacactgctgaggacgctattgtgaggttgaccagagaggttgttcctggtatgattgttaccggtatggaagttgctgagatcgatggtgcaccgagaatgggaccaacttttggtgctatgatgatatcgggacaaaaggcgggacaacttgctcttaaggctttggggctaccgaatgctattgacggaactctcgttggaaacctaagcccggagctggtcttagccgcagcagattcagctgaaaccgtagatgcttaa

SEQ ID NO: 78727 - protein, 349 aa, Arabidopsis thaliana; identical to SEQ ID NO: 76367
  peptide (1)..(349): Ceres Seq. ID no. 12644606
  misc_feature (57)..(300): Pfam Name: Thi4 family Pfam Description: Thi4 family
  misc_feature (1)..(349): Homolog of NCBI NO: 15239735 NR Description: thiazole biosynthetic enzyme precursor (ARA6) (sp protein id: At5g54770.1, supported by cDNA: gi_1113782, supported cDNA: gi_15809896, supported by cDNA: gi_16226383, supported by
  misc_feature (1)..(349): Homolog of NCBI NO: 6094476 NR Description: Thiazole biosynthetic enzyme, chloroplast
  misc_feature (4)..(349): Homolog of NCBI NO: 2501187 NR Description: Thiazole biosynthetic enzyme, chloroplast (AG6) >gi|1289204|emb|CAA66064.1| thaizole biosynthetic enzmye
  misc_feature (1)..(349): Homolog of NCBI NO: 30013665 NR Description: putative chloroplast thiazole biosynthetic

SEQ ID NO: 78728 - protein, 280 aa, Arabidopsis thaliana; identical to SEQ ID NO: 76368
  peptide (1)..(280): Ceres Seq. ID no. 12644607
  misc_feature (1)..(231): Pfam Name: Thi4 family Pfam Description: Thi4 family
  misc_feature (1)..(280): Homolog of NCBI NO: 15239735 NR Description: thiazole biosynthetic enzyme precursor (ARA6) (sp protein id: At5g54770.1, supported by cDNA: gi_1113782, supported cDNA: gi_15809896, supported by cDNA: gi_16226383, supported by
  misc_feature (1)..(280): Homolog of NCBI NO: 6094476 NR Description: Thiazole biosynthetic enzyme, chloroplast
  misc_feature (1)..(280): Homolog of NCBI NO: 2501187 NR Description: Thiazole biosynthetic enzyme, chloroplast (AG6) >gi|1289204|emb|CAA66064.1| thaizole biosynthetic enzmye
  misc_feature (1)..(280): Homolog of NCBI NO: 30013665 NR Description: putative chloroplast thiazole biosynthetic

SEQ ID NO: 78729 - protein, 275 aa, Arabidopsis thaliana; identical to SEQ ID NO: 77243
  peptide (1)..(275): Ceres Seq. ID no. 12644608
  misc_feature (1)..(226): Pfam Name: Thi4 family Pfam Description: Thi4 family
  misc_feature (1)..(275): Homolog of NCBI NO: 15239735 NR Description: thiazole biosynthetic enzyme precursor (ARA6) (sp protein id: At5g54770.1, supported by cDNA: gi_1113782, supported cDNA: gi_15809896, supported by cDNA: gi_16226383, supported by
  misc_feature (1)..(275): Homolog of NCBI NO: 6094476 NR Description: Thiazole biosynthetic enzyme, chloroplast
  misc_feature (1)..(275): Homolog of NCBI NO: 2501187 NR Description: Thiazole biosynthetic enzyme, chloroplast (AG6) >gi|1289204|emb|CAA66064.1| thaizole biosynthetic enzmye
  misc_feature (1)..(275): Homolog of NCBI NO: 30013665 NR Description: putative chloroplast thiazole biosynthetic

SEQ ID NO: 78730 - DNA, 1542 bp, Arabidopsis thaliana
  misc_feature (1)..(1542): Ceres Seq. ID no. 12644686
  misc_feature: MA Experiment ID: 20000355 Result: Down-regulated in Transcription
  misc_feature: MA Experiment 20000355 PARAMETER Experiment Name: At_Siliques_Sub_P Parameter: Age (day) Value: 21
  misc_feature: MA Experiment 20000355 PARAMETER Experiment Name: At_Siliques_Sub_P Parameter: Organism Value: A. thaliana
  misc_feature: MA Experiment 20000355 PARAMETER Experiment Name: At_Siliques_Sub_P Parameter: Plant Line Value: WS
  misc_feature: MA Experiment 20000355 PARAMETER Experiment Name: At_Siliques_Sub_P Parameter: Tissue Value: Less Than 5mm Siliques vs. Whole Plant
  misc_feature: MA Experiment ID: 20000440 Result: Down-regulated in Transcription
  misc_feature: MA Experiment 20000440 PARAMETER Experiment Name: At_Closed-Flower__Sub_P Parameter: Tissue Value: Closed Flower vs. Whole Plant
atggcgcgtagtaatagatgtgtaccccaaaatagttccattgtccaaattccgatagaagaagtattcaaaactcaactcaagtctcggtggcagcagatcacaatgtcatctgcttcttctccaccgccgccgcaggttttcgtcccagagccacttttttccgaacccccgcctcctcccaaagcacccgttaacgtttccctatctccaccgcctcctccgcggtctccctccacatccactccacctaggttgggaaatcgaaaccctccacctccagcgagtccctctggccaggaacctacaactccaactatgaccccaggcttttctctatcaccgccgtctccctcaagattatcaacgggagctgtggtcgggatctccataggaggaggagtttttgtgttgactttgatttttttcctttgtaagaagaaacgaccaagagacgataaagcacttccggctcccatagggcttgtattaggcatccatcaaagcactttcacttacggggagctagctagagccaccaataaattctctgaggccaatttgttaggagagggtggatttggattcgtatacaaaggtatattgaataatggaaatgaagttgcagttaaacagttgaaagtagggagtgctcagggtgagaaagagtttcaggctgaggttaatattattagccaaattcaccataggaatttggtttcccttgtcggttattgcatcgctggtgctcaaagattgcttgtctatgagtttgttcccaacaacactctcgagtttcacctccatgggaaaggacggcctacgatggaatggagtttaagattaaagattgctgtcagttcttccaaaggattgtcttatcttcatgaaaattgcaatcctaaaatcatccaccgtgatatcaaggcggcaaacatattgattgatttcaaatttgaagcaaaggttgctgattttggtctcgccaagattgctttggatacaaacactcatgtatctacacgtgttatgggaacctttgggtatttggctccggaatatgctgcaagtggaaagcttactgaaaagtctgatgtttactcattcggcgttgtacttttggagctaataacgggacgtcgccctgttgatgcaaacaatgtctatgcggatgacagcttggttgattgggcacgaccattgcttgtacaagcacttgaagaaagtaactttgaaggtttggctgatataaagctgaataatgagtatgatagagaagagatggctcgcatggttgcttgtgctgcagcttgtgtccgctatacagctcgccgaagacctcgcatggaccaggttgtgcgtgtgctagaaggaaacatatcgccgtcagatctgaatcaagggataacacccggtcacagcaatacgtacacgaggaagtttcggataaaaatggggcacgactgtatccgtccggctggacgctcgagcagtgagggtcaagccacacggggaaatggattcgagatggggaagatttaa

SEQ ID NO: 78731 - protein, 513 aa, Arabidopsis thaliana
  peptide (1)..(513): Ceres Seq. ID no. 12644687
  misc_feature (183)..(382): Pfam Name: Protein kinase domain Pfam Description: Protein kinase domain
  misc_feature (1)..(498): Homolog of NCBI NO: 15230129 NR Description: protein kinase, putative; protein id: At3g24540.1
  misc_feature (80)..(478): Homolog of NCBI NO: 9294048 NR Description: protein kinase-like protein [Arabidopsis thaliana]
  misc_feature (152)..(477): Homolog of NCBI NO: 15230108 NR Description: protein kinase, putative; protein id: At3g24400.1
  misc_feature (41)..(160): Homolog of NCBI NO: 15230108 NR Description: protein kinase, putative; protein id: At3g24400.1
  misc_feature (152)..(478): Homolog of NCBI NO: 13877617 NR Description: protein kinase-like protein [Arabidopsis thaliana]
  misc_feature (152)..(478): Homolog of NCBI NO: 15230130 NR Description: protein kinase, putative; protein id: supported by cDNA: 17909., supported by cDNA: gi_13877616,
  misc_feature (35)..(159): Homolog of NCBI NO: 13877617 NR Description: protein kinase-like protein [Arabidopsis thaliana]
  misc_feature (35)..(159): Homolog of NCBI NO: 15230130 NR Description: protein kinase, putative; protein id: supported by cDNA: 17909., supported by cDNA: gi_13877616,
  misc_feature (152)..(478): Homolog of NCBI NO: 13447449 NR Description: receptor protein kinase PERK1 [Brassica napus]
  misc_feature (37)..(154): Homolog of NCBI NO: 13447449 NR Description: receptor protein kinase PERK1 [Brassica napus]
MARSNRCVPQNSSIVQIPIEEVFKTQLKSRWQQITMSSASSPPPPQVFVPEPLFSEPPPPPKAPVNVSLSPPPPPRSPSTSTPPRLGNRNPPPPASPSGQEPTTPTMTPGFSLSPPSPSRLSTGAVVGISIGGGVFVLTLIFFLCKKKRPRDDKALPAPIGLVLGIHQSTFTYGELARATNKFSEANLLGEGGFGFVYKGILNNGNEVAVKQLKVGSAQGEKEFQAEVNIISQIHHRNLVSLVGYCIAGAQRLLVYEFVPNNTLEFHLHGKGRPTMEWSLRLKIAVSSSKGLSYLHENCNPKIIHRDIKAANILIDFKFEAKVADFGLAKIALDTNTHVSTRVMGTFGYLAPEYAASGKLTEKSDVYSFGVVLLELITGRRPVDANNVYADDSLVDWARPLLVQALEESNFEGLADIKLNNEYDREEMARMVACAAACVRYTARRRPRMDQVVRVLEGNISPSDLNQGITPGHSNTYTRKFRIKMGHDCIRPAGRSSSEGQATRGNGFEMGKI

SEQ ID NO: 78732 - protein, 478 aa, Arabidopsis thaliana
  peptide (1)..(478): Ceres Seq. ID no. 12644688
  misc_feature (148)..(347): Pfam Name: Protein kinase domain Pfam Description: Protein kinase domain
  misc_feature (1)..(463): Homolog of NCBI NO: 15230129 NR Description: protein kinase, putative; protein id: At3g24540.1
  misc_feature (45)..(443): Homolog of NCBI NO: 9294048 NR Description: protein kinase-like protein [Arabidopsis thaliana]
  misc_feature (117)..(442): Homolog of NCBI NO: 15230108 NR Description: protein kinase, putative; protein id: At3g24400.1
  misc_feature (6)..(125): Homolog of NCBI NO: 15230108 NR Description: protein kinase, putative; protein id: At3g24400.1
  misc_feature (117)..(443): Homolog of NCBI NO: 13877617 NR Description: protein kinase-like protein [Arabidopsis thaliana]
  misc_feature (117)..(443): Homolog of NCBI NO: 15230130 NR Description: protein kinase, putative; protein id: supported by cDNA: 17909., supported by cDNA: gi_13877616,
  misc_feature (1)..(124): Homolog of NCBI NO: 13877617 NR Description: protein kinase-like protein [Arabidopsis thaliana]
  misc_feature (1)..(124): Homolog of NCBI NO: 15230130 NR Description: protein kinase, putative; protein id: supported by cDNA: 17909., supported by cDNA: gi_13877616,
  misc_feature (117)..(443): Homolog of NCBI NO: 13447449 NR Description: receptor protein kinase PERK1 [Brassica napus]
  misc_feature (2)..(119): Homolog of NCBI NO: 13447449 NR Description: receptor protein kinase PERK1 [Brassica napus]
MSSASSPPPPQVFVPEPLFSEPPPPPKAPVNVSLSPPPPPRSPSTSTPPRLGNRNPPPPASPSGQEPTTPTMTPGFSLSPPSPSRLSTGAVVGISIGGGVFVLTLIFFLCKKKRPRDDKALPAPIGLVLGIHQSTFTYGELARATNKFSEANLLGEGGFGFVYKGILNNGNEVAVKQLKVGSAQGEKEFQAEVNIISQIHHRNLVSLVGYCIAGAQRLLVYEFVPNNTLEFHLHGKGRPTMEWSLRLKIAVSSSKGLSYLHENCNPKIIHRDIKAANILIDFKFEAKVADFGLAKIALDTNTHVSTRVMGTFGYLAPEYAASGKLTEKSDVYSFGVVLLELITGRRPVDANNVYADDSLVDWARPLLVQALEESNFEGLADIKLNNEYDREEMARMVACAAACVRYTARRRPRMDQVVRVLEGNISPSDLNQGITPGHSNTYTRKFRIKMGHDCIRPAGRSSSEGQATRGNGFEMGKI

SEQ ID NO: 78733 - protein, 407 aa, Arabidopsis thaliana
  peptide (1)..(407): Ceres Seq. ID no. 12644689
  misc_feature (77)..(276): Pfam Name: Protein kinase domain Pfam Description: Protein kinase domain
  misc_feature (1)..(392): Homolog of NCBI NO: 15230129 NR Description: protein kinase, putative; protein id: At3g24540.1
  misc_feature (1)..(372): Homolog of NCBI NO: 9294048 NR Description: protein kinase-like protein [Arabidopsis thaliana]
  misc_feature (46)..(371): Homolog of NCBI NO: 15230108 NR Description: protein kinase, putative; protein id: At3g24400.1
  misc_feature (1)..(54): Homolog of NCBI NO: 15230108 NR Description: protein kinase, putative; protein id: At3g24400.1
  misc_feature (46)..(372): Homolog of NCBI NO: 13877617 NR Description: protein kinase-like protein [Arabidopsis thaliana]
  misc_feature (46)..(372): Homolog of NCBI NO: 15230130 NR Description: protein kinase, putative; protein id: supported by cDNA: 17909., supported by cDNA: gi_13877616,
  misc_feature (1)..(53): Homolog of NCBI NO: 13877617 NR Description: protein kinase-like protein [Arabidopsis thaliana]
  misc_feature (1)..(53): Homolog of NCBI NO: 15230130 NR Description: protein kinase, putative; protein id: supported by cDNA: 17909., supported by cDNA: gi_13877616,
  misc_feature (46)..(372): Homolog of NCBI NO: 13447449 NR Description: receptor protein kinase PERK1 [Brassica napus]
  misc_feature (1)..(48): Homolog of NCBI NO: 13447449 NR Description: receptor protein kinase PERK1 [Brassica napus]
MTPGFSLSPPSPSRLSTGAVVGISIGGGVFVLTLIFFLCKKKRPRDDKALPAPIGLVLGIHQSTFTYGELARATNKFSEANLLGEGGFGFVYKGILNNGNEVAVKQLKVGSAQGEKEFQAEVNIISQIHHRNLVSLVGYCIAGAQRLLVYEFVPNNTLEFHLHGKGRPTMEWSLRLKIAVSSSKGLSYLHENCNPKIIHRDIKAANILIDFKFEAKVADFGLAKIALDTNTHVSTRVMGTFGYLAPEYAASGKLTEKSDVYSFGVVLLELITGRRPVDANNVYADDSLVDWARPLLVQALEESNFEGLADIKLNNEYDREEMARMVACAAACVRYTARRRPRMDQVVRVLEGNISPSDLNQGITPGHSNTYTRKFRIKMGHDCIRPAGRSSSEGQATRGNGFEMGKI

SEQ ID NO: 78734 - DNA, 3300 bp, Arabidopsis thaliana
  misc_feature (1)..(3300): Ceres Seq. ID no. 12644720
  misc_feature: MA Experiment ID: 20000180 Result: Up-regulated in Transcription
  misc_feature: MA Experiment 20000180 PARAMETER Experiment Name: At_Germinating_Seeds_P Parameter: Age (hr) Value: 24 vs. 0
  misc_feature: MA Experiment 20000180 PARAMETER Experiment Name: At_Germinating_Seeds_P Parameter: Tissue Value: Germinating Seeds
  misc_feature: MA Experiment ID: 20000185 Result: Up-regulated in Transcription
  misc_feature: MA Experiment 20000185 PARAMETER Experiment Name: At_Roots__P Parameter: Age (day) Value: 7 vs. 21
  misc_feature: MA Experiment 20000185 PARAMETER Experiment Name: At_Roots__P Parameter: Organism Value: A. thaliana
  misc_feature: MA Experiment 20000185 PARAMETER Experiment Name: At_Roots__P Parameter: Tissue Value: Roots vs. Whole Plant
  misc_feature: MA Experiment ID: 20000227 Result: Up-regulated in Transcription
  misc_feature: MA Experiment 20000227 PARAMETER Experiment Name: At_Root-Tips-vs-Tops_P Parameter: Tissue Value: Root Tips vs. Root Tops
  misc_feature: MA Experiment ID: 20000234 Result: Up-regulated in Transcription
  misc_feature: MA Experiment 20000234 PARAMETER Experiment Name: At_Siliques_P Parameter: Age (day) Value: 21
  misc_feature: MA Experiment 20000234 PARAMETER Experiment Name: At_Siliques_P Parameter: Organism Value: A. thaliana
  misc_feature: MA Experiment 20000234 PARAMETER Experiment Name: At_Siliques_P Parameter: Plant Line Value: WS
  misc_feature: MA Experiment 20000234 PARAMETER Experiment Name: At_Siliques_P Parameter: Tissue Value: Less Than 5mm Siliques vs. Whole Plant
  misc_feature: MA Experiment ID: 20000264 Result: Up-regulated in Transcription
  misc_feature: MA Experiment 20000264 PARAMETER Experiment Name: At_Open_Flower_P Parameter: Age (day) Value: 21
  misc_feature: MA Experiment 20000264 PARAMETER Experiment Name: At_Open_Flower_P Parameter: Plant Line Value: WS
  misc_feature: MA Experiment 20000264 PARAMETER Experiment Name: At_Open_Flower_P Parameter: Tissue Value: Open Flower vs. Whole Plant
  misc_feature: MA Experiment ID: 20000286 Result: Up-regulated in Transcription
  misc_feature: MA Experiment 20000286 PARAMETER Experiment Name: At_Open_Flower_P Parameter: Age (day) Value: 21
  misc_feature: MA Experiment 20000286 PARAMETER Experiment Name: At_Open_Flower_P Parameter: Plant Line Value: WS
  misc_feature: MA Experiment 20000286 PARAMETER Experiment Name: At_Open_Flower_P Parameter: Tissue Value: Half Open vs. Whole Plant
  misc_feature: MA Experiment ID: 20000438 Result: Up-regulated in Transcription
  misc_feature: MA Experiment 20000438 PARAMETER Experiment Name: At_Shoots__P Parameter: Age (day) Value: 14
  misc_feature: MA Experiment 20000438 PARAMETER Experiment Name: At_Shoots__P Parameter: Tissue Value: Shoots vs. Whole Plant
  misc_feature: MA Experiment ID: 20000439 Result: Up-regulated in Transcription
  misc_feature: MA Experiment 20000439 PARAMETER Experiment Name: At_Roots__P Parameter: Age (day) Value: 14 vs. 21
  misc_feature: MA Experiment 20000439 PARAMETER Experiment Name: At_Roots__P Parameter: Organism Value: A. thaliana
  misc_feature: MA Experiment 20000439 PARAMETER Experiment Name: At_Roots__P Parameter: Tissue Value: Roots vs. Whole Plant
  misc_feature: MA Experiment ID: 20000794 Result: Up-regulated in Transcription
  misc_feature: MA Experiment 20000794 PARAMETER Experiment Name: At_Petals_P Parameter: Age (day) Value: 23-25 days
  misc_feature: MA Experiment 20000794 PARAMETER Experiment Name: At_Petals_P Parameter: Plant Line Value: WS
  misc_feature: MA Experiment 20000794 PARAMETER Experiment Name: At_Petals_P Parameter: Tissue Value: Petals vs. Whole plant
  misc_feature: MA Experiment ID: 20001451 Result: Up-regulated in Transcription
  misc_feature: MA Experiment 20001451 PARAMETER Experiment Name: At_Far-red-induction_P Parameter: Age (day) Value: 7
  misc_feature: MA Experiment 20001451 PARAMETER Experiment Name: At_Far-red-induction_P Parameter: Light Value: Far-red vs. White
  misc_feature: MA Experiment 20001451 PARAMETER Experiment Name: At_Far-red-induction_P Parameter: Organism Value: A. thaliana
  misc_feature: MA Experiment 20001451 PARAMETER Experiment Name: At_Far-red-induction_P Parameter: Plant Line Value: Columbia
  misc_feature: MA Experiment 20001451 PARAMETER Experiment Name: At_Far-red-induction_P Parameter: Timepoint (hr) Value: 24
  misc_feature: MA Experiment 20001451 PARAMETER Experiment Name: At_Far-red-induction_P Parameter: Tissue Value: Whole Plant
  misc_feature: MA Experiment ID: 20001910 Result: Up-regulated in Transcription
  misc_feature: MA Experiment 20001910 PARAMETER Experiment Name: At_Drought_Reproduction_P Parameter: Age (day) Value: 37
  misc_feature: MA Experiment 20001910 PARAMETER Experiment Name: At_Drought_Reproduction_P Parameter: Organism Value: A. thaliana
  misc_feature: MA Experiment 20001910 PARAMETER Experiment Name: At_Drought_Reproduction_P Parameter: Plant Line Value: WS
  misc_feature: MA Experiment 20001910 PARAMETER Experiment Name: At_Drought_Reproduction_P Parameter: Timepoint (day) Value: 7
  misc_feature: MA Experiment 20001910 PARAMETER Experiment Name: At_Drought_Reproduction_P Parameter: Tissue Value: Flowers
  misc_feature: MA Experiment 20001910 PARAMETER Experiment Name: At_Drought_Reproduction_P Parameter: Treatment Value: Drought vs. No Drought
atgtcagatagatgggctcgacaaaacgcggaacgtcctgcaactactttggctgagagaagaaatgtgaataaaaacgtttcacttcagactggtgaagagttttcaatggagtttcttaaggatcatactcctgtccaatctcctatcgttgcaggaagaactcataatgatgtgcatagatttggagacctttactatcagaatcaaccacaggggtatgatagtgctgctcggtttcatgaactgaggaggatagaatctgaatgtccttctgatgcatatgattttggtcgagacccgaggagtactatacggcttgagaatggcggttatatgcctcattttaatgcttaccacaatgtaggttgtgataaagaagttattactaggaaagcttttggtgaaataaattctaaccgaggagatgtcacggggatgtctgcgccttgcgtgttcttgccagagcgtactcagtccaacaactttaccggaggaggaggagattttgatagattcggaaaagtaaagtttctttgtagctttggtggtagaattatgccaagatccactgatgaaaaactgaaatacgttggaggagagacgcatattatttcgatacgcaagaatctttcgtgggaagaactcaagaagaagacctcagctatatgccaacagttgcattcaattaagtatcagcttccaggagatgagcttgactccttgatatcagtatcttcggatgaggatcttcagaatatgattgaagagtacaatggacttgaaaggcttgaaggttcacaacggccacgactgttcttgattcctattggagagcctgaaagaaaggctcagcagaacattcctgattgccaatatgctgcagctttaaattgtaatgctgatcctaatcctaggaacatttctgatggtcagactttggctggtgattcacgttatcatataaacaatttggatcgtaatccaagtttctgtaaacgaacaccgggtcagatgcttcgactggatgctactgctatgcgtcctaatccacttttcaatggagttcagtataacatggcttcatatccatcacctcctgtttctccttcaccattccagcaaagggattcaaatggtgcatactcacagttccatggcaacaactccagctcggagagcaataattccttcactccacgaccactaccttcagttaactatcagtctaacaagcaggaggcagagaacctatatgggattcagttccagaatggctttaatgacaaacctgtgactcccaatcttggtcatgttgataatctttgctttaaccctgagaggtctgcgaataacggaagggtcttctatgataaagtgagcatgcccgaggaatctaaggtttccttctctgggtctacaaactcaaatgattcttgcttgggaatcccacactcgtactcagactctacattggagattactggtggacactctagctacttttcacaagagagacaacaaagcccatcttcaacattgaactttacaaagaaacaaacacaagaaaagcaagtacaggtgcataggaataacgatctagctgaccgtcgtacacaaagcgatatactcgacatgaagtccactgagggaggagagactatgtttaaattttccccaagtccacgaggacctagactatccggtgaaaacaagacgttgcatatagacatttctgctgcaggcaatcattatgatgaaatttatctaaatcaggaaaccaagaatcaaggagggaatagtgataccatttttcatctaggagggaaagtactgggaacaagagcaatgcctactgacatggaaggcaagaagttgcctatatatggaaaccaaacctcagttgttgttgatccatggaagcaaataaagcaagataatgagcgtttgatggctggagctggaacttcatctgctaatctaatttccttagaggaaggtatagcagctaatacccctaatgaggaacctgaatctcgtgctgcccgagaaaggaacttggaagtttcagggatctttataagtaagagagtagtctctgatgagaatttcttgttcagcatcgcctctgaatcaccaaacagcaagattgttcatgagacacaaaagaatagaacagaaagagaaggtggtttaggccatgtgagaatcccaatcatggatttgaatcagccagcgccagcaacagcgagtgaaacttacagtttgaagacaccaagagaagactcaccacaaagcattccacatgcaaagattaccagcggtgatacaatattcctttctgaggaagctgaagccaataccggccagaaagagaacagtttcaaagacacactctttgttgaaatggaagccagtgtttatggcttgcagataataaagaacgctgatcttgaagacctgacagaactgggatccgggacatatggaactgtctatcatggaacatggcggggaacggatgttgctataaagagaatacggaacagttgctttgcagggagatcatctgaacaagaacgcttgacgaaagatttctggagggaagcacaaatactctcaaatcttcatcacccaaacgttgttgcattctacggtatagtgcctgatggaactggaggaaccttggcaactgttacagagttcatggtgaatgggtcactcaggcatgctcttctcaaaaaggacagattgcttgacactcggaaaaagataataattgcaatggatgctgcttttggcatggagtatttgcactcgaagaacatcgtccactttgatctcaaatgcgaaaacttacttgtcaatttaagggatccacaacggcctatatgcaaggtgggagatcttggcttatctagaatcaaacgtaacactttagtatctgggggagtgagaggaactcttccatggatggccccagaactcttgaacggaagcagcacccgagtttctgagaaagttgatgttttttcatatggaatctcgctgtgggagattctaaccggagaggaaccctatgcagatatgcattgtggagcaatcattggcgggatcgtgaagaacacacttcgacctcctataccaaaaagctgttctccggaatggaaaaagctgatggaacaatgctggtctgtcgacccggattctcgtcctccattcaccgaaataacatgccgacttcggtccatgtcaatggaagtcgtcactaaaagcaaaagaagagaaaataaaccctga

SEQ ID NO: 78735 - protein, 1099 aa, Arabidopsis thaliana
  peptide (1)..(1099): Ceres Seq. ID no. 12644721
  misc_feature (818)..(1081): Pfam Name: Protein kinase domain Pfam Description: Protein kinase domain
  misc_feature (761)..(1095): Homolog of NCBI NO: 15219796 NR Description: putative Ser/Thr protein kinase; protein id:
  misc_feature (96)..(331): Homolog of NCBI NO: 15219796 NR Description: putative Ser/Thr protein kinase; protein id:
  misc_feature (654)..(1095): Homolog of NCBI NO: 25406805 NR Description: hypothetical protein [imported] - Arabidopsis >gi|2494111|gb|AAB80620.1| Contains similarity to Glycine protein
  misc_feature (176)..(331): Homolog of NCBI NO: 25406805 NR Description: hypothetical protein [imported] - Arabidopsis >gi|2494111|gb|AAB80620.1| Contains similarity to Glycine protein
  misc_feature (803)..(1099): Homolog of NCBI NO: 15230168 NR Description: protein kinase, putative; protein id: At3g24720.1
  misc_feature (116)..(472): Homolog of NCBI NO: 15219417 NR Description: hypothetical protein; protein id: At1g79570.1
  misc_feature (809)..(1093): Homolog of NCBI NO: 15219417 NR Description: hypothetical protein; protein id: At1g79570.1
  misc_feature (809)..(1099): Homolog of NCBI NO: 15219183 NR Description: putative Ser/Thr protein kinase; protein id:
  misc_feature (148)..(421): Homolog of NCBI NO: 15219183 NR Description: putative Ser/Thr protein kinase; protein id:
  misc_feature (175)..(597): Homolog of NCBI NO: 15226883 NR Description: putative protein kinase; protein id: At2g35050.1
MSDRWARQNAERPATTLAERRNVNKNVSLQTGEEFSMEFLKDHTPVQSPIVAGRTHNDVHRFGDLYYQNQPQGYDSAARFHELRRIESECPSDAYDFGRDPRSTIRLENGGYMPHFNAYHNVGCDKEVITRKAFGEINSNRGDVTGMSAPCVFLPERTQSNNFTGGGGDFDRFGKVKFLCSFGGRIMPRSTDEKLKYVGGETHIISIRKNLSWEELKKKTSAICQQLHSIKYQLPGDELDSLISVSSDEDLQNMIEEYNGLERLEGSQRPRLFLIPIGEPERKAQQNIPDCQYAAALNCNADPNPRNISDGQTLAGDSRYHINNLDRNPSFCKRTPGQMLRLDATAMRPNPLFNGVQYNMASYPSPPVSPSPFQQRDSNGAYSQFHGNNSSSESNNSFTPRPLPSVNYQSNKQEAENLYGIQFQNGFNDKPVTPNLGHVDNLCFNPERSANNGRVFYDKVSMPEESKVSFSGSTNSNDSCLGIPHSYSDSTLEITGGHSSYFSQERQQSPSSTLNFTKKQTQEKQVQVHRNNDLADRRTQSDILDMKSTEGGETMFKFSPSPRGPRLSGENKTLHIDISAAGNHYDEIYLNQETKNQGGNSDTIFHLGGKVLGTRAMPTDMEGKKLPIYGNQTSVVVDPWKQIKQDNERLMAGAGTSSANLISLEEGIAANTPNEEPESRAARERNLEVSGIFISKRVVSDENFLFSIASESPNSKIVHETQKNRTEREGGLGHVRIPIMDLNQPAPATASETYSLKTPREDSPQSIPHAKITSGDTIFLSEEAEANTGQKENSFKDTLFVEMEASVYGLQIIKNADLEDLTELGSGTYGTVYHGTWRGTDVAIKRIRNSCFAGRSSEQERLTKDFWREAQILSNLHHPNVVAFYGIVPDGTGGTLATVTEFMVNGSLRHALLKKDRLLDTRKKIIIAMDAAFGMEYLHSKNIVHFDLKCENLLVNLRDPQRPICKVGDLGLSRIKRNTLVSGGVRGTLPWMAPELLNGSSTRVSEKVDVFSYGISLWEILTGEEPYADMHCGAIIGGIVKNTLRPPIPKSCSPEWKKLMEQCWSVDPDSRPPFTEITCRLRSMSMEVVTKSKRRENKP

SEQ ID NO: 78736 - protein, 1063 aa, Arabidopsis thaliana
  peptide (1)..(1063): Ceres Seq. ID no. 12644722
  misc_feature (782)..(1045): Pfam Name: Protein kinase domain Pfam Description: Protein kinase domain
  misc_feature (725)..(1059): Homolog of NCBI NO: 15219796 NR Description: putative Ser/Thr protein kinase; protein id:
  misc_feature (60)..(295): Homolog of NCBI NO: 15219796 NR Description: putative Ser/Thr protein kinase; protein id:
  misc_feature (618)..(1059): Homolog of NCBI NO: 25406805 NR Description: hypothetical protein [imported] - Arabidopsis >gi|2494111|gb|AAB80620.1| Contains similarity to Glycine protein
  misc_feature (140)..(295): Homolog of NCBI NO: 25406805 NR Description: hypothetical protein [imported] - Arabidopsis >gi|2494111|gb|AAB80620.1| Contains similarity to Glycine protein
  misc_feature (767)..(1063): Homolog of NCBI NO: 15230168 NR Description: protein kinase, putative; protein id: At3g24720.1
  misc_feature (80)..(436): Homolog of NCBI NO: 15219417 NR Description: hypothetical protein; protein id: At1g79570.1
  misc_feature (773)..(1057): Homolog of NCBI NO: 15219417 NR Description: hypothetical protein; protein id: At1g79570.1
  misc_feature (773)..(1063): Homolog of NCBI NO: 15219183 NR Description: putative Ser/Thr protein kinase; protein id:
  misc_feature (112)..(385): Homolog of NCBI NO: 15219183 NR Description: putative Ser/Thr protein kinase; protein id:
  misc_feature (139)..(561): Homolog of NCBI NO: 15226883 NR Description: putative protein kinase; protein id: At2g35050.1
MEFLKDHTPVQSPIVAGRTHNDVHRFGDLYYQNQPQGYDSAARFHELRRIESECPSDAYDFGRDPRSTIRLENGGYMPHFNAYHNVGCDKEVITRKAFGEINSNRGDVTGMSAPCVFLPERTQSNNFTGGGGDFDRFGKVKFLCSFGGRIMPRSTDEKLKYVGGETHIISIRKNLSWEELKKKTSAICQQLHSIKYQLPGDELDSLISVSSDEDLQNMIEEYNGLERLEGSQRPRLFLIPIGEPERKAQQNIPDCQYAAALNCNADPNPRNISDGQTLAGDSRYHINNLDRNPSFCKRTPGQMLRLDATAMRPNPLFNGVQYNMASYPSPPVSPSPFQQRDSNGAYSQFHGNNSSSESNNSFTPRPLPSVNYQSNKQEAENLYGIQFQNGFNDKPVTPNLGHVDNLCFNPERSANNGRVFYDKVSMPEESKVSFSGSTNSNDSCLGIPHSYSDSTLEITGGHSSYFSQERQQSPSSTLNFTKKQTQEKQVQVHRNNDLADRRTQSDILDMKSTEGGETMFKFSPSPRGPRLSGENKTLHIDISAAGNHYDEIYLNQETKNQGGNSDTIFHLGGKVLGTRAMPTDMEGKKLPIYGNQTSVVVDPWKQIKQDNERLMAGAGTSSANLISLEEGIAANTPNEEPESRAARERNLEVSGIFISKRVVSDENFLFSIASESPNSKIVHETQKNRTEREGGLGHVRIPIMDLNQPAPATASETYSLKTPREDSPQSIPHAKITSGDTIFLSEEAEANTGQKENSFKDTLFVEMEASVYGLQIIKNADLEDLTELGSGTYGTVYHGTWRGTDVAIKRIRNSCFAGRSSEQERLTKDFWREAQILSNLHHPNVVAFYGIVPDGTGGTLATVTEFMVNGSLRHALLKKDRLLDTRKKIIIAMDAAFGMEYLHSKNIVHFDLKCENLLVNLRDPQRPICKVGDLGLSRIKRNTLVSGGVRGTLPWMAPELLNGSSTRVSEKVDVFSYGISLWEILTGEEPYADMHCGAIIGGIVKNTLRPPIPKSCSPEWKKLMEQCWSVDPDSRPPFTEITCRLRSMSMEVVTKSKRRENKP

SEQ ID NO: 78737 - protein, 987 aa, Arabidopsis thaliana
  peptide (1)..(987): Ceres Seq. ID no. 12644723
  misc_feature (706)..(969): Pfam Name: Protein kinase domain Pfam Description: Protein kinase domain
  misc_feature (649)..(983): Homolog of NCBI NO: 15219796 NR Description: putative Ser/Thr protein kinase; protein id:
  misc_feature (1)..(219): Homolog of NCBI NO: 15219796 NR Description: putative Ser/Thr protein kinase; protein id:
  misc_feature (542)..(983): Homolog of NCBI NO: 25406805 NR Description: hypothetical protein [imported] - Arabidopsis >gi|2494111|gb|AAB80620.1| Contains similarity to Glycine protein
  misc_feature (64)..(219): Homolog of NCBI NO: 25406805 NR Description: hypothetical protein [imported] - Arabidopsis >gi|2494111|gb|AAB80620.1| Contains similarity to Glycine protein
  misc_feature (691)..(987): Homolog of NCBI NO: 15230168 NR Description: protein kinase, putative; protein id: At3g24720.1
  misc_feature (4)..(360): Homolog of NCBI NO: 15219417 NR Description: hypothetical protein; protein id: At1g79570.1
  misc_feature (697)..(981): Homolog of NCBI NO: 15219417 NR Description: hypothetical protein; protein id: At1g79570.1
  misc_feature (697)..(987): Homolog of NCBI NO: 15219183 NR Description: putative Ser/Thr protein kinase; protein id:
  misc_feature (36)..(309): Homolog of NCBI NO: 15219183 NR Description: putative Ser/Thr protein kinase; protein id:
  misc_feature (63)..(485): Homolog of NCBI NO: 15226883 NR Description: putative protein kinase; protein id: At2g35050.1
MPHFNAYHNVGCDKEVITRKAFGEINSNRGDVTGMSAPCVFLPERTQSNNFTGGGGDFDRFGKVKFLCSFGGRIMPRSTDEKLKYVGGETHIISIRKNLSWEELKKKTSAICQQLHSIKYQLPGDELDSLISVSSDEDLQNMIEEYNGLERLEGSQRPRLFLIPIGEPERKAQQNIPDCQYAAALNCNADPNPRNISDGQTLAGDSRYHINNLDRNPSFCKRTPGQMLRLDATAMRPNPLFNGVQYNMASYPSPPVSPSPFQQRDSNGAYSQFHGNNSSSESNNSFTPRPLPSVNYQSNKQEAENLYGIQFQNGFNDKPVTPNLGHVDNLCFNPERSANNGRVFYDKVSMPEESKVSFSGSTNSNDSCLGIPHSYSDSTLEITGGHSSYFSQERQQSPSSTLNFTKKQTQEKQVQVHRNNDLADRRTQSDILDMKSTEGGETMFKFSPSPRGPRLSGENKTLHIDISAAGNHYDEIYLNQETKNQGGNSDTIFHLGGKVLGTRAMPTDMEGKKLPIYGNQTSVVVDPWKQIKQDNERLMAGAGTSSANLISLEEGIAANTPNEEPESRAARERNLEVSGIFISKRVVSDENFLFSIASESPNSKIVHETQKNRTEREGGLGHVRIPIMDLNQPAPATASETYSLKTPREDSPQSIPHAKITSGDTIFLSEEAEANTGQKENSFKDTLFVEMEASVYGLQIIKNADLEDLTELGSGTYGTVYHGTWRGTDVAIKRIRNSCFAGRSSEQERLTKDFWREAQILSNLHHPNVVAFYGIVPDGTGGTLATVTEFMVNGSLRHALLKKDRLLDTRKKIIIAMDAAFGMEYLHSKNIVHFDLKCENLLVNLRDPQRPICKVGDLGLSRIKRNTLVSGGVRGTLPWMAPELLNGSSTRVSEKVDVFSYGISLWEILTGEEPYADMHCGAIIGGIVKNTLRPPIPKSCSPEWKKLMEQCWSVDPDSRPPFTEITCRLRSMSMEVVTKSKRRENKP

SEQ ID NO: 78738 - DNA, 486 bp, Arabidopsis thaliana
  misc_feature (1)..(486): Ceres Seq. ID no. 12644861
  misc_feature: MA Experiment ID: 20000180 Result: Up-regulated in Transcription
  misc_feature: MA Experiment 20000180 PARAMETER Experiment Name: At_Germinating_Seeds_P Parameter: Age (hr) Value: 24 vs. 0
  misc_feature: MA Experiment 20000180 PARAMETER Experiment Name: At_Germinating_Seeds_P Parameter: Tissue Value: Germinating Seeds
  misc_feature: MA Experiment ID: 20000213 Result: Up-regulated in Transcription
  misc_feature: MA Experiment 20000213 PARAMETER Experiment Name: At_4deg_Cold_P Parameter: Timepoint (hr) Value: 2
  misc_feature: MA Experiment ID: 20000227 Result: Down-regulated in Transcription
  misc_feature: MA Experiment 20000227 PARAMETER Experiment Name: At_Root-Tips-vs-Tops_P Parameter: Tissue Value: Root Tips vs. Root Tops
  misc_feature: MA Experiment ID: 20000234 Result: Down-regulated in Transcription
  misc_feature: MA Experiment 20000234 PARAMETER Experiment Name: At_Siliques_P Parameter: Age (day) Value: 21
  misc_feature: MA Experiment 20000234 PARAMETER Experiment Name: At_Siliques_P Parameter: Organism Value: A. thaliana
  misc_feature: MA Experiment 20000234 PARAMETER Experiment Name: At_Siliques_P Parameter: Plant Line Value: WS
  misc_feature: MA Experiment 20000234 PARAMETER Experiment Name: At_Siliques_P Parameter: Tissue Value: Less Than 5mm Siliques vs. Whole Plant
  misc_feature: MA Experiment ID: 20000235 Result: Down-regulated in Transcription
  misc_feature: MA Experiment 20000235 PARAMETER Experiment Name: At_Siliques_P Parameter: Age (day) Value: 21
  misc_feature: MA Experiment 20000235 PARAMETER Experiment Name: At_Siliques_P Parameter: Organism Value: A. thaliana
  misc_feature: MA Experiment 20000235 PARAMETER Experiment Name: At_Siliques_P Parameter: Plant Line Value: WS
  misc_feature: MA Experiment 20000235 PARAMETER Experiment Name: At_Siliques_P Parameter: Tissue Value: 5-10mm Siliques vs. Whole Plant
  misc_feature: MA Experiment ID: 20000265 Result: Down-regulated in Transcription
  misc_feature: MA Experiment 20000265 PARAMETER Experiment Name: At_Open_Flower_P Parameter: Age (day) Value: 21
  misc_feature: MA Experiment 20000265 PARAMETER Experiment Name: At_Open_Flower_P Parameter: Plant Line Value: WS
  misc_feature: MA Experiment 20000265 PARAMETER Experiment Name: At_Open_Flower_P Parameter: Tissue Value: Closed Flower vs. Whole Plant
  misc_feature: MA Experiment ID: 20000268 Result: Down-regulated in Transcription
  misc_feature: MA Experiment 20000268 PARAMETER Experiment Name: At_100mM_NaCl__P Parameter: Age (day) Value: 14
  misc_feature: MA Experiment 20000268 PARAMETER Experiment Name: At_100mM_NaCl__P Parameter: Organism Value: A. thaliana
  misc_feature: MA Experiment 20000268 PARAMETER Experiment Name: At_100mM_NaCl__P Parameter: Plant Line Value: WS
  misc_feature: MA Experiment 20000268 PARAMETER Experiment Name: At_100mM_NaCl__P Parameter: Timepoint (hr) Value: 6
  misc_feature: MA Experiment 20000268 PARAMETER Experiment Name: At_100mM_NaCl__P Parameter: Tissue Value: Whole Plant
  misc_feature: MA Experiment 20000268 PARAMETER Experiment Name: At_100mM_NaCl__P Parameter: Treatment Value: 100mM NaCl vs. No Treatment
  misc_feature: MA Experiment ID: 20000286 Result: Down-regulated in Transcription
  misc_feature: MA Experiment 20000286 PARAMETER Experiment Name: At_Open_Flower_P Parameter: Age (day) Value: 21
  misc_feature: MA Experiment 20000286 PARAMETER Experiment Name: At_Open_Flower_P Parameter: Plant Line Value: WS
  misc_feature: MA Experiment 20000286 PARAMETER Experiment Name: At_Open_Flower_P Parameter: Tissue Value: Half Open vs. Whole Plant
  misc_feature: MA Experiment ID: 20000436 Result: Down-regulated in Transcription
  misc_feature: MA Experiment 20000436 PARAMETER Experiment Name: At_Drought_P Parameter: Age (day) Value: 7
  misc_feature: MA Experiment 20000436 PARAMETER Experiment Name: At_Drought_P Parameter: Organism Value: A. thaliana
  misc_feature: MA Experiment 20000436 PARAMETER Experiment Name: At_Drought_P Parameter: Plant Line Value: WS
  misc_feature: MA Experiment 20000436 PARAMETER Experiment Name: At_Drought_P Parameter: Timepoint (hr) Value: 12
  misc_feature: MA Experiment 20000436 PARAMETER Experiment Name: At_Drought_P Parameter: Tissue Value: Whole Plant
  misc_feature: MA Experiment 20000436 PARAMETER Experiment Name: At_Drought_P Parameter: Treatment Value: Drought vs. No Drought
  misc_feature: MA Experiment ID: 20000496 Result: Down-regulated in Transcription
  misc_feature: MA Experiment 20000496 PARAMETER Experiment Name: At_Guard_Cells_P Parameter: Harvest Date Value: 7/19/2002
  misc_feature: MA Experiment 20000496 PARAMETER Experiment Name: At_Guard_Cells_P Parameter: Organism Value: Canola
  misc_feature: MA Experiment 20000496 PARAMETER Experiment Name: At_Guard_Cells_P Parameter: Tissue Value: Guard Cells vs. Leaves
  misc_feature: MA Experiment ID: 20000573 Result: Down-regulated in Transcription
  misc_feature: MA Experiment 20000573 PARAMETER Experiment Name: At_100uM_ABA_Mutants__P Parameter: Organism Value: A. thaliana
  misc_feature: MA Experiment 20000573 PARAMETER Experiment Name: At_100uM_ABA_Mutants__P Parameter: Plant Line Value: CS22 vs. Ler wt
  misc_feature: MA Experiment 20000573 PARAMETER Experiment Name: At_100uM_ABA_Mutants__P Parameter: Timepoint (hr) Value: N/A
  misc_feature: MA Experiment 20000573 PARAMETER Experiment Name: At_100uM_ABA_Mutants__P Parameter: Tissue Value: Whole Plant
  misc_feature: MA Experiment 20000573 PARAMETER Experiment Name: At_100uM_ABA_Mutants__P Parameter: Treatment Value: None
  misc_feature: MA Experiment ID: 20000574 Result: Down-regulated in Transcription
  misc_feature: MA Experiment 20000574 PARAMETER Experiment Name: At_100uM_ABA_Mutants__P Parameter: Organism Value: A. thaliana
  misc_feature: MA Experiment 20000574 PARAMETER Experiment Name: At_100uM_ABA_Mutants__P Parameter: Plant Line Value: CS23 vs. Ler wt
  misc_feature: MA Experiment 20000574 PARAMETER Experiment Name: At_100uM_ABA_Mutants__P Parameter: Timepoint (hr) Value: N/A
  misc_feature: MA Experiment 20000574 PARAMETER Experiment Name: At_100uM_ABA_Mutants__P Parameter: Tissue Value: Whole Plant
  misc_feature: MA Experiment 20000574 PARAMETER Experiment Name: At_100uM_ABA_Mutants__P Parameter: Treatment Value: None
  misc_feature: MA Experiment ID: 20001247 Result: Up-regulated in Transcription
  misc_feature: MA Experiment 20001247 PARAMETER Experiment Name: At_Far-red-induction_P Parameter: Age (day) Value: 7
  misc_feature: MA Experiment 20001247 PARAMETER Experiment Name: At_Far-red-induction_P Parameter: Light Value: Far-red vs. White
  misc_feature: MA Experiment 20001247 PARAMETER Experiment Name: At_Far-red-induction_P Parameter: Organism Value: A. thaliana
  misc_feature: MA Experiment 20001247 PARAMETER Experiment Name: At_Far-red-induction_P Parameter: Plant Line Value: Columbia
  misc_feature: MA Experiment 20001247 PARAMETER Experiment Name: At_Far-red-induction_P Parameter: Timepoint (hr) Value: 1
  misc_feature: MA Experiment 20001247 PARAMETER Experiment Name: At_Far-red-induction_P Parameter: Tissue Value: Whole Plant
  misc_feature: MA Experiment ID: 20001451 Result: Up-regulated in Transcription
  misc_feature: MA Experiment 20001451 PARAMETER Experiment Name: At_Far-red-induction_P Parameter: Age (day) Value: 7
  misc_feature: MA Experiment 20001451 PARAMETER Experiment Name: At_Far-red-induction_P Parameter: Light Value: Far-red vs. White
  misc_feature: MA Experiment 20001451 PARAMETER Experiment Name: At_Far-red-induction_P Parameter: Organism Value: A. thaliana
  misc_feature: MA Experiment 20001451 PARAMETER Experiment Name: At_Far-red-induction_P Parameter: Plant Line Value: Columbia
  misc_feature: MA Experiment 20001451 PARAMETER Experiment Name: At_Far-red-induction_P Parameter: Timepoint (hr) Value: 24
  misc_feature: MA Experiment 20001451 PARAMETER Experiment Name: At_Far-red-induction_P Parameter: Tissue Value: Whole Plant
  misc_feature: MA Experiment ID: 20001554 Result: Down-regulated in Transcription
  misc_feature: MA Experiment 20001554 PARAMETER Experiment Name: At_Drought_Soil_Dry_P Parameter: Age (day) Value: 21
  misc_feature: MA Experiment 20001554 PARAMETER Experiment Name: At_Drought_Soil_Dry_P Parameter: Organism Value: A. thaliana
  misc_feature: MA Experiment 20001554 PARAMETER Experiment Name: At_Drought_Soil_Dry_P Parameter: Plant Line Value: WS
  misc_feature: MA Experiment 20001554 PARAMETER Experiment Name: At_Drought_Soil_Dry_P Parameter: Post Timepoint (hr) Value: None
  misc_feature: MA Experiment 20001554 PARAMETER Experiment Name: At_Drought_Soil_Dry_P Parameter: Post-Treatment Value: None
  misc_feature: MA Experiment 20001554 PARAMETER Experiment Name: At_Drought_Soil_Dry_P Parameter: Timepoint (day) Value: 7
  misc_feature: MA Experiment 20001554 PARAMETER Experiment Name: At_Drought_Soil_Dry_P Parameter: Treatment Value: Drought vs. No Drought
  misc_feature: MA Experiment ID: 20001555 Result: Down-regulated in Transcription
  misc_feature: MA Experiment 20001555 PARAMETER Experiment Name: At_Drought_Soil_Dry_P Parameter: Age (day) Value: 24
  misc_feature: MA Experiment 20001555 PARAMETER Experiment Name: At_Drought_Soil_Dry_P Parameter: Organism Value: A. thaliana
  misc_feature: MA Experiment 20001555 PARAMETER Experiment Name: At_Drought_Soil_Dry_P Parameter: Plant Line Value: WS
  misc_feature: MA Experiment 20001555 PARAMETER Experiment Name: At_Drought_Soil_Dry_P Parameter: Post Timepoint (hr) Value: None
  misc_feature: MA Experiment 20001555 PARAMETER Experiment Name: At_Drought_Soil_Dry_P Parameter: Post-Treatment Value: None
  misc_feature: MA Experiment 20001555 PARAMETER Experiment Name: At_Drought_Soil_Dry_P Parameter: Timepoint (day) Value: 10
  misc_feature: MA Experiment 20001555 PARAMETER Experiment Name: At_Drought_Soil_Dry_P Parameter: Treatment Value: Drought vs. No Drought
  misc_feature: MA Experiment ID: 20001556 Result: Down-regulated in Transcription
  misc_feature: MA Experiment 20001556 PARAMETER Experiment Name: At_Drought_Soil_Dry_P Parameter: Age (day) Value: 26
  misc_feature: MA Experiment 20001556 PARAMETER Experiment Name: At_Drought_Soil_Dry_P Parameter: Organism Value: A. thaliana
  misc_feature: MA Experiment 20001556 PARAMETER Experiment Name: At_Drought_Soil_Dry_P Parameter: Plant Line Value: WS
  misc_feature: MA Experiment 20001556 PARAMETER Experiment Name: At_Drought_Soil_Dry_P Parameter: Post Timepoint (hr) Value: None
  misc_feature: MA Experiment 20001556 PARAMETER Experiment Name: At_Drought_Soil_Dry_P Parameter: Post-Treatment Value: None
  misc_feature: MA Experiment 20001556 PARAMETER Experiment Name: At_Drought_Soil_Dry_P Parameter: Timepoint (day) Value: 12
  misc_feature: MA Experiment 20001556 PARAMETER Experiment Name: At_Drought_Soil_Dry_P Parameter: Treatment Value: Drought vs. No Drought
  misc_feature: MA Experiment ID: 20001559 Result: Down-regulated in Transcription
  misc_feature: MA Experiment 20001559 PARAMETER Experiment Name: At_Drought_Soil_Dry_P Parameter: Age (day) Value: 28
  misc_feature: MA Experiment 20001559 PARAMETER Experiment Name: At_Drought_Soil_Dry_P Parameter: Organism Value: A. thaliana
  misc_feature: MA Experiment 20001559 PARAMETER Experiment Name: At_Drought_Soil_Dry_P Parameter: Plant Line Value: WS
  misc_feature: MA Experiment 20001559 PARAMETER Experiment Name: At_Drought_Soil_Dry_P Parameter: Post Timepoint (hr) Value: 29
  misc_feature: MA Experiment 20001559 PARAMETER Experiment Name: At_Drought_Soil_Dry_P Parameter: Post-Treatment Value: Re-Water vs. No Drought
  misc_feature: MA Experiment 20001559 PARAMETER Experiment Name: At_Drought_Soil_Dry_P Parameter: Timepoint (day) Value: 14
  misc_feature: MA Experiment 20001559 PARAMETER Experiment Name: At_Drought_Soil_Dry_P Parameter: Treatment Value: Drought vs. No Drought
  misc_feature: MA Experiment ID: 20001904 Result: Down-regulated in Transcription
  misc_feature: MA Experiment 20001904 PARAMETER Experiment Name: At_Drought_Reproduction_P Parameter: Age (day) Value: 37
  misc_feature: MA Experiment 20001904 PARAMETER Experiment Name: At_Drought_Reproduction_P Parameter: Organism Value: A. thaliana
  misc_feature: MA Experiment 20001904 PARAMETER Experiment Name: At_Drought_Reproduction_P Parameter: Plant Line Value: WS
  misc_feature: MA Experiment 20001904 PARAMETER Experiment Name: At_Drought_Reproduction_P Parameter: Timepoint (day) Value: 7
  misc_feature: MA Experiment 20001904 PARAMETER Experiment Name: At_Drought_Reproduction_P Parameter: Tissue Value: Rosettes
  misc_feature: MA Experiment 20001904 PARAMETER Experiment Name: At_Drought_Reproduction_P Parameter: Treatment Value: Drought vs. No Drought
  misc_feature: MA Experiment ID: 20001907 Result: Down-regulated in Transcription
  misc_feature: MA Experiment 20001907 PARAMETER Experiment Name: At_Drought_Reproduction_P Parameter: Age (day) Value: 37
  misc_feature: MA Experiment 20001907 PARAMETER Experiment Name: At_Drought_Reproduction_P Parameter: Organism Value: A. thaliana
  misc_feature: MA Experiment 20001907 PARAMETER Experiment Name: At_Drought_Reproduction_P Parameter: Plant Line Value: WS
  misc_feature: MA Experiment 20001907 PARAMETER Experiment Name: At_Drought_Reproduction_P Parameter: Timepoint (day) Value: 7
  misc_feature: MA Experiment 20001907 PARAMETER Experiment Name: At_Drought_Reproduction_P Parameter: Tissue Value: Siliques
  misc_feature: MA Experiment 20001907 PARAMETER Experiment Name: At_Drought_Reproduction_P Parameter: Treatment Value: Drought vs. No Drought
atggcgtcaacaaaaccaaccgatcaaatcaaacaactcaaagatatcttcgctcgtttcgacatggacaaggacggaagcttaacgcagctagaactcgccgctcttctgcgttctctcggaatcaaacctcgcagcgatcaaatctctcttctgttgaaccaaatcgaccgtaacggtaacggatccgtagagttcgacgagctggtcgtggcgatattgccggatataaacgaagaggttttgataaatcaagaacagttgatggaggttttccgttcgtttgatcgtgacggaaacggttcaataacggcggcggaacttgctgggtcaatggctaaaatgggacatccgttgacttaccgtgaattaacggaaatgatgacggaagctgattctaacggtgacggtgttattagttttaatgagttttctcatattatggctaaatcggctgctgattttcttggattaaccgcttcttga

SEQ ID NO: 78739 - protein, 161 aa, Arabidopsis thaliana
  peptide (1)..(161): Ceres Seq. ID no. 12644862
  misc_feature (123)..(151): Pfam Name: EF hand Pfam Description: EF hand
  misc_feature (1)..(161): Homolog of NCBI NO: 15230858 NR Description: calmodulin, putative; protein id: At3g25600.1
  misc_feature (1)..(161): Homolog of NCBI NO: 28393082 NR Description: putative calmodulin [Arabidopsis thaliana]
  misc_feature (8)..(158): Homolog of NCBI NO: 15221797 NR Description: calmodulin, putative; protein id: At1g18530.1
  misc_feature (8)..(160): Homolog of NCBI NO: 34912426 NR Description: P0681B11.17 [Oryza sativa (japonica
  misc_feature (8)..(154): Homolog of NCBI NO: 15228441 NR Description: putative calmodulin; protein id: At3g03000.1, by cDNA: gi_15010601, supported by cDNA: gi_19699245 [Arabidopsis >gi|6728961|gb|AAF26959.1|AC018363_4 putative calmodulin
  misc_feature (8)..(154): Homolog of NCBI NO: 13359053 NR Description: P0436D06.14 [Oryza sativa (japonica
  misc_feature (8)..(154): Homolog of NCBI NO: 15222618 NR Description: calmodulin, putative; protein id: At1g32250.1
  misc_feature (1)..(148): Homolog of NCBI NO: 3800847 NR Description: VU91B calmodulin [synthetic construct]
  misc_feature (1)..(148): Homolog of NCBI NO: 1345661 NR Description: Calmodulin >gi|71678|pir||MCPP calmodulin - tetraurelia >gi|159994|gb|AAA29443.1| calmodulin
  misc_feature (1)..(148): Homolog of NCBI NO: 13386230 NR Description: RIKEN cDNA 2310068O22 [Mus musculus]
MASTKPTDQIKQLKDIFARFDMDKDGSLTQLELAALLRSLGIKPRSDQISLLLNQIDRNGNGSVEFDELVVAILPDINEEVLINQEQLMEVFRSFDRDGNGSITAAELAGSMAKMGHPLTYRELTEMMTEADSNGDGVISFNEFSHIMAKSAADFLGLTAS

SEQ ID NO: 78740 - protein, 140 aa, Arabidopsis thaliana
  peptide (1)..(140): Ceres Seq. ID no. 12644863
  misc_feature (102)..(130): Pfam Name: EF hand Pfam Description: EF hand
  misc_feature (1)..(140): Homolog of NCBI NO: 15230858 NR Description: calmodulin, putative; protein id: At3g25600.1
  misc_feature (1)..(140): Homolog of NCBI NO: 28393082 NR Description: putative calmodulin [Arabidopsis thaliana]
  misc_feature (1)..(137): Homolog of NCBI NO: 15221797 NR Description: calmodulin, putative; protein id: At1g18530.1
  misc_feature (1)..(139): Homolog of NCBI NO: 34912426 NR Description: P0681B11.17 [Oryza sativa (japonica
  misc_feature (1)..(133): Homolog of NCBI NO: 15228441 NR Description: putative calmodulin; protein id: At3g03000.1, by cDNA: gi_15010601, supported by cDNA: gi_19699245 [Arabidopsis >gi|6728961|gb|AAF26959.1|AC018363_4 putative calmodulin
  misc_feature (1)..(133): Homolog of NCBI NO: 13359053 NR Description: P0436D06.14 [Oryza sativa (japonica
  misc_feature (1)..(133): Homolog of NCBI NO: 15222618 NR Description: calmodulin, putative; protein id: At1g32250.1
  misc_feature (1)..(127): Homolog of NCBI NO: 3800847 NR Description: VU91B calmodulin [synthetic construct]
  misc_feature (1)..(127): Homolog of NCBI NO: 1345661 NR Description: Calmodulin >gi|71678|pir||MCPP calmodulin - tetraurelia >gi|159994|gb|AAA29443.1| calmodulin
  misc_feature (1)..(127): Homolog of NCBI NO: 13386230 NR Description: RIKEN cDNA 2310068O22 [Mus musculus]
MDKDGSLTQLELAALLRSLGIKPRSDQISLLLNQIDRNGNGSVEFDELVVAILPDINEEVLINQEQLMEVFRSFDRDGNGSITAAELAGSMAKMGHPLTYRELTEMMTEADSNGDGVISFNEFSHIMAKSAADFLGLTAS

SEQ ID NO: 78741 - DNA, 2040 bp, Arabidopsis thaliana
  misc_feature (1)..(2040): Ceres Seq. ID no. 12644893
  misc_feature: MA Experiment ID: 108595 Result: Down-regulated in Transcription
  misc_feature: MA Experiment 108595 PARAMETER Experiment Name: At_Ler-pi_Ovule_cDNA_P Parameter: Plant Line Value: null
  misc_feature: MA Experiment ID: 20000111 Result: Down-regulated in Transcription
  misc_feature: MA Experiment 20000111 PARAMETER Experiment Name: At_42deg_Heat_cDNA_P Parameter: Temperature (deg C) Value: 42 vs. 22
  misc_feature: MA Experiment 20000111 PARAMETER Experiment Name: At_42deg_Heat_cDNA_P Parameter: Timepoint (hr) Value: 6
  misc_feature: MA Experiment 20000111 PARAMETER Experiment Name: At_42deg_Heat_cDNA_P Parameter: Tissue Value: Aerial
  misc_feature: MA Experiment ID: 20000264 Result: Up-regulated in Transcription
  misc_feature: MA Experiment 20000264 PARAMETER Experiment Name: At_Open_Flower_P Parameter: Age (day) Value: 21
  misc_feature: MA Experiment 20000264 PARAMETER Experiment Name: At_Open_Flower_P Parameter: Plant Line Value: WS
  misc_feature: MA Experiment 20000264 PARAMETER Experiment Name: At_Open_Flower_P Parameter: Tissue Value: Open Flower vs. Whole Plant
  misc_feature: MA Experiment ID: 20000794 Result: Up-regulated in Transcription
  misc_feature: MA Experiment 20000794 PARAMETER Experiment Name: At_Petals_P Parameter: Age (day) Value: 23-25 days
  misc_feature: MA Experiment 20000794 PARAMETER Experiment Name: At_Petals_P Parameter: Plant Line Value: WS
  misc_feature: MA Experiment 20000794 PARAMETER Experiment Name: At_Petals_P Parameter: Tissue Value: Petals vs. Whole plant
  misc_feature: MA Experiment ID: 20001557 Result: Down-regulated in Transcription
  misc_feature: MA Experiment 20001557 PARAMETER Experiment Name: At_Drought_Soil_Dry_P Parameter: Age (day) Value: 27
  misc_feature: MA Experiment 20001557 PARAMETER Experiment Name: At_Drought_Soil_Dry_P Parameter: Organism Value: A. thaliana
  misc_feature: MA Experiment 20001557 PARAMETER Experiment Name: At_Drought_Soil_Dry_P Parameter: Plant Line Value: WS
  misc_feature: MA Experiment 20001557 PARAMETER Experiment Name: At_Drought_Soil_Dry_P Parameter: Post Timepoint (hr) Value: 3
  misc_feature: MA Experiment 20001557 PARAMETER Experiment Name: At_Drought_Soil_Dry_P Parameter: Post-Treatment Value: Re-Water vs. No Drought
  misc_feature: MA Experiment 20001557 PARAMETER Experiment Name: At_Drought_Soil_Dry_P Parameter: Timepoint (day) Value: 13
  misc_feature: MA Experiment 20001557 PARAMETER Experiment Name: At_Drought_Soil_Dry_P Parameter: Treatment Value: Drought vs. No Drought
  misc_feature: MA Experiment ID: 20001558 Result: Down-regulated in Transcription
  misc_feature: MA Experiment 20001558 PARAMETER Experiment Name: At_Drought_Soil_Dry_P Parameter: Age (day) Value: 27
  misc_feature: MA Experiment 20001558 PARAMETER Experiment Name: At_Drought_Soil_Dry_P Parameter: Organism Value: A. thaliana
  misc_feature: MA Experiment 20001558 PARAMETER Experiment Name: At_Drought_Soil_Dry_P Parameter: Plant Line Value: WS
  misc_feature: MA Experiment 20001558 PARAMETER Experiment Name: At_Drought_Soil_Dry_P Parameter: Post Timepoint (hr) Value: 6
  misc_feature: MA Experiment 20001558 PARAMETER Experiment Name: At_Drought_Soil_Dry_P Parameter: Post-Treatment Value: Re-Water vs. No Drought
  misc_feature: MA Experiment 20001558 PARAMETER Experiment Name: At_Drought_Soil_Dry_P Parameter: Timepoint (day) Value: 13
  misc_feature: MA Experiment 20001558 PARAMETER Experiment Name: At_Drought_Soil_Dry_P Parameter: Treatment Value: Drought vs. No Drought
atggatgccatgagtagcgtagacgagagctctacaactacagattccattccggcgagaaagtcatcgtctccggcgagtttactatatagaatgggaagcggaacaagcgtggtacttgattcagagaacggtgtcgaagtcgaagtcgaagccgaatcaagaaagcttccttcttcaagattcaaaggtgttgttcctcaaccaaatggaagatggggagctcagatttacgagaaacatcaacgcgtgtggcttggtactttcaacgaggaagacgaagcagctcgtgcttacgacgtcgcggctcaccgtttccgtggccgcgatgccgttactaatttcaaagacacgacgttcgaagaagaggttgagttcttaaacgcgcattcgaaatcagagatcgtagatatgttgagaaaacacacttacaaagaagagttagaccaaaggaaacgtaaccgtgacggtaacggaaaagagacgacggcgtttgctttggcttcgatggtggttatgacggggtttaaaacggcggagttactgtttgagaaaacggtaacgccaagtgacgtcgggaaactaaaccgtttagttataccaaaacaccaagcggagaaacattttccgttaccgttaggtaataataacgtctccgttaaaggtatgctgttgaatttcgaagacgttaacgggaaagtgtggaggttccgttactcttattggaatagtagtcaaagttatgtgttgaccaaaggttggagtagattcgttaaagagaagagactttgtgctggtgatttgatcagttttaaaagatccaacgatcaagatcaaaaattctttatcgggtggaaatcgaaatccgggttggatctagagacgggtcgggttatgagattgtttggggttgatatttctttaaacgccgtcgttgtagtgaaggaaacaacggaggtgttaatgtcgtcgttaaggtgtaagaagcaacgaggaaaaatgttgcagaagatttctcagtctatttctttatgtaacggcgatcaatttaagccgttaatatacctcgccggagctccgacgaacttcatctcttcccctctctcagtttcaggcaagaagaaatcatcttctctgagaattaaaaggatacaacaacttcaaagtacattagaagatagaataaatccaccactagtatgtggaacagtatcgccacgtcttagtgttcctgatcatatactaaagcctctatatgttgagtctagcaaagttccagagatatcaagtgaattacagattcctgactctataggcattgtgaaaatgaagaaagcgtgtgagctcgcggctcgtgtattagactatgcaggaactttggttagaccgtttgttactacagatgaaattgataaagcagtgcatcagatggttattgagtttggtgcatatccttcacctcttggatatggtggatttcctaaaagtgtttgtacatcggttaatgaatgtatgtttcacgggattcccgattctcgtccgctacagaatggagatattataaacatcgatgttgcggtttacttggatgggtatcatggagatacgtcaaagactttcttatgtggagacgtcaatggaagccttaaacaacttgtcaaggtcacagaagaatgcttggagaaaggtatatcggtttgtaaagatggagcaagcttcaaacaaatcgggaagataatcagtgagcatgctgcaaagtatggctataatatggagcgattcatcggtcatggtgtaggaacggtattacactcggaacctcttatatatcttcatagtaactatgattatgaacttgaatatatgattgaaggtcaaacttttacgctcgaaccaattctcaccattggaacaacagagtttgtaacatggcctgacaaatggacaattgtgaccgcagatggtggtccggccgcacagtttgagcatacaattcttattaccaccactggtgcagaaattctcaccatatcatcatga

SEQ ID NO: 78742 - protein, 679 aa, Arabidopsis thaliana
  peptide (1)..(679): Ceres Seq. ID no. 12644894
  misc_feature (182)..(291): Pfam Name: B3 DNA binding domain Pfam Description: B3 DNA binding domain
  misc_feature (334)..(679): Homolog of NCBI NO: 15230872 NR Description: methionine aminopeptidase, putative; protein id:
  misc_feature (334)..(679): Homolog of NCBI NO: 11320958 NR Description: methionine aminopeptidase-like protein
  misc_feature (334)..(679): Homolog of NCBI NO: 7939560 NR Description: methionine aminopeptidase-like protein
  misc_feature (1)..(331): Homolog of NCBI NO: 15230871 NR Description: AP2 domain transcription factor RAV, putative;
  misc_feature (1)..(331): Homolog of NCBI NO: 21593532 NR Description: AP2 domain transcription factor [Arabidopsis
  misc_feature (5)..(331): Homolog of NCBI NO: 15222217 NR Description: DNA-binding protein (RAV1); protein id: supported by cDNA: gi_17380761, supported by cDNA: gi_20259028,
  misc_feature (356)..(676): Homolog of NCBI NO: 11320956 NR Description: methionine aminopeptidase-like protein
  misc_feature (356)..(676): Homolog of NCBI NO: 15222218 NR Description: methionine aminopeptidase I (MAP1), putative; id: At1g13270.1, supported by cDNA: gi_11320955 [Arabidopsis
  misc_feature (364)..(676): Homolog of NCBI NO: 38345794 NR Description: OSJNBa0085I10.11 [Oryza sativa (japonica
  misc_feature (1)..(331): Homolog of NCBI NO: 18409138 NR Description: AP2 domain protein RAP2.8 (RAV2); protein id: supported by cDNA: 19561., supported by cDNA: gi_13430799,
MDAMSSVDESSTTTDSIPARKSSSPASLLYRMGSGTSVVLDSENGVEVEVEAESRKLPSSRFKGVVPQPNGRWGAQIYEKHQRVWLGTFNEEDEAARAYDVAAHRFRGRDAVTNFKDTTFEEEVEFLNAHSKSEIVDMLRKHTYKEELDQRKRNRDGNGKETTAFALASMVVMTGFKTAELLFEKTVTPSDVGKLNRLVIPKHQAEKHFPLPLGNNNVSVKGMLLNFEDVNGKVWRFRYSYWNSSQSYVLTKGWSRFVKEKRLCAGDLISFKRSNDQDQKFFIGWKSKSGLDLETGRVMRLFGVDISLNAVVVVKETTEVLMSSLRCKKQRGKMLQKISQSISLCNGDQFKPLIYLAGAPTNFISSPLSVSGKKKSSSLRIKRIQQLQSTLEDRINPPLVCGTVSPRLSVPDHILKPLYVESSKVPEISSELQIPDSIGIVKMKKACELAARVLDYAGTLVRPFVTTDEIDKAVHQMVIEFGAYPSPLGYGGFPKSVCTSVNECMFHGIPDSRPLQNGDIINIDVAVYLDGYHGDTSKTFLCGDVNGSLKQLVKVTEECLEKGISVCKDGASFKQIGKIISEHAAKYGYNMERFIGHGVGTVLHSEPLIYLHSNYDYELEYMIEGQTFTLEPILTIGTTEFVTWPDKWTIVTADGGPAAQFEHTILITTTGAEILTISS

SEQ ID NO: 78743 - protein, 676 aa, Arabidopsis thaliana
  peptide (1)..(676): Ceres Seq. ID no. 12644895
  misc_feature (179)..(288): Pfam Name: B3 DNA binding domain Pfam Description: B3 DNA binding domain
  misc_feature (331)..(676): Homolog of NCBI NO: 15230872 NR Description: methionine aminopeptidase, putative; protein id:
  misc_feature (331)..(676): Homolog of NCBI NO: 11320958 NR Description: methionine aminopeptidase-like protein
  misc_feature (331)..(676): Homolog of NCBI NO: 7939560 NR Description: methionine aminopeptidase-like protein
  misc_feature (1)..(328): Homolog of NCBI NO: 15230871 NR Description: AP2 domain transcription factor RAV, putative;
  misc_feature (1)..(328): Homolog of NCBI NO: 21593532 NR Description: AP2 domain transcription factor [Arabidopsis
  misc_feature (2)..(328): Homolog of NCBI NO: 15222217 NR Description: DNA-binding protein (RAV1); protein id: supported by cDNA: gi_17380761, supported by cDNA: gi_20259028,
  misc_feature (353)..(673): Homolog of NCBI NO: 11320956 NR Description: methionine aminopeptidase-like protein
  misc_feature (353)..(673): Homolog of NCBI NO: 15222218 NR Description: methionine aminopeptidase I (MAP1), putative; id: At1g13270.1, supported by cDNA: gi_11320955 [Arabidopsis
  misc_feature (361)..(673): Homolog of NCBI NO: 38345794 NR Description: OSJNBa0085I10.11 [Oryza sativa (japonica
  misc_feature (1)..(328): Homolog of NCBI NO: 18409138 NR Description: AP2 domain protein RAP2.8 (RAV2); protein id: supported by cDNA: 19561., supported by cDNA: gi_13430799,
MSSVDESSTTTDSIPARKSSSPASLLYRMGSGTSVVLDSENGVEVEVEAESRKLPSSRFKGVVPQPNGRWGAQIYEKHQRVWLGTFNEEDEAARAYDVAAHRFRGRDAVTNFKDTTFEEEVEFLNAHSKSEIVDMLRKHTYKEELDQRKRNRDGNGKETTAFALASMVVMTGFKTAELLFEKTVTPSDVGKLNRLVIPKHQAEKHFPLPLGNNNVSVKGMLLNFEDVNGKVWRFRYSYWNSSQSYVLTKGWSRFVKEKRLCAGDLISFKRSNDQDQKFFIGWKSKSGLDLETGRVMRLFGVDISLNAVVVVKETTEVLMSSLRCKKQRGKMLQKISQSISLCNGDQFKPLIYLAGAPTNFISSPLSVSGKKKSSSLRIKRIQQLQSTLEDRINPPLVCGTVSPRLSVPDHILKPLYVESSKVPEISSELQIPDSIGIVKMKKACELAARVLDYAGTLVRPFVTTDEIDKAVHQMVIEFGAYPSPLGYGGFPKSVCTSVNECMFHGIPDSRPLQNGDIINIDVAVYLDGYHGDTSKTFLCGDVNGSLKQLVKVTEECLEKGISVCKDGASFKQIGKIISEHAAKYGYNMERFIGHGVGTVLHSEPLIYLHSNYDYELEYMIEGQTFTLEPILTIGTTEFVTWPDKWTIVTADGGPAAQFEHTILITTTGAEILTISS

SEQ ID NO: 78744 - protein, 648 aa, Arabidopsis thaliana
  peptide (1)..(648): Ceres Seq. ID no. 12644896
  misc_feature (151)..(260): Pfam Name: B3 DNA binding domain Pfam Description: B3 DNA binding domain
  misc_feature (303)..(648): Homolog of NCBI NO: 15230872 NR Description: methionine aminopeptidase, putative; protein id:
  misc_feature (303)..(648): Homolog of NCBI NO: 11320958 NR Description: methionine aminopeptidase-like protein
  misc_feature (303)..(648): Homolog of NCBI NO: 7939560 NR Description: methionine aminopeptidase-like protein
  misc_feature (1)..(300): Homolog of NCBI NO: 15230871 NR Description: AP2 domain transcription factor RAV, putative;
  misc_feature (1)..(300): Homolog of NCBI NO: 21593532 NR Description: AP2 domain transcription factor [Arabidopsis
  misc_feature (1)..(300): Homolog of NCBI NO: 15222217 NR Description: DNA-binding protein (RAV1); protein id: supported by cDNA: gi_17380761, supported by cDNA: gi_20259028,
  misc_feature (325)..(645): Homolog of NCBI NO: 11320956 NR Description: methionine aminopeptidase-like protein
  misc_feature (325)..(645): Homolog of NCBI NO: 15222218 NR Description: methionine aminopeptidase I (MAP1), putative; id: At1g13270.1, supported by cDNA: gi_11320955 [Arabidopsis
  misc_feature (333)..(645): Homolog of NCBI NO: 38345794 NR Description: OSJNBa0085I10.11 [Oryza sativa (japonica
  misc_feature (1)..(300): Homolog of NCBI NO: 18409138 NR Description: AP2 domain protein RAP2.8 (RAV2); protein id: supported by cDNA: 19561., supported by cDNA: gi_13430799,
MGSGTSVVLDSENGVEVEVEAESRKLPSSRFKGVVPQPNGRWGAQIYEKHQRVWLGTFNEEDEAARAYDVAAHRFRGRDAVTNFKDTTFEEEVEFLNAHSKSEIVDMLRKHTYKEELDQRKRNRDGNGKETTAFALASMVVMTGFKTAELLFEKTVTPSDVGKLNRLVIPKHQAEKHFPLPLGNNNVSVKGMLLNFEDVNGKVWRFRYSYWNSSQSYVLTKGWSRFVKEKRLCAGDLISFKRSNDQDQKFFIGWKSKSGLDLETGRVMRLFGVDISLNAVVVVKETTEVLMSSLRCKKQRGKMLQKISQSISLCNGDQFKPLIYLAGAPTNFISSPLSVSGKKKSSSLRIKRIQQLQSTLEDRINPPLVCGTVSPRLSVPDHILKPLYVESSKVPEISSELQIPDSIGIVKMKKACELAARVLDYAGTLVRPFVTTDEIDKAVHQMVIEFGAYPSPLGYGGFPKSVCTSVNECMFHGIPDSRPLQNGDIINIDVAVYLDGYHGDTSKTFLCGDVNGSLKQLVKVTEECLEKGISVCKDGASFKQIGKIISEHAAKYGYNMERFIGHGVGTVLHSEPLIYLHSNYDYELEYMIEGQTFTLEPILTIGTTEFVTWPDKWTIVTADGGPAAQFEHTILITTTGAEILTISS

SEQ ID NO: 78745 - DNA, 2664 bp, Arabidopsis thaliana
  misc_feature (1)..(2664): Ceres Seq. ID no. 12644991
  misc_feature: MA Experiment ID: 20000173 Result: Down-regulated in Transcription
  misc_feature: MA Experiment 20000173 PARAMETER Experiment Name: At_42deg_Heat_P Parameter: Age (day) Value: 14
  misc_feature: MA Experiment 20000173 PARAMETER Experiment Name: At_42deg_Heat_P Parameter: Organism Value: A. thaliana
  misc_feature: MA Experiment 20000173 PARAMETER Experiment Name: At_42deg_Heat_P Parameter: Plant Line Value: WS
  misc_feature: MA Experiment 20000173 PARAMETER Experiment Name: At_42deg_Heat_P Parameter: Temperature (deg C) Value: 42 vs. 22
  misc_feature: MA Experiment 20000173 PARAMETER Experiment Name: At_42deg_Heat_P Parameter: Timepoint (hr) Value: 6
  misc_feature: MA Experiment 20000173 PARAMETER Experiment Name: At_42deg_Heat_P Parameter: Tissue Value: Aerial
  misc_feature: MA Experiment ID: 20000180 Result: Up-regulated in Transcription
  misc_feature: MA Experiment 20000180 PARAMETER Experiment Name: At_Germinating_Seeds_P Parameter: Age (hr) Value: 24 vs. 0
  misc_feature: MA Experiment 20000180 PARAMETER Experiment Name: At_Germinating_Seeds_P Parameter: Tissue Value: Germinating Seeds
  misc_feature: MA Experiment ID: 20001451 Result: Down-regulated in Transcription
  misc_feature: MA Experiment 20001451 PARAMETER Experiment Name: At_Far-red-induction_P Parameter: Age (day) Value: 7
  misc_feature: MA Experiment 20001451 PARAMETER Experiment Name: At_Far-red-induction_P Parameter: Light Value: Far-red vs. White
  misc_feature: MA Experiment 20001451 PARAMETER Experiment Name: At_Far-red-induction_P Parameter: Organism Value: A. thaliana
  misc_feature: MA Experiment 20001451 PARAMETER Experiment Name: At_Far-red-induction_P Parameter: Plant Line Value: Columbia
  misc_feature: MA Experiment 20001451 PARAMETER Experiment Name: At_Far-red-induction_P Parameter: Timepoint (hr) Value: 24
  misc_feature: MA Experiment 20001451 PARAMETER Experiment Name: At_Far-red-induction_P Parameter: Tissue Value: Whole Plant
atggcagagtcaattcgaactttttcgcttcaatggcggatactgtcactgatcatcgctttacttgtgtactttccgattctgtcgggaagttactttaaaccgttcaatgtgagctacgatcaccgggctttaatcatcgccggcaagaggcgcatgctcgtctcagctggaattcactaccctcgagccactcctgagatgtggtctgatctcatcgcaaagagtaaagaaggtggagctgatgtggttcaaacttatgtgttttggaatgggcacgagcctgtaaagggtcagtataactttgaaggaagatatgaccttgtcaaatttgtgaagcttattggatcaagtggtctttatctccatctacggataggtccttatgtttgtgctgagtggaactttggggggttcccagtgtggctgcgggatattcctggcattgagtttcgaacagataatgaaccttttaagaaagagatgcaaaagtttgtaacaaagattgtggatttgatgcgagaagcaaagctcttctgttggcaaggaggtcccataatcatgctgcagatcgagaatgaatatggggatgttgaaaaatcttacgggcagaagggaaaggattacgtcaaatgggcagctagcatggctctagggcttggtgctggagttccgtgggttatgtgcaaacaaacggacgctccagagaatattattgatgcatgcaatggatactattgtgatggttttaaaccaaattcgcggacgaagccagtactttggacagaggattgggatggatggtacacgaagtggggtggaagtttgcctcaccgacctgctgaagatcttgcatttgcagttgcaagattttatcagcgtggaggaagctttcaaaattattatatgtattttggtggaacaaactttggtcgaacttctggtggtcctttctacattacaagctatgattatgatgctcctcttgatgaatatggtctgaggagcgagccaaaatgggggcatctaaaggaccttcatgctgccataaaactttgtgaacctgctcttgtcgcggcggatgcacctcaatatagaaaattgggatcaaagcaggaggcacacatttatcatggagatggtgagactggaggaaaggtgtgcgctgcatttctcgcaaacattgatgagcataaatctgcacatgtgaaatttaatggccagtcatatactttaccaccttggtcagtgagtatattgccagactgtcgacatgtggccttcaacactgccaaggtaggagcacaaacttctgttaaaacggttgagtctgcaaggccatctttaggtagtatgtctatactgcaaaaagtcgtgaggcaggataatgtttcttatatctcaaaatcatggatggctctgaaagaacctattggcatatggggtgaaaacaatttcactttccaaggattattggagcatttgaatgttacaaaagaccggtctgattacctgtggcataagacaagaataagcgtatctgaagatgatatctcgttctggaagaaaaatggacctaactcaacagtgtcgattgatagcatgagggatgtgttacgtgtgtttgttaacaaacaactcgcaggcagtattgttggtcactgggtgaaggcagtgcagcctgtacgatttatacagggaaacaatgatttacttctgttgactcaaacagttggtttacagaattatggtgctttcttggagaaggatggagccggttttagaggcaaagctaagcttactggattcaagaatggagatttagacctgtcaaaatcgtcatggacgtatcaggtgggattgaagggcgaggctgataaaatatatactgttgaacacaatgaaaaagctgagtggagtactttggagaccgatgcttcaccttcgatcttcatgtggtacaagacatactttgaccccccggccggaacagatcctgttgttcttaatctggaaagtatgggaagggggcaagcttgggtcaatggacaacatattggaaggtattggaatatcatttcccaaaaggatggatgtgacagaacctgtgattatcgtggagcctacaattcagataagtgcacaacaaattgtggaaagcctacacaaaccaggtaccatgtaccgcgttcgtggttaaagccgtcaagtaatctacttgtgctctttgaagagactgggggaaacccatttaagatatcggttaagacagttactgctgggattctgtgcggtcaagtctcggaatcgcattatccacctctgcggaaatggtccacaccagattacataaacggaacaatgtcgataaacagtgtggcaccagaagtgcatctgcattgtgaagatggacatgtcatatcctccatagaatttgctagctatgggactccaagaggtagctgcgacgggttttctatcgggaaatgtcatgcatccaactcattatcaatcgtctctgaggcttgtaaaggacgcaacagctgcttcatcgaggtatcaaatactgcttttatcagtgacccatgtagcggaactttaaagactttagcggttatgtcacgatgttccccgtctcaaaacatgagtgacctcagtttttag

SEQ ID NO: 78746 - protein, 887 aa, Arabidopsis thaliana
  peptide (1)..(887): Ceres Seq. ID no. 12644992
  misc_feature (799)..(876): Pfam Name: Galactose binding lectin domain Pfam Description: Galactose binding lectin domain
  misc_feature (18)..(513): Homolog of NCBI NO: 14970841 NR Description: beta-galactosidase [Fragaria x ananassa]
  misc_feature (447)..(876): Homolog of NCBI NO: 14970841 NR Description: beta-galactosidase [Fragaria x ananassa]
  misc_feature (467)..(877): Homolog of NCBI NO: 25326167 NR Description: probable beta-galactosidase [imported] -
  misc_feature (37)..(451): Homolog of NCBI NO: 25326167 NR Description: probable beta-galactosidase [imported] -
  misc_feature (388)..(877): Homolog of NCBI NO: 15231354 NR Description: glycosyl hydrolase family 35 protein id: At3g13750.1, supported by cDNA: gi_20260595
  misc_feature (37)..(471): Homolog of NCBI NO: 15231354 NR Description: glycosyl hydrolase family 35 protein id: At3g13750.1, supported by cDNA: gi_20260595
  misc_feature (388)..(877): Homolog of NCBI NO: 20260596 NR Description: galactosidase, putative [Arabidopsis thaliana]
  misc_feature (37)..(471): Homolog of NCBI NO: 20260596 NR Description: galactosidase, putative [Arabidopsis thaliana]
  misc_feature (388)..(877): Homolog of NCBI NO: 14970839 NR Description: beta-galactosidase [Fragaria x ananassa]
  misc_feature (37)..(438): Homolog of NCBI NO: 14970839 NR Description: beta-galactosidase [Fragaria x ananassa]
MAESIRTFSLQWRILSLIIALLVYFPILSGSYFKPFNVSYDHRALIIAGKRRMLVSAGIHYPRATPEMWSDLIAKSKEGGADVVQTYVFWNGHEPVKGQYNFEGRYDLVKFVKLIGSSGLYLHLRIGPYVCAEWNFGGFPVWLRDIPGIEFRTDNEPFKKEMQKFVTKIVDLMREAKLFCWQGGPIIMLQIENEYGDVEKSYGQKGKDYVKWAASMALGLGAGVPWVMCKQTDAPENIIDACNGYYCDGFKPNSRTKPVLWTEDWDGWYTKWGGSLPHRPAEDLAFAVARFYQRGGSFQNYYMYFGGTNFGRTSGGPFYITSYDYDAPLDEYGLRSEPKWGHLKDLHAAIKLCEPALVAADAPQYRKLGSKQEAHIYHGDGETGGKVCAAFLANIDEHKSAHVKFNGQSYTLPPWSVSILPDCRHVAFNTAKVGAQTSVKTVESARPSLGSMSILQKVVRQDNVSYISKSWMALKEPIGIWGENNFTFQGLLEHLNVTKDRSDYLWHKTRISVSEDDISFWKKNGPNSTVSIDSMRDVLRVFVNKQLAGSIVGHWVKAVQPVRFIQGNNDLLLLTQTVGLQNYGAFLEKDGAGFRGKAKLTGFKNGDLDLSKSSWTYQVGLKGEADKIYTVEHNEKAEWSTLETDASPSIFMWYKTYFDPPAGTDPVVLNLESMGRGQAWVNGQHIGRYWNIISQKDGCDRTCDYRGAYNSDKCTTNCGKPTQTRYHVPRSWLKPSSNLLVLFEETGGNPFKISVKTVTAGILCGQVSESHYPPLRKWSTPDYINGTMSINSVAPEVHLHCEDGHVISSIEFASYGTPRGSCDGFSIGKCHASNSLSIVSEACKGRNSCFIEVSNTAFISDPCSGTLKTLAVMSRCSPSQNMSDLSF

SEQ ID NO: 78747 - protein, 835 aa, Arabidopsis thaliana
  peptide (1)..(835): Ceres Seq. ID no. 12644993
  misc_feature (747)..(824): Pfam Name: Galactose binding lectin domain Pfam Description: Galactose binding lectin domain
  misc_feature (1)..(461): Homolog of NCBI NO: 14970841 NR Description: beta-galactosidase [Fragaria x ananassa]
  misc_feature (395)..(824): Homolog of NCBI NO: 14970841 NR Description: beta-galactosidase [Fragaria x ananassa]
  misc_feature (415)..(825): Homolog of NCBI NO: 25326167 NR Description: probable beta-galactosidase [imported] -
  misc_feature (1)..(399): Homolog of NCBI NO: 25326167 NR Description: probable beta-galactosidase [imported] -
  misc_feature (336)..(825): Homolog of NCBI NO: 15231354 NR Description: glycosyl hydrolase family 35 protein id: At3g13750.1, supported by cDNA: gi_20260595
  misc_feature (1)..(419): Homolog of NCBI NO: 15231354 NR Description: glycosyl hydrolase family 35 protein id: At3g13750.1, supported by cDNA: gi_20260595
  misc_feature (336)..(825): Homolog of NCBI NO: 20260596 NR Description: galactosidase, putative [Arabidopsis thaliana]
  misc_feature (1)..(419): Homolog of NCBI NO: 20260596 NR Description: galactosidase, putative [Arabidopsis thaliana]
  misc_feature (336)..(825): Homolog of NCBI NO: 14970839 NR Description: beta-galactosidase [Fragaria x ananassa]
  misc_feature (1)..(386): Homolog of NCBI NO: 14970839 NR Description: beta-galactosidase [Fragaria x ananassa]
MLVSAGIHYPRATPEMWSDLIAKSKEGGADVVQTYVFWNGHEPVKGQYNFEGRYDLVKFVKLIGSSGLYLHLRIGPYVCAEWNFGGFPVWLRDIPGIEFRTDNEPFKKEMQKFVTKIVDLMREAKLFCWQGGPIIMLQIENEYGDVEKSYGQKGKDYVKWAASMALGLGAGVPWVMCKQTDAPENIIDACNGYYCDGFKPNSRTKPVLWTEDWDGWYTKWGGSLPHRPAEDLAFAVARFYQRGGSFQNYYMYFGGTNFGRTSGGPFYITSYDYDAPLDEYGLRSEPKWGHLKDLHAAIKLCEPALVAADAPQYRKLGSKQEAHIYHGDGETGGKVCAAFLANIDEHKSAHVKFNGQSYTLPPWSVSILPDCRHVAFNTAKVGAQTSVKTVESARPSLGSMSILQKVVRQDNVSYISKSWMALKEPIGIWGENNFTFQGLLEHLNVTKDRSDYLWHKTRISVSEDDISFWKKNGPNSTVSIDSMRDVLRVFVNKQLAGSIVGHWVKAVQPVRFIQGNNDLLLLTQTVGLQNYGAFLEKDGAGFRGKAKLTGFKNGDLDLSKSSWTYQVGLKGEADKIYTVEHNEKAEWSTLETDASPSIFMWYKTYFDPPAGTDPVVLNLESMGRGQAWVNGQHIGRYWNIISQKDGCDRTCDYRGAYNSDKCTTNCGKPTQTRYHVPRSWLKPSSNLLVLFEETGGNPFKISVKTVTAGILCGQVSESHYPPLRKWSTPDYINGTMSINSVAPEVHLHCEDGHVISSIEFASYGTPRGSCDGFSIGKCHASNSLSIVSEACKGRNSCFIEVSNTAFISDPCSGTLKTLAVMSRCSPSQNMSDLSF

SEQ ID NO: 78748 - protein, 820 aa, Arabidopsis thaliana
  peptide (1)..(820): Ceres Seq. ID no. 12644994
  misc_feature (732)..(809): Pfam Name: Galactose binding lectin domain Pfam Description: Galactose binding lectin domain
  misc_feature (1)..(446): Homolog of NCBI NO: 14970841 NR Description: beta-galactosidase [Fragaria x ananassa]
  misc_feature (380)..(809): Homolog of NCBI NO: 14970841 NR Description: beta-galactosidase [Fragaria x ananassa]
  misc_feature (400)..(810): Homolog of NCBI NO: 25326167 NR Description: probable beta-galactosidase [imported] -
  misc_feature (1)..(384): Homolog of NCBI NO: 25326167 NR Description: probable beta-galactosidase [imported] -
  misc_feature (321)..(810): Homolog of NCBI NO: 15231354 NR Description: glycosyl hydrolase family 35 protein id: At3g13750.1, supported by cDNA: gi_20260595
  misc_feature (1)..(404): Homolog of NCBI NO: 15231354 NR Description: glycosyl hydrolase family 35 protein id: At3g13750.1, supported by cDNA: gi_20260595
  misc_feature (321)..(810): Homolog of NCBI NO: 20260596 NR Description: galactosidase, putative [Arabidopsis thaliana]
  misc_feature (1)..(404): Homolog of NCBI NO: 20260596 NR Description: galactosidase, putative [Arabidopsis thaliana]
  misc_feature (321)..(810): Homolog of NCBI NO: 14970839 NR Description: beta-galactosidase [Fragaria x ananassa]
  misc_feature (1)..(371): Homolog of NCBI NO: 14970839 NR Description: beta-galactosidase [Fragaria x ananassa]
MWSDLIAKSKEGGADVVQTYVFWNGHEPVKGQYNFEGRYDLVKFVKLIGSSGLYLHLRIGPYVCAEWNFGGFPVWLRDIPGIEFRTDNEPFKKEMQKFVTKIVDLMREAKLFCWQGGPIIMLQIENEYGDVEKSYGQKGKDYVKWAASMALGLGAGVPWVMCKQTDAPENIIDACNGYYCDGFKPNSRTKPVLWTEDWDGWYTKWGGSLPHRPAEDLAFAVARFYQRGGSFQNYYMYFGGTNFGRTSGGPFYITSYDYDAPLDEYGLRSEPKWGHLKDLHAAIKLCEPALVAADAPQYRKLGSKQEAHIYHGDGETGGKVCAAFLANIDEHKSAHVKFNGQSYTLPPWSVSILPDCRHVAFNTAKVGAQTSVKTVESARPSLGSMSILQKVVRQDNVSYISKSWMALKEPIGIWGENNFTFQGLLEHLNVTKDRSDYLWHKTRISVSEDDISFWKKNGPNSTVSIDSMRDVLRVFVNKQLAGSIVGHWVKAVQPVRFIQGNNDLLLLTQTVGLQNYGAFLEKDGAGFRGKAKLTGFKNGDLDLSKSSWTYQVGLKGEADKIYTVEHNEKAEWSTLETDASPSIFMWYKTYFDPPAGTDPVVLNLESMGRGQAWVNGQHIGRYWNIISQKDGCDRTCDYRGAYNSDKCTTNCGKPTQTRYHVPRSWLKPSSNLLVLFEETGGNPFKISVKTVTAGILCGQVSESHYPPLRKWSTPDYINGTMSINSVAPEVHLHCEDGHVISSIEFASYGTPRGSCDGFSIGKCHASNSLSIVSEACKGRNSCFIEVSNTAFISDPCSGTLKTLAVMSRCSPSQNMSDLSF

SEQ ID NO: 78749 - DNA, 1848 bp, Arabidopsis thaliana
  misc_feature (1)..(1848): Ceres Seq. ID no. 12644995
  misc_feature: MA Experiment ID: 20000173 Result: Down-regulated in Transcription
  misc_feature: MA Experiment 20000173 PARAMETER Experiment Name: At_42deg_Heat_P Parameter: Age (day) Value: 14
  misc_feature: MA Experiment 20000173 PARAMETER Experiment Name: At_42deg_Heat_P Parameter: Organism Value: A. thaliana
  misc_feature: MA Experiment 20000173 PARAMETER Experiment Name: At_42deg_Heat_P Parameter: Plant Line Value: WS
  misc_feature: MA Experiment 20000173 PARAMETER Experiment Name: At_42deg_Heat_P Parameter: Temperature (deg C) Value: 42 vs. 22
  misc_feature: MA Experiment 20000173 PARAMETER Experiment Name: At_42deg_Heat_P Parameter: Timepoint (hr) Value: 6
  misc_feature: MA Experiment 20000173 PARAMETER Experiment Name: At_42deg_Heat_P Parameter: Tissue Value: Aerial
  misc_feature: MA Experiment ID: 20000184 Result: Down-regulated in Transcription
  misc_feature: MA Experiment 20000184 PARAMETER Experiment Name: At_Shoots__P Parameter: Age (day) Value: 7
  misc_feature: MA Experiment 20000184 PARAMETER Experiment Name: At_Shoots__P Parameter: Tissue Value: Shoots vs. Whole Plant
  misc_feature: MA Experiment ID: 20000185 Result: Down-regulated in Transcription
  misc_feature: MA Experiment 20000185 PARAMETER Experiment Name: At_Roots__P Parameter: Age (day) Value: 7 vs. 21
  misc_feature: MA Experiment 20000185 PARAMETER Experiment Name: At_Roots__P Parameter: Organism Value: A. thaliana
  misc_feature: MA Experiment 20000185 PARAMETER Experiment Name: At_Roots__P Parameter: Tissue Value: Roots vs. Whole Plant
  misc_feature: MA Experiment ID: 20000227 Result: Down-regulated in Transcription
  misc_feature: MA Experiment 20000227 PARAMETER Experiment Name: At_Root-Tips-vs-Tops_P Parameter: Tissue Value: Root Tips vs. Root Tops
  misc_feature: MA Experiment ID: 20000264 Result: Down-regulated in Transcription
  misc_feature: MA Experiment 20000264 PARAMETER Experiment Name: At_Open_Flower_P Parameter: Age (day) Value: 21
  misc_feature: MA Experiment 20000264 PARAMETER Experiment Name: At_Open_Flower_P Parameter: Plant Line Value: WS
  misc_feature: MA Experiment 20000264 PARAMETER Experiment Name: At_Open_Flower_P Parameter: Tissue Value: Open Flower vs. Whole Plant
  misc_feature: MA Experiment ID: 20000265 Result: Down-regulated in Transcription
  misc_feature: MA Experiment 20000265 PARAMETER Experiment Name: At_Open_Flower_P Parameter: Age (day) Value: 21
  misc_feature: MA Experiment 20000265 PARAMETER Experiment Name: At_Open_Flower_P Parameter: Plant Line Value: WS
  misc_feature: MA Experiment 20000265 PARAMETER Experiment Name: At_Open_Flower_P Parameter: Tissue Value: Closed Flower vs. Whole Plant
  misc_feature: MA Experiment ID: 20000286 Result: Down-regulated in Transcription
  misc_feature: MA Experiment 20000286 PARAMETER Experiment Name: At_Open_Flower_P Parameter: Age (day) Value: 21
  misc_feature: MA Experiment 20000286 PARAMETER Experiment Name: At_Open_Flower_P Parameter: Plant Line Value: WS
  misc_feature: MA Experiment 20000286 PARAMETER Experiment Name: At_Open_Flower_P Parameter: Tissue Value: Half Open vs. Whole Plant
  misc_feature: MA Experiment ID: 20000439 Result: Down-regulated in Transcription
  misc_feature: MA Experiment 20000439 PARAMETER Experiment Name: At_Roots__P Parameter: Age (day) Value: 14 vs. 21
  misc_feature: MA Experiment 20000439 PARAMETER Experiment Name: At_Roots__P Parameter: Organism Value: A. thaliana
  misc_feature: MA Experiment 20000439 PARAMETER Experiment Name: At_Roots__P Parameter: Tissue Value: Roots vs. Whole Plant
  misc_feature: MA Experiment ID: 20000451 Result: Down-regulated in Transcription
  misc_feature: MA Experiment 20000451 PARAMETER Experiment Name: At_CS6879_Shoots-Roots_P Parameter: Age (day) Value: 14
  misc_feature: MA Experiment 20000451 PARAMETER Experiment Name: At_CS6879_Shoots-Roots_P Parameter: Organism Value: A. thaliana
  misc_feature: MA Experiment 20000451 PARAMETER Experiment Name: At_CS6879_Shoots-Roots_P Parameter: Plant Line Value: CS6879 vs. WS
  misc_feature: MA Experiment 20000451 PARAMETER Experiment Name: At_CS6879_Shoots-Roots_P Parameter: Tissue Value: Roots
  misc_feature: MA Experiment ID: 20001556 Result: Down-regulated in Transcription
  misc_feature: MA Experiment 20001556 PARAMETER Experiment Name: At_Drought_Soil_Dry_P Parameter: Age (day) Value: 26
  misc_feature: MA Experiment 20001556 PARAMETER Experiment Name: At_Drought_Soil_Dry_P Parameter: Organism Value: A. thaliana
  misc_feature: MA Experiment 20001556 PARAMETER Experiment Name: At_Drought_Soil_Dry_P Parameter: Plant Line Value: WS
  misc_feature: MA Experiment 20001556 PARAMETER Experiment Name: At_Drought_Soil_Dry_P Parameter: Post Timepoint (hr) Value: None
  misc_feature: MA Experiment 20001556 PARAMETER Experiment Name: At_Drought_Soil_Dry_P Parameter: Post-Treatment Value: None
  misc_feature: MA Experiment 20001556 PARAMETER Experiment Name: At_Drought_Soil_Dry_P Parameter: Timepoint (day) Value: 12
  misc_feature: MA Experiment 20001556 PARAMETER Experiment Name: At_Drought_Soil_Dry_P Parameter: Treatment Value: Drought vs. No Drought
  misc_feature: MA Experiment ID: 20001557 Result: Down-regulated in Transcription
  misc_feature: MA Experiment 20001557 PARAMETER Experiment Name: At_Drought_Soil_Dry_P Parameter: Age (day) Value: 27
  misc_feature: MA Experiment 20001557 PARAMETER Experiment Name: At_Drought_Soil_Dry_P Parameter: Organism Value: A. thaliana
  misc_feature: MA Experiment 20001557 PARAMETER Experiment Name: At_Drought_Soil_Dry_P Parameter: Plant Line Value: WS
  misc_feature: MA Experiment 20001557 PARAMETER Experiment Name: At_Drought_Soil_Dry_P Parameter: Post Timepoint (hr) Value: 3
  misc_feature: MA Experiment 20001557 PARAMETER Experiment Name: At_Drought_Soil_Dry_P Parameter: Post-Treatment Value: Re-Water vs. No Drought
  misc_feature: MA Experiment 20001557 PARAMETER Experiment Name: At_Drought_Soil_Dry_P Parameter: Timepoint (day) Value: 13
  misc_feature: MA Experiment 20001557 PARAMETER Experiment Name: At_Drought_Soil_Dry_P Parameter: Treatment Value: Drought vs. No Drought
  misc_feature: MA Experiment ID: 20001560 Result: Down-regulated in Transcription
  misc_feature: MA Experiment 20001560 PARAMETER Experiment Name: At_Drought_Soil_Dry_P Parameter: Age (day) Value: 28
  misc_feature: MA Experiment 20001560 PARAMETER Experiment Name: At_Drought_Soil_Dry_P Parameter: Organism Value: A. thaliana
  misc_feature: MA Experiment 20001560 PARAMETER Experiment Name: At_Drought_Soil_Dry_P Parameter: Plant Line Value: WS
  misc_feature: MA Experiment 20001560 PARAMETER Experiment Name: At_Drought_Soil_Dry_P Parameter: Post Timepoint (hr) Value: None
  misc_feature: MA Experiment 20001560 PARAMETER Experiment Name: At_Drought_Soil_Dry_P Parameter: Post-Treatment Value: None
  misc_feature: MA Experiment 20001560 PARAMETER Experiment Name: At_Drought_Soil_Dry_P Parameter: Timepoint (day) Value: 14
  misc_feature: MA Experiment 20001560 PARAMETER Experiment Name: At_Drought_Soil_Dry_P Parameter: Treatment Value: Drought vs. No Drought
  misc_feature: MA Experiment ID: 20001906 Result: Down-regulated in Transcription
  misc_feature: MA Experiment 20001906 PARAMETER Experiment Name: At_Drought_Reproduction_P Parameter: Age (day) Value: 35
  misc_feature: MA Experiment 20001906 PARAMETER Experiment Name: At_Drought_Reproduction_P Parameter: Organism Value: A. thaliana
  misc_feature: MA Experiment 20001906 PARAMETER Experiment Name: At_Drought_Reproduction_P Parameter: Plant Line Value: WS
  misc_feature: MA Experiment 20001906 PARAMETER Experiment Name: At_Drought_Reproduction_P Parameter: Timepoint (day) Value: 5
  misc_feature: MA Experiment 20001906 PARAMETER Experiment Name: At_Drought_Reproduction_P Parameter: Tissue Value: Siliques
  misc_feature: MA Experiment 20001906 PARAMETER Experiment Name: At_Drought_Reproduction_P Parameter: Treatment Value: Drought vs. No Drought
atggctacagctactctcactcttttcctagggctcttagccttaactagtaccatacttagcttcaacgccgatgctaggcctcaaccaagtgatgaggatcttggtaccatcattggacctcatcaaactagcttcgatgacgagataggcatcgtgattggaccacatgcgaccgtagatgacgaagacattgacatggacatgggcaccaccgttggaccgcagaccaacctaaatgatgatgatttgggcaccatcattggacccgagtttgagatccacaagcaagatttccccgcagatttcatatttggaacatctgtttccgcatatcaggttgaaggtgctaaaaagggttctgggagaggcttgacctcatgggacgaatttacacacatgtttcctgagaaggttcaacaaaatggcgatggagatgagggagtcgacttctatacccgttacaaggatgatataaaattaatgaaggagttgaacacgaatggcttcagattttcaatctcatggaccaggatcttgccttatggaactattaaaaaaggtgtaaacgaggagggggtgaagttctacaacgatcttataaatgaacttttagctaatggaattcagccttcggttactctctttcactgggaatctccacttgctctagaaatggagtacggaggtttcctaaacgaaaggatagtagaggatttccgtgagtttgcaaacttttgcttcaaggaatttggagatagggtgaagaattgggcgacgtttaacgagccatcggtatacagcgttgctggttactcgaaaggtaagaaagcaccaggacggtgctctaaatggcaagccccaaaatgtcccacaggagattcatccgaggagccatacatagttgctcacaaccaaattcttgctcatcttgctgctgttgatgaattccgaaactgtaaaaagtgccaagagggtggagggaaaattgggatagtgttggtatctcactggttcgagcctaaagatccaaattcgagtgaagacgtcaaagcagctagacgatccctcgagtaccaactcggctggtttcttcgccctctcacatatggacagtatccagcggaaatgttagaagatgtaaacatccgactgcgtgaatttacaccagaagaatctgagaaactaagaaaatctttggatttcgtcggattaaattactatggagcattcttctctacccctctcgccaaagtcaattcatcgcagcttaattatgagaccgacttacgtgtaaactggacagttattactaataacctaagtcttcctgatttgcagacaacttcaatgggtatagtgatatatccagcgggtttgaagaatatcttgaaacatatcaaagacgaatacatggacccagagatttacattatggagaatgggatggacgagatcgactatgggaccaaaaacataacggaagctactaacgattacgggaggaaagagttcatcaagagtcacatcttaatcatgggtaaatccatcaggatggacaaagtgaggctgaagggttactacatatggtcgttaatggacaacttcgagtgggataaaggttataaagtcaggttcgggctctattacgtcgattataatgacaacatgaaacgttatataaggtcatctggaaaatggctaagtgagtttcttgattccaaagagactctccataaatgctatttcgagggccatcgtgagaaaggatatgcacccaagttgttcgacgttgagtatctggaacctgagaactcgcagctaagttacaggagcgattttatgtga

SEQ ID NO: 78750 - protein, 615 aa, Arabidopsis thaliana
  peptide (1)..(615): Ceres Seq. ID no. 12644996
  misc_feature (134)..(549): Homolog of NCBI NO: 24417286 NR Description: unknown [Arabidopsis thaliana]
  misc_feature (93)..(572): Homolog of NCBI NO: 10834548 NR Description: beta-glucosidase [Arabidopsis thaliana]
  misc_feature (93)..(572): Homolog of NCBI NO: 15232262 NR Description: glycosyl hydrolase family 1, beta-glucosidase; id: At3g60140.1, supported by cDNA: gi_10834547 [Arabidopsis
  misc_feature (86)..(610): Homolog of NCBI NO: 30689721 NR Description: glycosyl hydrolase family 1 [Arabidopsis thaliana]
  misc_feature (86)..(610): Homolog of NCBI NO: 7435453 NR Description: probable beta-glucosidase At2g44460 [imported] -
  misc_feature (86)..(572): Homolog of NCBI NO: 7435454 NR Description: beta-glucosidase homolog At2g44470 [imported] -
  misc_feature (94)..(572): Homolog of NCBI NO: 22327030 NR Description: glycosyl hydrolase family 1; protein id:
  misc_feature (94)..(573): Homolog of NCBI NO: 15238569 NR Description: glycosyl hydrolase family 1; protein id:
  misc_feature (96)..(572): Homolog of NCBI NO: 15224886 NR Description: glycosyl hydrolase family 1; protein id: supported by cDNA: gi_20259434 [Arabidopsis thaliana]
  misc_feature (93)..(588): Homolog of NCBI NO: 25404995 NR Description: protein T4O12.15 [imported] - Arabidopsis >gi|8778810|gb|AAF26759.2|AC007396_8 T4O12.15 [Arabidopsis
MATATLTLFLGLLALTSTILSFNADARPQPSDEDLGTIIGPHQTSFDDEIGIVIGPHATVDDEDIDMDMGTTVGPQTNLNDDDLGTIIGPEFEIHKQDFPADFIFGTSVSAYQVEGAKKGSGRGLTSWDEFTHMFPEKVQQNGDGDEGVDFYTRYKDDIKLMKELNTNGFRFSISWTRILPYGTIKKGVNEEGVKFYNDLINELLANGIQPSVTLFHWESPLALEMEYGGFLNERIVEDFREFANFCFKEFGDRVKNWATFNEPSVYSVAGYSKGKKAPGRCSKWQAPKCPTGDSSEEPYIVAHNQILAHLAAVDEFRNCKKCQEGGGKIGIVLVSHWFEPKDPNSSEDVKAARRSLEYQLGWFLRPLTYGQYPAEMLEDVNIRLREFTPEESEKLRKSLDFVGLNYYGAFFSTPLAKVNSSQLNYETDLRVNWTVITNNLSLPDLQTTSMGIVIYPAGLKNILKHIKDEYMDPEIYIMENGMDEIDYGTKNITEATNDYGRKEFIKSHILIMGKSIRMDKVRLKGYYIWSLMDNFEWDKGYKVRFGLYYVDYNDNMKRYIRSSGKWLSEFLDSKETLHKCYFEGHREKGYAPKLFDVEYLEPENSQLSYRSDFM

SEQ ID NO: 78751 - protein, 549 aa, Arabidopsis thaliana
  peptide (1)..(549): Ceres Seq. ID no. 12644997
  misc_feature (68)..(483): Homolog of NCBI NO: 24417286 NR Description: unknown [Arabidopsis thaliana]
  misc_feature (27)..(506): Homolog of NCBI NO: 10834548 NR Description: beta-glucosidase [Arabidopsis thaliana]
  misc_feature (27)..(506): Homolog of NCBI NO: 15232262 NR Description: glycosyl hydrolase family 1, beta-glucosidase; id: At3g60140.1, supported by cDNA: gi_10834547 [Arabidopsis
  misc_feature (20)..(544): Homolog of NCBI NO: 30689721 NR Description: glycosyl hydrolase family 1 [Arabidopsis thaliana]
  misc_feature (20)..(544): Homolog of NCBI NO: 7435453 NR Description: probable beta-glucosidase At2g44460 [imported] -
  misc_feature (20)..(506): Homolog of NCBI NO: 7435454 NR Description: beta-glucosidase homolog At2g44470 [imported] -
  misc_feature (28)..(506): Homolog of NCBI NO: 22327030 NR Description: glycosyl hydrolase family 1; protein id:
  misc_feature (28)..(507): Homolog of NCBI NO: 15238569 NR Description: glycosyl hydrolase family 1; protein id:
  misc_feature (30)..(506): Homolog of NCBI NO: 15224886 NR Description: glycosyl hydrolase family 1; protein id: supported by cDNA: gi_20259434 [Arabidopsis thaliana]
  misc_feature (27)..(522): Homolog of NCBI NO: 25404995 NR Description: protein T4O12.15 [imported] - Arabidopsis >gi|8778810|gb|AAF26759.2|AC007396_8 T4O12.15 [Arabidopsis
MDMGTTVGPQTNLNDDDLGTIIGPEFEIHKQDFPADFIFGTSVSAYQVEGAKKGSGRGLTSWDEFTHMFPEKVQQNGDGDEGVDFYTRYKDDIKLMKELNTNGFRFSISWTRILPYGTIKKGVNEEGVKFYNDLINELLANGIQPSVTLFHWESPLALEMEYGGFLNERIVEDFREFANFCFKEFGDRVKNWATFNEPSVYSVAGYSKGKKAPGRCSKWQAPKCPTGDSSEEPYIVAHNQILAHLAAVDEFRNCKKCQEGGGKIGIVLVSHWFEPKDPNSSEDVKAARRSLEYQLGWFLRPLTYGQYPAEMLEDVNIRLREFTPEESEKLRKSLDFVGLNYYGAFFSTPLAKVNSSQLNYETDLRVNWTVITNNLSLPDLQTTSMGIVIYPAGLKNILKHIKDEYMDPEIYIMENGMDEIDYGTKNITEATNDYGRKEFIKSHILIMGKSIRMDKVRLKGYYIWSLMDNFEWDKGYKVRFGLYYVDYNDNMKRYIRSSGKWLSEFLDSKETLHKCYFEGHREKGYAPKLFDVEYLEPENSQLSYRSDFM

SEQ ID NO: 78752 - protein, 547 aa, Arabidopsis thaliana
  peptide (1)..(547): Ceres Seq. ID no. 12644998
  misc_feature (66)..(481): Homolog of NCBI NO: 24417286 NR Description: unknown [Arabidopsis thaliana]
  misc_feature (25)..(504): Homolog of NCBI NO: 10834548 NR Description: beta-glucosidase [Arabidopsis thaliana]
  misc_feature (25)..(504): Homolog of NCBI NO: 15232262 NR Description: glycosyl hydrolase family 1, beta-glucosidase; id: At3g60140.1, supported by cDNA: gi_10834547 [Arabidopsis
  misc_feature (18)..(542): Homolog of NCBI NO: 30689721 NR Description: glycosyl hydrolase family 1 [Arabidopsis thaliana]
  misc_feature (18)..(542): Homolog of NCBI NO: 7435453 NR Description: probable beta-glucosidase At2g44460 [imported] -
  misc_feature (18)..(504): Homolog of NCBI NO: 7435454 NR Description: beta-glucosidase homolog At2g44470 [imported] -
  misc_feature (26)..(504): Homolog of NCBI NO: 22327030 NR Description: glycosyl hydrolase family 1; protein id:
  misc_feature (26)..(505): Homolog of NCBI NO: 15238569 NR Description: glycosyl hydrolase family 1; protein id:
  misc_feature (28)..(504): Homolog of NCBI NO: 15224886 NR Description: glycosyl hydrolase family 1; protein id: supported by cDNA: gi_20259434 [Arabidopsis thaliana]
  misc_feature (25)..(520): Homolog of NCBI NO: 25404995 NR Description: protein T4O12.15 [imported] - Arabidopsis >gi|8778810|gb|AAF26759.2|AC007396_8 T4O12.15 [Arabidopsis
MGTTVGPQTNLNDDDLGTIIGPEFEIHKQDFPADFIFGTSVSAYQVEGAKKGSGRGLTSWDEFTHMFPEKVQQNGDGDEGVDFYTRYKDDIKLMKELNTNGFRFSISWTRILPYGTIKKGVNEEGVKFYNDLINELLANGIQPSVTLFHWESPLALEMEYGGFLNERIVEDFREFANFCFKEFGDRVKNWATFNEPSVYSVAGYSKGKKAPGRCSKWQAPKCPTGDSSEEPYIVAHNQILAHLAAVDEFRNCKKCQEGGGKIGIVLVSHWFEPKDPNSSEDVKAARRSLEYQLGWFLRPLTYGQYPAEMLEDVNIRLREFTPEESEKLRKSLDFVGLNYYGAFFSTPLAKVNSSQLNYETDLRVNWTVITNNLSLPDLQTTSMGIVIYPAGLKNILKHIKDEYMDPEIYIMENGMDEIDYGTKNITEATNDYGRKEFIKSHILIMGKSIRMDKVRLKGYYIWSLMDNFEWDKGYKVRFGLYYVDYNDNMKRYIRSSGKWLSEFLDSKETLHKCYFEGHREKGYAPKLFDVEYLEPENSQLSYRSDFM

SEQ ID NO: 78753 - DNA, 633 bp, Arabidopsis thaliana
  misc_feature (1)..(633): Ceres Seq. ID no. 12645014
  misc_feature: MA Experiment ID: 20000166 Result: Down-regulated in Transcription
  misc_feature: MA Experiment 20000166 PARAMETER Experiment Name: At_100uM_ABA_P Parameter: Age (day) Value: 14
  misc_feature: MA Experiment 20000166 PARAMETER Experiment Name: At_100uM_ABA_P Parameter: Organism Value: A. thaliana
  misc_feature: MA Experiment 20000166 PARAMETER Experiment Name: At_100uM_ABA_P Parameter: Plant Line Value: WS
  misc_feature: MA Experiment 20000166 PARAMETER Experiment Name: At_100uM_ABA_P Parameter: Timepoint (hr) Value: 1
  misc_feature: MA Experiment 20000166 PARAMETER Experiment Name: At_100uM_ABA_P Parameter: Tissue Value: Aerial
  misc_feature: MA Experiment 20000166 PARAMETER Experiment Name: At_100uM_ABA_P Parameter: Treatment Value: 100uM ABA vs. No Treatment
  misc_feature: MA Experiment ID: 20000184 Result: Down-regulated in Transcription
  misc_feature: MA Experiment 20000184 PARAMETER Experiment Name: At_Shoots__P Parameter: Age (day) Value: 7
  misc_feature: MA Experiment 20000184 PARAMETER Experiment Name: At_Shoots__P Parameter: Tissue Value: Shoots vs. Whole Plant
  misc_feature: MA Experiment ID: 20000227 Result: Down-regulated in Transcription
  misc_feature: MA Experiment 20000227 PARAMETER Experiment Name: At_Root-Tips-vs-Tops_P Parameter: Tissue Value: Root Tips vs. Root Tops
  misc_feature: MA Experiment ID: 20000436 Result: Down-regulated in Transcription
  misc_feature: MA Experiment 20000436 PARAMETER Experiment Name: At_Drought_P Parameter: Age (day) Value: 7
  misc_feature: MA Experiment 20000436 PARAMETER Experiment Name: At_Drought_P Parameter: Organism Value: A. thaliana
  misc_feature: MA Experiment 20000436 PARAMETER Experiment Name: At_Drought_P Parameter: Plant Line Value: WS
  misc_feature: MA Experiment 20000436 PARAMETER Experiment Name: At_Drought_P Parameter: Timepoint (hr) Value: 12
  misc_feature: MA Experiment 20000436 PARAMETER Experiment Name: At_Drought_P Parameter: Tissue Value: Whole Plant
  misc_feature: MA Experiment 20000436 PARAMETER Experiment Name: At_Drought_P Parameter: Treatment Value: Drought vs. No Drought
  misc_feature: MA Experiment ID: 20000439 Result: Up-regulated in Transcription
  misc_feature: MA Experiment 20000439 PARAMETER Experiment Name: At_Roots__P Parameter: Age (day) Value: 14 vs. 21
  misc_feature: MA Experiment 20000439 PARAMETER Experiment Name: At_Roots__P Parameter: Organism Value: A. thaliana
  misc_feature: MA Experiment 20000439 PARAMETER Experiment Name: At_Roots__P Parameter: Tissue Value: Roots vs. Whole Plant
  misc_feature: MA Experiment ID: 20000453 Result: Down-regulated in Transcription
  misc_feature: MA Experiment 20000453 PARAMETER Experiment Name: At_100uM_ABA_P Parameter: Age (day) Value: 15
  misc_feature: MA Experiment 20000453 PARAMETER Experiment Name: At_100uM_ABA_P Parameter: Organism Value: A. thaliana
  misc_feature: MA Experiment 20000453 PARAMETER Experiment Name: At_100uM_ABA_P Parameter: Plant Line Value: WS
  misc_feature: MA Experiment 20000453 PARAMETER Experiment Name: At_100uM_ABA_P Parameter: Timepoint (hr) Value: 24
  misc_feature: MA Experiment 20000453 PARAMETER Experiment Name: At_100uM_ABA_P Parameter: Tissue Value: Aerial
  misc_feature: MA Experiment 20000453 PARAMETER Experiment Name: At_100uM_ABA_P Parameter: Treatment Value: 100uM ABA vs. No Treatment
  misc_feature: MA Experiment ID: 20000456 Result: Up-regulated in Transcription
  misc_feature: MA Experiment 20000456 PARAMETER Experiment Name: At_100uM_BA_P Parameter: Age (day) Value: 14
  misc_feature: MA Experiment 20000456 PARAMETER Experiment Name: At_100uM_BA_P Parameter: Organism Value: A. thaliana
  misc_feature: MA Experiment 20000456 PARAMETER Experiment Name: At_100uM_BA_P Parameter: Plant Line Value: WS
  misc_feature: MA Experiment 20000456 PARAMETER Experiment Name: At_100uM_BA_P Parameter: Timepoint (hr) Value: 6
  misc_feature: MA Experiment 20000456 PARAMETER Experiment Name: At_100uM_BA_P Parameter: Tissue Value: Aerial
  misc_feature: MA Experiment 20000456 PARAMETER Experiment Name: At_100uM_BA_P Parameter: Treatment Value: 100uM BA vs. No Treatment
  misc_feature: MA Experiment ID: 20000709 Result: Up-regulated in Transcription
  misc_feature: MA Experiment 20000709 PARAMETER Experiment Name: At_15mM_NH4NO3_L-to-H_P Parameter: Age (hr) Value: 14
  misc_feature: MA Experiment 20000709 PARAMETER Experiment Name: At_15mM_NH4NO3_L-to-H_P Parameter: Organism Value: A. thaliana
  misc_feature: MA Experiment 20000709 PARAMETER Experiment Name: At_15mM_NH4NO3_L-to-H_P Parameter: Plant Line Value: WS
  misc_feature: MA Experiment 20000709 PARAMETER Experiment Name: At_15mM_NH4NO3_L-to-H_P Parameter: Timepoint (hr) Value: 4
  misc_feature: MA Experiment 20000709 PARAMETER Experiment Name: At_15mM_NH4NO3_L-to-H_P Parameter: Tissue Value: Aerial
  misc_feature: MA Experiment 20000709 PARAMETER Experiment Name: At_15mM_NH4NO3_L-to-H_P Parameter: Treatment Value: 15mM NH4NO3 vs. 30mM Mannitol
  misc_feature: MA Experiment ID: 20000794 Result: Up-regulated in Transcription
  misc_feature: MA Experiment 20000794 PARAMETER Experiment Name: At_Petals_P Parameter: Age (day) Value: 23-25 days
  misc_feature: MA Experiment 20000794 PARAMETER Experiment Name: At_Petals_P Parameter: Plant Line Value: WS
  misc_feature: MA Experiment 20000794 PARAMETER Experiment Name: At_Petals_P Parameter: Tissue Value: Petals vs. Whole plant
  misc_feature: MA Experiment ID: 20001451 Result: Down-regulated in Transcription
  misc_feature: MA Experiment 20001451 PARAMETER Experiment Name: At_Far-red-induction_P Parameter: Age (day) Value: 7
  misc_feature: MA Experiment 20001451 PARAMETER Experiment Name: At_Far-red-induction_P Parameter: Light Value: Far-red vs. White
  misc_feature: MA Experiment 20001451 PARAMETER Experiment Name: At_Far-red-induction_P Parameter: Organism Value: A. thaliana
  misc_feature: MA Experiment 20001451 PARAMETER Experiment Name: At_Far-red-induction_P Parameter: Plant Line Value: Columbia
  misc_feature: MA Experiment 20001451 PARAMETER Experiment Name: At_Far-red-induction_P Parameter: Timepoint (hr) Value: 24
  misc_feature: MA Experiment 20001451 PARAMETER Experiment Name: At_Far-red-induction_P Parameter: Tissue Value: Whole Plant
  misc_feature: MA Experiment ID: 20001457 Result: Up-regulated in Transcription
  misc_feature: MA Experiment 20001457 PARAMETER Experiment Name: At_50mM_NH4NO3_L-to-H_P Parameter: Age (day) Value: Undefined
  misc_feature: MA Experiment 20001457 PARAMETER Experiment Name: At_50mM_NH4NO3_L-to-H_P Parameter: Organism Value: Undefined
  misc_feature: MA Experiment 20001457 PARAMETER Experiment Name: At_50mM_NH4NO3_L-to-H_P Parameter: Plant Line Value: Undefined
  misc_feature: MA Experiment 20001457 PARAMETER Experiment Name: At_50mM_NH4NO3_L-to-H_P Parameter: Timepoint (hr) Value: 0.5
  misc_feature: MA Experiment 20001457 PARAMETER Experiment Name: At_50mM_NH4NO3_L-to-H_P Parameter: Tissue Value: Siliques
  misc_feature: MA Experiment 20001457 PARAMETER Experiment Name: At_50mM_NH4NO3_L-to-H_P Parameter: Treatment Value: 50mM NH4NO3 vs. 100mM Manitol
  misc_feature: MA Experiment ID: 20001458 Result: Up-regulated in Transcription
  misc_feature: MA Experiment 20001458 PARAMETER Experiment Name: At_50mM_NH4NO3_L-to-H_P Parameter: Age (day) Value: Undefined
  misc_feature: MA Experiment 20001458 PARAMETER Experiment Name: At_50mM_NH4NO3_L-to-H_P Parameter: Organism Value: Undefined
  misc_feature: MA Experiment 20001458 PARAMETER Experiment Name: At_50mM_NH4NO3_L-to-H_P Parameter: Plant Line Value: Undefined
  misc_feature: MA Experiment 20001458 PARAMETER Experiment Name: At_50mM_NH4NO3_L-to-H_P Parameter: Timepoint (hr) Value: 2
  misc_feature: MA Experiment 20001458 PARAMETER Experiment Name: At_50mM_NH4NO3_L-to-H_P Parameter: Tissue Value: Siliques
  misc_feature: MA Experiment 20001458 PARAMETER Experiment Name: At_50mM_NH4NO3_L-to-H_P Parameter: Treatment Value: 50mM NH4NO3 vs. 100mM Manitol
  misc_feature: MA Experiment ID: 20001459 Result: Up-regulated in Transcription
  misc_feature: MA Experiment 20001459 PARAMETER Experiment Name: At_50mM_NH4NO3_L-to-H_P Parameter: Age (day) Value: Undefined
  misc_feature: MA Experiment 20001459 PARAMETER Experiment Name: At_50mM_NH4NO3_L-to-H_P Parameter: Organism Value: Undefined
  misc_feature: MA Experiment 20001459 PARAMETER Experiment Name: At_50mM_NH4NO3_L-to-H_P Parameter: Plant Line Value: Undefined
  misc_feature: MA Experiment 20001459 PARAMETER Experiment Name: At_50mM_NH4NO3_L-to-H_P Parameter: Timepoint (hr) Value: 4
  misc_feature: MA Experiment 20001459 PARAMETER Experiment Name: At_50mM_NH4NO3_L-to-H_P Parameter: Tissue Value: Siliques
  misc_feature: MA Experiment 20001459 PARAMETER Experiment Name: At_50mM_NH4NO3_L-to-H_P Parameter: Treatment Value: 50mM NH4NO3 vs. 100mM Manitol
  misc_feature: MA Experiment ID: 20001557 Result: Up-regulated in Transcription
  misc_feature: MA Experiment 20001557 PARAMETER Experiment Name: At_Drought_Soil_Dry_P Parameter: Age (day) Value: 27
  misc_feature: MA Experiment 20001557 PARAMETER Experiment Name: At_Drought_Soil_Dry_P Parameter: Organism Value: A. thaliana
  misc_feature: MA Experiment 20001557 PARAMETER Experiment Name: At_Drought_Soil_Dry_P Parameter: Plant Line Value: WS
  misc_feature: MA Experiment 20001557 PARAMETER Experiment Name: At_Drought_Soil_Dry_P Parameter: Post Timepoint (hr) Value: 3
  misc_feature: MA Experiment 20001557 PARAMETER Experiment Name: At_Drought_Soil_Dry_P Parameter: Post-Treatment Value: Re-Water vs. No Drought
  misc_feature: MA Experiment 20001557 PARAMETER Experiment Name: At_Drought_Soil_Dry_P Parameter: Timepoint (day) Value: 13
  misc_feature: MA Experiment 20001557 PARAMETER Experiment Name: At_Drought_Soil_Dry_P Parameter: Treatment Value: Drought vs. No Drought
  misc_feature: MA Experiment ID: 20001558 Result: Up-regulated in Transcription
  misc_feature: MA Experiment 20001558 PARAMETER Experiment Name: At_Drought_Soil_Dry_P Parameter: Age (day) Value: 27
  misc_feature: MA Experiment 20001558 PARAMETER Experiment Name: At_Drought_Soil_Dry_P Parameter: Organism Value: A. thaliana
  misc_feature: MA Experiment 20001558 PARAMETER Experiment Name: At_Drought_Soil_Dry_P Parameter: Plant Line Value: WS
  misc_feature: MA Experiment 20001558 PARAMETER Experiment Name: At_Drought_Soil_Dry_P Parameter: Post Timepoint (hr) Value: 6
  misc_feature: MA Experiment 20001558 PARAMETER Experiment Name: At_Drought_Soil_Dry_P Parameter: Post-Treatment Value: Re-Water vs. No Drought
  misc_feature: MA Experiment 20001558 PARAMETER Experiment Name: At_Drought_Soil_Dry_P Parameter: Timepoint (day) Value: 13
  misc_feature: MA Experiment 20001558 PARAMETER Experiment Name: At_Drought_Soil_Dry_P Parameter: Treatment Value: Drought vs. No Drought
  misc_feature: MA Experiment ID: 20001759 Result: Up-regulated in Transcription
  misc_feature: MA Experiment 20001759 PARAMETER Experiment Name: At_50mM_NH4NO3_L-to-H_P Parameter: Timepoint (hr) Value: 1
  misc_feature: MA Experiment 20001759 PARAMETER Experiment Name: At_50mM_NH4NO3_L-to-H_P Parameter: Tissue Value: Siliques
  misc_feature: MA Experiment 20001759 PARAMETER Experiment Name: At_50mM_NH4NO3_L-to-H_P Parameter: Treatment Value: 50mM NH4NO3 vs 100mM Mannitol
  misc_feature: MA Experiment ID: 20001905 Result: Up-regulated in Transcription
  misc_feature: MA Experiment 20001905 PARAMETER Experiment Name: At_Drought_Reproduction_P Parameter: Age (day) Value: 40
  misc_feature: MA Experiment 20001905 PARAMETER Experiment Name: At_Drought_Reproduction_P Parameter: Organism Value: A. thaliana
  misc_feature: MA Experiment 20001905 PARAMETER Experiment Name: At_Drought_Reproduction_P Parameter: Plant Line Value: WS
  misc_feature: MA Experiment 20001905 PARAMETER Experiment Name: At_Drought_Reproduction_P Parameter: Timepoint (day) Value: 10
  misc_feature: MA Experiment 20001905 PARAMETER Experiment Name: At_Drought_Reproduction_P Parameter: Tissue Value: Rosettes
  misc_feature: MA Experiment 20001905 PARAMETER Experiment Name: At_Drought_Reproduction_P Parameter: Treatment Value: Drought vs. No Drought
atggaggaggagaagcaagacggtggtgagcttttccataccatcgaggtagctaaagttgaccggaacaacgtgtctcagccgccgccggctgctactgcagcactgctagaagttcccggtgatgaacttaacctaattccaccgttgaacttttcgatggtcgataatggtatattccggtctggattcccggactcggcgaacttctccttcatcaagactcttggccttcgctcaatcatatctttgtgtccagagccatatcctgagaacaacatgcagttcctcaaatccaatggaattagtctttttcagtttggcattgaaggctctaagtccaaggagccatttgtagatatcctagatcagaaaatccgtgaagcactcaaagtccttctcgatgagaagaaccatccacttttgattcattgcaaacgaggcaagcacagaaccgggtgtcttgttgggtgcatgaggaaactccagaaatggtgcataacatcgatactcgatgagtataagcgatttgcagcggctaaagctagagtttcggatcaaaggttcttggagtcattcgatgtatcaggcttgaagcacactccaatgtctttttcttgctccaataggtaa

SEQ ID NO: 78754 - protein, 210 aa, Arabidopsis thaliana; identical to SEQ ID NO: 70425
  peptide (1)..(210): Ceres Seq. ID no. 12645015
  misc_feature (46)..(210): Pfam Name: Tyrosine phosphatase family Pfam Description: Tyrosine phosphatase family
  misc_feature (1)..(210): Homolog of NCBI NO: 15225761 NR Description: unknown protein; protein id: At2g32960.1
  misc_feature (1)..(115): Homolog of NCBI NO: 30102538 NR Description: At2g32960 [Arabidopsis thaliana]
  misc_feature (112)..(210): Homolog of NCBI NO: 30102538 NR Description: At2g32960 [Arabidopsis thaliana]
  misc_feature (5)..(210): Homolog of NCBI NO: 15220383 NR Description: unkown protein; protein id: At1g05000.1
  misc_feature (30)..(210): Homolog of NCBI NO: 18412419 NR Description: putative protein; protein id: At4g03960.1, by cDNA: 26983., supported by cDNA: gi_15810021, supported by gi_17981660 [Arabidopsis thaliana] >gi|15810022|gb|AAL06938.1|
  misc_feature (46)..(204): Homolog of NCBI NO: 15232985 NR Description: unknown protein; protein id: At3g02800.1 thaliana] >gi|6728982|gb|AAF26980.1|AC018363_25 unknown protein
  misc_feature (46)..(199): Homolog of NCBI NO: 21553927 NR Description: unknown [Arabidopsis thaliana]
  misc_feature (46)..(199): Homolog of NCBI NO: 15237359 NR Description: putative protein; protein id: At5g16480.1, by cDNA: 18232. [Arabidopsis thaliana] contains similarity to tyrosine phosphatase~gene_id:MQK4.21
  misc_feature (47)..(210): Homolog of NCBI NO: 7487406 NR Description: hypothetical protein T24M8.4 - Arabidopsis
  misc_feature (3)..(199): Homolog of NCBI NO: 6324296 NR Description: Synthetic interaction with Whi2; Siw14p cerevisiae] >gi|1730719|sp|P53965|YND2_YEAST HYPOTHETICAL 32.8 KD

SEQ ID NO: 78755 - protein, 157 aa, Arabidopsis thaliana
  peptide (1)..(157): Ceres Seq. ID no. 12645016
  misc_feature (1)..(157): Pfam Name: Tyrosine phosphatase family Pfam Description: Tyrosine phosphatase family
  misc_feature (1)..(157): Homolog of NCBI NO: 15225761 NR Description: unknown protein; protein id: At2g32960.1
  misc_feature (1)..(62): Homolog of NCBI NO: 30102538 NR Description: At2g32960 [Arabidopsis thaliana]
  misc_feature (59)..(157): Homolog of NCBI NO: 30102538 NR Description: At2g32960 [Arabidopsis thaliana]
  misc_feature (1)..(157): Homolog of NCBI NO: 15220383 NR Description: unkown protein; protein id: At1g05000.1
  misc_feature (1)..(157): Homolog of NCBI NO: 18412419 NR Description: putative protein; protein id: At4g03960.1, by cDNA: 26983., supported by cDNA: gi_15810021, supported by gi_17981660 [Arabidopsis thaliana] >gi|15810022|gb|AAL06938.1|
  misc_feature (1)..(151): Homolog of NCBI NO: 15232985 NR Description: unknown protein; protein id: At3g02800.1 thaliana] >gi|6728982|gb|AAF26980.1|AC018363_25 unknown protein
  misc_feature (1)..(146): Homolog of NCBI NO: 21553927 NR Description: unknown [Arabidopsis thaliana]
  misc_feature (1)..(146): Homolog of NCBI NO: 15237359 NR Description: putative protein; protein id: At5g16480.1, by cDNA: 18232. [Arabidopsis thaliana] contains similarity to tyrosine phosphatase~gene_id:MQK4.21
  misc_feature (1)..(157): Homolog of NCBI NO: 7487406 NR Description: hypothetical protein T24M8.4 - Arabidopsis
  misc_feature (1)..(146): Homolog of NCBI NO: 6324296 NR Description: Synthetic interaction with Whi2; Siw14p cerevisiae] >gi|1730719|sp|P53965|YND2_YEAST HYPOTHETICAL 32.8 KD
MVDNGIFRSGFPDSANFSFIKTLGLRSIISLCPEPYPENNMQFLKSNGISLFQFGIEGSKSKEPFVDILDQKIREALKVLLDEKNHPLLIHCKRGKHRTGCLVGCMRKLQKWCITSILDEYKRFAAAKARVSDQRFLESFDVSGLKHTPMSFSCSNR

SEQ ID NO: 78756 - protein, 117 aa, Arabidopsis thaliana
  peptide (1)..(117): Ceres Seq. ID no. 12645017
  misc_feature (1)..(117): Pfam Name: Tyrosine phosphatase family Pfam Description: Tyrosine phosphatase family
  misc_feature (1)..(117): Homolog of NCBI NO: 15225761 NR Description: unknown protein; protein id: At2g32960.1
  misc_feature (1)..(22): Homolog of NCBI NO: 30102538 NR Description: At2g32960 [Arabidopsis thaliana]
  misc_feature (19)..(117): Homolog of NCBI NO: 30102538 NR Description: At2g32960 [Arabidopsis thaliana]
  misc_feature (1)..(117): Homolog of NCBI NO: 15220383 NR Description: unkown protein; protein id: At1g05000.1
  misc_feature (1)..(117): Homolog of NCBI NO: 18412419 NR Description: putative protein; protein id: At4g03960.1, by cDNA: 26983., supported by cDNA: gi_15810021, supported by gi_17981660 [Arabidopsis thaliana] >gi|15810022|gb|AAL06938.1|
  misc_feature (1)..(111): Homolog of NCBI NO: 15232985 NR Description: unknown protein; protein id: At3g02800.1 thaliana] >gi|6728982|gb|AAF26980.1|AC018363_25 unknown protein
  misc_feature (1)..(106): Homolog of NCBI NO: 21553927 NR Description: unknown [Arabidopsis thaliana]
  misc_feature (1)..(106): Homolog of NCBI NO: 15237359 NR Description: putative protein; protein id: At5g16480.1, by cDNA: 18232. [Arabidopsis thaliana] contains similarity to tyrosine phosphatase~gene_id:MQK4.21
  misc_feature (1)..(117): Homolog of NCBI NO: 7487406 NR Description: hypothetical protein T24M8.4 - Arabidopsis
  misc_feature (1)..(106): Homolog of NCBI NO: 6324296 NR Description: Synthetic interaction with Whi2; Siw14p cerevisiae] >gi|1730719|sp|P53965|YND2_YEAST HYPOTHETICAL 32.8 KD
MQFLKSNGISLFQFGIEGSKSKEPFVDILDQKIREALKVLLDEKNHPLLIHCKRGKHRTGCLVGCMRKLQKWCITSILDEYKRFAAAKARVSDQRFLESFDVSGLKHTPMSFSCSNR

SEQ ID NO: 78757 - DNA, 3006 bp, Arabidopsis thaliana
  misc_feature (1)..(3006): Ceres Seq. ID no. 12645030
  misc_feature: MA Experiment ID: 20000264 Result: Up-regulated in Transcription
  misc_feature: MA Experiment 20000264 PARAMETER Experiment Name: At_Open_Flower_P Parameter: Age (day) Value: 21
  misc_feature: MA Experiment 20000264 PARAMETER Experiment Name: At_Open_Flower_P Parameter: Plant Line Value: WS
  misc_feature: MA Experiment 20000264 PARAMETER Experiment Name: At_Open_Flower_P Parameter: Tissue Value: Open Flower vs. Whole Plant
  misc_feature: MA Experiment ID: 20000286 Result: Up-regulated in Transcription
  misc_feature: MA Experiment 20000286 PARAMETER Experiment Name: At_Open_Flower_P Parameter: Age (day) Value: 21
  misc_feature: MA Experiment 20000286 PARAMETER Experiment Name: At_Open_Flower_P Parameter: Plant Line Value: WS
  misc_feature: MA Experiment 20000286 PARAMETER Experiment Name: At_Open_Flower_P Parameter: Tissue Value: Half Open vs. Whole Plant
  misc_feature: MA Experiment ID: 20000438 Result: Down-regulated in Transcription
  misc_feature: MA Experiment 20000438 PARAMETER Experiment Name: At_Shoots__P Parameter: Age (day) Value: 14
  misc_feature: MA Experiment 20000438 PARAMETER Experiment Name: At_Shoots__P Parameter: Tissue Value: Shoots vs. Whole Plant
  misc_feature: MA Experiment ID: 20000794 Result: Up-regulated in Transcription
  misc_feature: MA Experiment 20000794 PARAMETER Experiment Name: At_Petals_P Parameter: Age (day) Value: 23-25 days
  misc_feature: MA Experiment 20000794 PARAMETER Experiment Name: At_Petals_P Parameter: Plant Line Value: WS
  misc_feature: MA Experiment 20000794 PARAMETER Experiment Name: At_Petals_P Parameter: Tissue Value: Petals vs. Whole plant
  misc_feature: MA Experiment ID: 20001757 Result: Down-regulated in Transcription
  misc_feature: MA Experiment 20001757 PARAMETER Experiment Name: At_50mM_NH4NO3_L-to-H_P Parameter: Timepoint (hr) Value: 6
  misc_feature: MA Experiment 20001757 PARAMETER Experiment Name: At_50mM_NH4NO3_L-to-H_P Parameter: Tissue Value: Leaf
  misc_feature: MA Experiment 20001757 PARAMETER Experiment Name: At_50mM_NH4NO3_L-to-H_P Parameter: Treatment Value: 50mM NH4NO3 vs 100mM Mannitol
  misc_feature: MA Experiment ID: 20001904 Result: Up-regulated in Transcription
  misc_feature: MA Experiment 20001904 PARAMETER Experiment Name: At_Drought_Reproduction_P Parameter: Age (day) Value: 37
  misc_feature: MA Experiment 20001904 PARAMETER Experiment Name: At_Drought_Reproduction_P Parameter: Organism Value: A. thaliana
  misc_feature: MA Experiment 20001904 PARAMETER Experiment Name: At_Drought_Reproduction_P Parameter: Plant Line Value: WS
  misc_feature: MA Experiment 20001904 PARAMETER Experiment Name: At_Drought_Reproduction_P Parameter: Timepoint (day) Value: 7
  misc_feature: MA Experiment 20001904 PARAMETER Experiment Name: At_Drought_Reproduction_P Parameter: Tissue Value: Rosettes
  misc_feature: MA Experiment 20001904 PARAMETER Experiment Name: At_Drought_Reproduction_P Parameter: Treatment Value: Drought vs. No Drought
  misc_feature: MA Experiment ID: 20001910 Result: Up-regulated in Transcription
  misc_feature: MA Experiment 20001910 PARAMETER Experiment Name: At_Drought_Reproduction_P Parameter: Age (day) Value: 37
  misc_feature: MA Experiment 20001910 PARAMETER Experiment Name: At_Drought_Reproduction_P Parameter: Organism Value: A. thaliana
  misc_feature: MA Experiment 20001910 PARAMETER Experiment Name: At_Drought_Reproduction_P Parameter: Plant Line Value: WS
  misc_feature: MA Experiment 20001910 PARAMETER Experiment Name: At_Drought_Reproduction_P Parameter: Timepoint (day) Value: 7
  misc_feature: MA Experiment 20001910 PARAMETER Experiment Name: At_Drought_Reproduction_P Parameter: Tissue Value: Flowers
  misc_feature: MA Experiment 20001910 PARAMETER Experiment Name: At_Drought_Reproduction_P Parameter: Treatment Value: Drought vs. No Drought
atggcttcaagtccacccaagaagaccttaaattcacaatcttcttccttaagccggcctccacaagctgtcaagtttggtcgccggacgtccagtggtcgcattgttagcctctcccgtgacgatgacatggacgtctctggtgattactccggccaaaatgattacatcaactacaccgtcctcatgcctccaacacctgacaaccaacctgctggctcctctggctccacctcggagtctaaaggtgatgctaaccgaggtggaggaggaggagacgggcccaagatggggaataagctggagaggagattgtctgtcatgaaatcaaataacaaatcaatgttgttgaggagccagacgggagattttgatcataacaggtggttgtttgaatctaaaggaaaatacggtattggaaacgcgttttggtcagaagaggatgatacctatgatggtggcgttagcaagtccgatttcttagacaagccatggaaacctctcacgaggaaagttcagatcccggccaaaattcttagtccctacaggttattaatcgtgattcgtcttgtgatagtcttcttcttcctttggtggcgtattacgaaccctaatgaggatgcaatgtggttatggggactatcgatagtctgcgagatttggttcgctttctcttggattcttgacattcttccgaagctaaaccctataaatagagctactgaccttgctgccttgcatgacaagtttgagcagccctctccgtcaaatcccactggtcgctctgatcttcccggtgttgatgtgttcgtttccacggctgaccctgagaaggaaccgcctttagtcactgcaaacacccttctctcgatccttgctgtggattatccaattgagaagctttctgcttacatttctgacgatggtggtgcaattctcacctttgaagctatggctgaagctgttcgttttgctgagtattgggtgccattttgcagaaaacatgatatagagccacggaacccggatagttactttagcattaaaaaggacccaacaaaaaacaagaaaaggcaagatttcgtcaaagatcgtcgttggatcaagcgtgagtatgacgaattcaaggtcaggatcaatgatggggttgaggtggtaaaagcaacgtggatggctgatggtacgcattggccagggacatggtttgaacctaaacctgatcattcaaaaggagatcacgccggaattctacagatcatgagcaaagtgcctgatcttgaaccggtgatgggcggaccgaatgaaggcgcgctagatttcacagggattgatattcgtgtacctatgtttgcttatgtctcgcgtgagaaacgtccaggttttgaccacaacaagaaagccggcgctatgaatggtatggttagagcttcagccatattatccaatggcgcgtttatcctcaatctggactgtgatcactacatctacaactccaaagctatcaaagaaggaatgtgtttcatgatggaccgaggtggtgacaggatctgttatattcagtttccacaacggttcgaaggaatcgacccatcagatcgatatgcaaatcacaatactgtcttcttcgatggtaacatgagagcattagatgggttacaaggtcctgtctatgttggaacagggtgtatgttccgaaggtatgctctctatggattcaacccacctcgagccaatgagtactcaggcgtgtttggtcaggaaaaggctccagctatgcatgtccggactcagtcccaagcatcccaaacgtcccaagcgtctgatttagagtctgatacacagcctcttaatgatgatccagatcttggtctgcccaaaaagtttggtaattcgaccatgttcacagacactattccagttgcagagtaccaaggacggcctctagcagatcacatgtcggttaaaaacggaagaccacctggtgctttgctcctgccacgacctccccttgatgctccaacagtggctgaagccatcgctgtcatttcttgctggtatgaagacaatactgaatggggagatagaatcggatggatttacgggtcggtcacggaagacgtggtgacaggttatcgtatgcataaccgtggttggcggtccgtttactgcatcacaaaacgtgatgctttccgtggcacagctccaatcaatctcactgaccgtctccatcaagttctccgttgggccacaggctctgtagaaatctttttctccaagaacaatgccatgttcgccaccagaaggctcaagtttctccagcgagtcgcctacctcaatgtcgggatctaccctttcacttccatcttcttggtcgtctattgcttcctccctgctctctgtctcttcagcggaaaattcatcgtccagagcctcgatatccacttcctctcctaccttctctgcatcaccgtaaccctaaccctaatctcactcctcgaggtcaaatggtcgggaatcggactggaagaatggtggagaaatgaacagttttggttaatcggaggcacaagcgctcatcttgcagcagtcgttcaaggtttgctcaaagttatagccggaatcgaaatctccttcaccctgacatcgaaagcctcaggagaagacgaagacgacatctttgcggatctttacattgtgaaatggacaggcttattcatcatgccgcttacaatcatcatagtcaaccttgttgcgatagtgattggagcttcgagaacaatatacagtgtgattccgcaatggggcaagttaatgggaggaatattctttagtttatgggtcttgactcatatgtatccgtttgctaaaggattgatgggtcgaagaggaaaggttccaacgattgtttatgtttggtccgggcttgtgtcgattaccgtctcgctgctttggatcaccattagtcctccagatgatgtttcaggcagtggaggaatctcagtgtaa

SEQ ID NO: 78758 - protein, 1001 aa, Arabidopsis thaliana
  peptide (1)..(1001): Ceres Seq. ID no. 12645031
  misc_feature (133)..(989): Homolog of NCBI NO: 9622880 NR Description: cellulose synthase-4 [Zea mays]
  misc_feature (133)..(989): Homolog of NCBI NO: 28411807 NR Description: cellulose synthase-4 [Oryza sativa (japonica
  misc_feature (133)..(989): Homolog of NCBI NO: 30103013 NR Description: putative cellulose synthase catalytic subunit
  misc_feature (146)..(638): Homolog of NCBI NO: 23534479 NR Description: cellulose synthase [Populus tremuloides]
  misc_feature (668)..(989): Homolog of NCBI NO: 23534479 NR Description: cellulose synthase [Populus tremuloides]
  misc_feature (146)..(647): Homolog of NCBI NO: 15237958 NR Description: cellulose synthase catalytic subunit (IRX3); id: At5g17420.1, supported by cDNA: gi_4886755 [Arabidopsis >gi|11357223|pir||T51579 cellulose synthase catalytic subunit
  misc_feature (668)..(989): Homolog of NCBI NO: 15237958 NR Description: cellulose synthase catalytic subunit (IRX3); id: At5g17420.1, supported by cDNA: gi_4886755 [Arabidopsis >gi|11357223|pir||T51579 cellulose synthase catalytic subunit
  misc_feature (133)..(989): Homolog of NCBI NO: 9622890 NR Description: cellulose synthase-9 [Zea mays]
  misc_feature (146)..(647): Homolog of NCBI NO: 4886756 NR Description: cellulose synthase catalytic subunit [Arabidopsis
  misc_feature (668)..(989): Homolog of NCBI NO: 4886756 NR Description: cellulose synthase catalytic subunit [Arabidopsis
MASSPPKKTLNSQSSSLSRPPQAVKFGRRTSSGRIVSLSRDDDMDVSGDYSGQNDYINYTVLMPPTPDNQPAGSSGSTSESKGDANRGGGGGDGPKMGNKLERRLSVMKSNNKSMLLRSQTGDFDHNRWLFESKGKYGIGNAFWSEEDDTYDGGVSKSDFLDKPWKPLTRKVQIPAKILSPYRLLIVIRLVIVFFFLWWRITNPNEDAMWLWGLSIVCEIWFAFSWILDILPKLNPINRATDLAALHDKFEQPSPSNPTGRSDLPGVDVFVSTADPEKEPPLVTANTLLSILAVDYPIEKLSAYISDDGGAILTFEAMAEAVRFAEYWVPFCRKHDIEPRNPDSYFSIKKDPTKNKKRQDFVKDRRWIKREYDEFKVRINDGVEVVKATWMADGTHWPGTWFEPKPDHSKGDHAGILQIMSKVPDLEPVMGGPNEGALDFTGIDIRVPMFAYVSREKRPGFDHNKKAGAMNGMVRASAILSNGAFILNLDCDHYIYNSKAIKEGMCFMMDRGGDRICYIQFPQRFEGIDPSDRYANHNTVFFDGNMRALDGLQGPVYVGTGCMFRRYALYGFNPPRANEYSGVFGQEKAPAMHVRTQSQASQTSQASDLESDTQPLNDDPDLGLPKKFGNSTMFTDTIPVAEYQGRPLADHMSVKNGRPPGALLLPRPPLDAPTVAEAIAVISCWYEDNTEWGDRIGWIYGSVTEDVVTGYRMHNRGWRSVYCITKRDAFRGTAPINLTDRLHQVLRWATGSVEIFFSKNNAMFATRRLKFLQRVAYLNVGIYPFTSIFLVVYCFLPALCLFSGKFIVQSLDIHFLSYLLCITVTLTLISLLEVKWSGIGLEEWWRNEQFWLIGGTSAHLAAVVQGLLKVIAGIEISFTLTSKASGEDEDDIFADLYIVKWTGLFIMPLTIIIVNLVAIVIGASRTIYSVIPQWGKLMGGIFFSLWVLTHMYPFAKGLMGRRGKVPTIVYVWSGLVSITVSLLWITISPPDDVSGSGGISV

SEQ ID NO: 78759 - protein, 958 aa, Arabidopsis thaliana
  peptide (1)..(958): Ceres Seq. ID no. 12645032
  misc_feature (90)..(946): Homolog of NCBI NO: 9622880 NR Description: cellulose synthase-4 [Zea mays]
  misc_feature (90)..(946): Homolog of NCBI NO: 28411807 NR Description: cellulose synthase-4 [Oryza sativa (japonica
  misc_feature (90)..(946): Homolog of NCBI NO: 30103013 NR Description: putative cellulose synthase catalytic subunit
  misc_feature (103)..(595): Homolog of NCBI NO: 23534479 NR Description: cellulose synthase [Populus tremuloides]
  misc_feature (625)..(946): Homolog of NCBI NO: 23534479 NR Description: cellulose synthase [Populus tremuloides]
  misc_feature (103)..(604): Homolog of NCBI NO: 15237958 NR Description: cellulose synthase catalytic subunit (IRX3); id: At5g17420.1, supported by cDNA: gi_4886755 [Arabidopsis >gi|11357223|pir||T51579 cellulose synthase catalytic subunit
  misc_feature (625)..(946): Homolog of NCBI NO: 15237958 NR Description: cellulose synthase catalytic subunit (IRX3); id: At5g17420.1, supported by cDNA: gi_4886755 [Arabidopsis >gi|11357223|pir||T51579 cellulose synthase catalytic subunit
  misc_feature (90)..(946): Homolog of NCBI NO: 9622890 NR Description: cellulose synthase-9 [Zea mays]
  misc_feature (103)..(604): Homolog of NCBI NO: 4886756 NR Description: cellulose synthase catalytic subunit [Arabidopsis
  misc_feature (625)..(946): Homolog of NCBI NO: 4886756 NR Description: cellulose synthase catalytic subunit [Arabidopsis
MDVSGDYSGQNDYINYTVLMPPTPDNQPAGSSGSTSESKGDANRGGGGGDGPKMGNKLERRLSVMKSNNKSMLLRSQTGDFDHNRWLFESKGKYGIGNAFWSEEDDTYDGGVSKSDFLDKPWKPLTRKVQIPAKILSPYRLLIVIRLVIVFFFLWWRITNPNEDAMWLWGLSIVCEIWFAFSWILDILPKLNPINRATDLAALHDKFEQPSPSNPTGRSDLPGVDVFVSTADPEKEPPLVTANTLLSILAVDYPIEKLSAYISDDGGAILTFEAMAEAVRFAEYWVPFCRKHDIEPRNPDSYFSIKKDPTKNKKRQDFVKDRRWIKREYDEFKVRINDGVEVVKATWMADGTHWPGTWFEPKPDHSKGDHAGILQIMSKVPDLEPVMGGPNEGALDFTGIDIRVPMFAYVSREKRPGFDHNKKAGAMNGMVRASAILSNGAFILNLDCDHYIYNSKAIKEGMCFMMDRGGDRICYIQFPQRFEGIDPSDRYANHNTVFFDGNMRALDGLQGPVYVGTGCMFRRYALYGFNPPRANEYSGVFGQEKAPAMHVRTQSQASQTSQASDLESDTQPLNDDPDLGLPKKFGNSTMFTDTIPVAEYQGRPLADHMSVKNGRPPGALLLPRPPLDAPTVAEAIAVISCWYEDNTEWGDRIGWIYGSVTEDVVTGYRMHNRGWRSVYCITKRDAFRGTAPINLTDRLHQVLRWATGSVEIFFSKNNAMFATRRLKFLQRVAYLNVGIYPFTSIFLVVYCFLPALCLFSGKFIVQSLDIHFLSYLLCITVTLTLISLLEVKWSGIGLEEWWRNEQFWLIGGTSAHLAAVVQGLLKVIAGIEISFTLTSKASGEDEDDIFADLYIVKWTGLFIMPLTIIIVNLVAIVIGASRTIYSVIPQWGKLMGGIFFSLWVLTHMYPFAKGLMGRRGKVPTIVYVWSGLVSITVSLLWITISPPDDVSGSGGISV

SEQ ID NO: 78760 - protein, 939 aa, Arabidopsis thaliana
  peptide (1)..(939): Ceres Seq. ID no. 12645033
  misc_feature (71)..(927): Homolog of NCBI NO: 9622880 NR Description: cellulose synthase-4 [Zea mays]
  misc_feature (71)..(927): Homolog of NCBI NO: 28411807 NR Description: cellulose synthase-4 [Oryza sativa (japonica
  misc_feature (71)..(927): Homolog of NCBI NO: 30103013 NR Description: putative cellulose synthase catalytic subunit
  misc_feature (84)..(576): Homolog of NCBI NO: 23534479 NR Description: cellulose synthase [Populus tremuloides]
  misc_feature (606)..(927): Homolog of NCBI NO: 23534479 NR Description: cellulose synthase [Populus tremuloides]
  misc_feature (84)..(585): Homolog of NCBI NO: 15237958 NR Description: cellulose synthase catalytic subunit (IRX3); id: At5g17420.1, supported by cDNA: gi_4886755 [Arabidopsis >gi|11357223|pir||T51579 cellulose synthase catalytic subunit
  misc_feature (606)..(927): Homolog of NCBI NO: 15237958 NR Description: cellulose synthase catalytic subunit (IRX3); id: At5g17420.1, supported by cDNA: gi_4886755 [Arabidopsis >gi|11357223|pir||T51579 cellulose synthase catalytic subunit
  misc_feature (71)..(927): Homolog of NCBI NO: 9622890 NR Description: cellulose synthase-9 [Zea mays]
  misc_feature (84)..(585): Homolog of NCBI NO: 4886756 NR Description: cellulose synthase catalytic subunit [Arabidopsis
  misc_feature (606)..(927): Homolog of NCBI NO: 4886756 NR Description: cellulose synthase catalytic subunit [Arabidopsis
MPPTPDNQPAGSSGSTSESKGDANRGGGGGDGPKMGNKLERRLSVMKSNNKSMLLRSQTGDFDHNRWLFESKGKYGIGNAFWSEEDDTYDGGVSKSDFLDKPWKPLTRKVQIPAKILSPYRLLIVIRLVIVFFFLWWRITNPNEDAMWLWGLSIVCEIWFAFSWILDILPKLNPINRATDLAALHDKFEQPSPSNPTGRSDLPGVDVFVSTADPEKEPPLVTANTLLSILAVDYPIEKLSAYISDDGGAILTFEAMAEAVRFAEYWVPFCRKHDIEPRNPDSYFSIKKDPTKNKKRQDFVKDRRWIKREYDEFKVRINDGVEVVKATWMADGTHWPGTWFEPKPDHSKGDHAGILQIMSKVPDLEPVMGGPNEGALDFTGIDIRVPMFAYVSREKRPGFDHNKKAGAMNGMVRASAILSNGAFILNLDCDHYIYNSKAIKEGMCFMMDRGGDRICYIQFPQRFEGIDPSDRYANHNTVFFDGNMRALDGLQGPVYVGTGCMFRRYALYGFNPPRANEYSGVFGQEKAPAMHVRTQSQASQTSQASDLESDTQPLNDDPDLGLPKKFGNSTMFTDTIPVAEYQGRPLADHMSVKNGRPPGALLLPRPPLDAPTVAEAIAVISCWYEDNTEWGDRIGWIYGSVTEDVVTGYRMHNRGWRSVYCITKRDAFRGTAPINLTDRLHQVLRWATGSVEIFFSKNNAMFATRRLKFLQRVAYLNVGIYPFTSIFLVVYCFLPALCLFSGKFIVQSLDIHFLSYLLCITVTLTLISLLEVKWSGIGLEEWWRNEQFWLIGGTSAHLAAVVQGLLKVIAGIEISFTLTSKASGEDEDDIFADLYIVKWTGLFIMPLTIIIVNLVAIVIGASRTIYSVIPQWGKLMGGIFFSLWVLTHMYPFAKGLMGRRGKVPTIVYVWSGLVSITVSLLWITISPPDDVSGSGGISV

SEQ ID NO: 78761 - DNA, 1485 bp, Arabidopsis thaliana
  misc_feature (1)..(1485): Ceres Seq. ID no. 12645046
  misc_feature: MA Experiment ID: 20000180 Result: Up-regulated in Transcription
  misc_feature: MA Experiment 20000180 PARAMETER Experiment Name: At_Germinating_Seeds_P Parameter: Age (hr) Value: 24 vs. 0
  misc_feature: MA Experiment 20000180 PARAMETER Experiment Name: At_Germinating_Seeds_P Parameter: Tissue Value: Germinating Seeds
  misc_feature: MA Experiment ID: 20000438 Result: Up-regulated in Transcription
  misc_feature: MA Experiment 20000438 PARAMETER Experiment Name: At_Shoots__P Parameter: Age (day) Value: 14
  misc_feature: MA Experiment 20000438 PARAMETER Experiment Name: At_Shoots__P Parameter: Tissue Value: Shoots vs. Whole Plant
  misc_feature: MA Experiment ID: 20001248 Result: Down-regulated in Transcription
  misc_feature: MA Experiment 20001248 PARAMETER Experiment Name: At_Far-red-induction_P Parameter: Age (day) Value: 7
  misc_feature: MA Experiment 20001248 PARAMETER Experiment Name: At_Far-red-induction_P Parameter: Light Value: Far-red vs. White
  misc_feature: MA Experiment 20001248 PARAMETER Experiment Name: At_Far-red-induction_P Parameter: Organism Value: A. thaliana
  misc_feature: MA Experiment 20001248 PARAMETER Experiment Name: At_Far-red-induction_P Parameter: Plant Line Value: Columbia
  misc_feature: MA Experiment 20001248 PARAMETER Experiment Name: At_Far-red-induction_P Parameter: Timepoint (hr) Value: 4
  misc_feature: MA Experiment 20001248 PARAMETER Experiment Name: At_Far-red-induction_P Parameter: Tissue Value: Whole Plant
  misc_feature: MA Experiment ID: 20001451 Result: Up-regulated in Transcription
  misc_feature: MA Experiment 20001451 PARAMETER Experiment Name: At_Far-red-induction_P Parameter: Age (day) Value: 7
  misc_feature: MA Experiment 20001451 PARAMETER Experiment Name: At_Far-red-induction_P Parameter: Light Value: Far-red vs. White
  misc_feature: MA Experiment 20001451 PARAMETER Experiment Name: At_Far-red-induction_P Parameter: Organism Value: A. thaliana
  misc_feature: MA Experiment 20001451 PARAMETER Experiment Name: At_Far-red-induction_P Parameter: Plant Line Value: Columbia
  misc_feature: MA Experiment 20001451 PARAMETER Experiment Name: At_Far-red-induction_P Parameter: Timepoint (hr) Value: 24
  misc_feature: MA Experiment 20001451 PARAMETER Experiment Name: At_Far-red-induction_P Parameter: Tissue Value: Whole Plant
  misc_feature: MA Experiment ID: 20001905 Result: Down-regulated in Transcription
  misc_feature: MA Experiment 20001905 PARAMETER Experiment Name: At_Drought_Reproduction_P Parameter: Age (day) Value: 40
  misc_feature: MA Experiment 20001905 PARAMETER Experiment Name: At_Drought_Reproduction_P Parameter: Organism Value: A. thaliana
  misc_feature: MA Experiment 20001905 PARAMETER Experiment Name: At_Drought_Reproduction_P Parameter: Plant Line Value: WS
  misc_feature: MA Experiment 20001905 PARAMETER Experiment Name: At_Drought_Reproduction_P Parameter: Timepoint (day) Value: 10
  misc_feature: MA Experiment 20001905 PARAMETER Experiment Name: At_Drought_Reproduction_P Parameter: Tissue Value: Rosettes
  misc_feature: MA Experiment 20001905 PARAMETER Experiment Name: At_Drought_Reproduction_P Parameter: Treatment Value: Drought vs. No Drought
atggcggatagaggagctctttcgttaccgcgagcttctacttatcttagtttctcaaacctccatgtctggcgattccacaaccctagatcttatcctccctctcgttctcaactcctctgtttctcttcctcatgctctagagtaacttcggcgaagataattcagctgaaccgccggagattcagctataaaatatgcgccgccgctgatgacggtaggggataccgtttgacggaaaggggaaaaaggggaaggaagcggcgggagctatgggaagaactttttgaagataatgttgaagacgatgatgatgaagatgatggtggtggtggaattggtagtgctaattttgacctgtggaagatcttagaggaaattgtagataatgtttggattttaaaggcattcaaatcgtatggatatctcctcccattcatcatcttatcgcttttcttcagcaccggacccaaagctttcctcgtgtcactagccgtagcaatcgggccatcattgttattttatgcgttccagaagttgattggttgggataaacgcagaggtacatcaatagcaaatcaattcgggatagaggaagaagaagaagaagtggagagaagtagtagcaggattcgatacaacccatcaaccgttagaaacaatgtcaatggccgtggagttaaccgtagttcagctggaatggcttctaagtttggtgggtgggacgagttagacgggcttggtaccaccattcccgaacggccaacaagcgaaccgaagaagaaaccgttaccgaagaggaagagagtaagaagagaaaaggcagcagaaccattattgttgagattgttggtgtctttgtttccattcttaagcacatacacaaacatgctcaaaccttcttgttcgatttccatggcgaatttaacgacgaacgctaaaactcgcctgagaggtgttgtattcgatatggacggaaccctgactgttccggtcatcgatttcgccgcaatgtatagagctgttcttggtgaagatgcttacaagcgaatcaaagcagagagccctagtgggattgatattctgcatcatattgagtcgtggagtcctgataaacagcagaaggcgtatgaaatcattgctgattatgagaaacaaggaatagataagcttcaaatcatgcctggtactgctgaactatgtggcttccttgattccaaaaagataaagagggggctaattacacgcaatgttcaaaaggcaatcgacatcttccatcaacgttttgaggttatcttttctccagcactaggcagagagtttcgtccatataaaccaaacccagacccgctgttgcatatatgttctacatgggacatccaacctaatgaagtcatgatggttggtgacagcttaaaagatgatgtgagtgacagacatgatgacaagcctttggtcaaccctttctccatagcaaatcgataa

SEQ ID NO: 78762 - protein, 494 aa, Arabidopsis thaliana
  peptide (1)..(494): Ceres Seq. ID no. 12645047
  misc_feature (317)..(477): Pfam Name: haloacid dehalogenase-like hydrolase Pfam Description: haloacid dehalogenase-like hydrolase
  misc_feature (1)..(477): Homolog of NCBI NO: 25408252 NR Description: hypothetical protein At2g33250 [imported] -
  misc_feature (1)..(299): Homolog of NCBI NO: 18403223 NR Description: Expressed protein; protein id: At2g33250.1, by cDNA: gi_15010591, supported by cDNA: gi_20453326 [Arabidopsis >gi|15010592|gb|AAK73955.1| F25I18.1/F25I18.1 [Arabidopsis
  misc_feature (293)..(477): Homolog of NCBI NO: 20196855 NR Description: unknown protein [Arabidopsis thaliana]
  misc_feature (306)..(477): Homolog of NCBI NO: 30685622 NR Description: haloacid dehalogenase-like hydrolase family thaliana] >gi|16648738|gb|AAL25561.1| F25I18.1/F25I18.1 thaliana] >gi|20147253|gb|AAM10340.1| F25I18.1/F25I18.1
  misc_feature (317)..(479): Homolog of NCBI NO: 6324705 NR Description: Hypothetical ORF; Yor131cp [Saccharomyces
  misc_feature (306)..(474): Homolog of NCBI NO: 24375526 NR Description: hydrolase, haloacid dehalogenase-like family
  misc_feature (321)..(474): Homolog of NCBI NO: 39995800 NR Description: HAD-superfamily hydrolase, subfamily IA, variant 1
  misc_feature (317)..(484): Homolog of NCBI NO: 27366476 NR Description: Predicted phosphatases [Vibrio vulnificus CMCP6]
  misc_feature (317)..(470): Homolog of NCBI NO: 26991442 NR Description: hydrolase, haloacid dehalogenase-like family putida KT2440] >gi|24986517|gb|AAN70331.1|AE016675_1 hydrolase,
  misc_feature (316)..(474): Homolog of NCBI NO: 28900419 NR Description: hypothetical protein [Vibrio parahaemolyticus
MADRGALSLPRASTYLSFSNLHVWRFHNPRSYPPSRSQLLCFSSSCSRVTSAKIIQLNRRRFSYKICAAADDGRGYRLTERGKRGRKRRELWEELFEDNVEDDDDEDDGGGGIGSANFDLWKILEEIVDNVWILKAFKSYGYLLPFIILSLFFSTGPKAFLVSLAVAIGPSLLFYAFQKLIGWDKRRGTSIANQFGIEEEEEEVERSSSRIRYNPSTVRNNVNGRGVNRSSAGMASKFGGWDELDGLGTTIPERPTSEPKKKPLPKRKRVRREKAAEPLLLRLLVSLFPFLSTYTNMLKPSCSISMANLTTNAKTRLRGVVFDMDGTLTVPVIDFAAMYRAVLGEDAYKRIKAESPSGIDILHHIESWSPDKQQKAYEIIADYEKQGIDKLQIMPGTAELCGFLDSKKIKRGLITRNVQKAIDIFHQRFEVIFSPALGREFRPYKPNPDPLLHICSTWDIQPNEVMMVGDSLKDDVSDRHDDKPLVNPFSIANR

SEQ ID NO: 78763 - protein, 261 aa, Arabidopsis thaliana
  peptide (1)..(261): Ceres Seq. ID no. 12645048
  misc_feature (84)..(244): Pfam Name: haloacid dehalogenase-like hydrolase Pfam Description: haloacid dehalogenase-like hydrolase
  misc_feature (1)..(244): Homolog of NCBI NO: 25408252 NR Description: hypothetical protein At2g33250 [imported] -
  misc_feature (1)..(66): Homolog of NCBI NO: 18403223 NR Description: Expressed protein; protein id: At2g33250.1, by cDNA: gi_15010591, supported by cDNA: gi_20453326 [Arabidopsis >gi|15010592|gb|AAK73955.1| F25I18.1/F25I18.1 [Arabidopsis
  misc_feature (60)..(244): Homolog of NCBI NO: 20196855 NR Description: unknown protein [Arabidopsis thaliana]
  misc_feature (73)..(244): Homolog of NCBI NO: 30685622 NR Description: haloacid dehalogenase-like hydrolase family thaliana] >gi|16648738|gb|AAL25561.1| F25I18.1/F25I18.1 thaliana] >gi|20147253|gb|AAM10340.1| F25I18.1/F25I18.1
  misc_feature (84)..(246): Homolog of NCBI NO: 6324705 NR Description: Hypothetical ORF; Yor131cp [Saccharomyces
  misc_feature (73)..(241): Homolog of NCBI NO: 24375526 NR Description: hydrolase, haloacid dehalogenase-like family
  misc_feature (88)..(241): Homolog of NCBI NO: 39995800 NR Description: HAD-superfamily hydrolase, subfamily IA, variant 1
  misc_feature (84)..(251): Homolog of NCBI NO: 27366476 NR Description: Predicted phosphatases [Vibrio vulnificus CMCP6]
  misc_feature (84)..(237): Homolog of NCBI NO: 26991442 NR Description: hydrolase, haloacid dehalogenase-like family putida KT2440] >gi|24986517|gb|AAN70331.1|AE016675_1 hydrolase,
  misc_feature (83)..(241): Homolog of NCBI NO: 28900419 NR Description: hypothetical protein [Vibrio parahaemolyticus
MASKFGGWDELDGLGTTIPERPTSEPKKKPLPKRKRVRREKAAEPLLLRLLVSLFPFLSTYTNMLKPSCSISMANLTTNAKTRLRGVVFDMDGTLTVPVIDFAAMYRAVLGEDAYKRIKAESPSGIDILHHIESWSPDKQQKAYEIIADYEKQGIDKLQIMPGTAELCGFLDSKKIKRGLITRNVQKAIDIFHQRFEVIFSPALGREFRPYKPNPDPLLHICSTWDIQPNEVMMVGDSLKDDVSDRHDDKPLVNPFSIANR

SEQ ID NO: 78764 - DNA, 947 bp, Arabidopsis thaliana
  misc_feature (1)..(947): Ceres Seq. ID no. 12645081
  misc_feature: MA Experiment ID: 108434 Result: Up-regulated in Transcription
  misc_feature: MA Experiment 108434 PARAMETER Experiment Name: At_Root_Tips_cDNA_P Parameter: Tissue Value: Root Tips
  misc_feature: MA Experiment ID: 108461 Result: Up-regulated in Transcription
  misc_feature: MA Experiment 108461 PARAMETER Experiment Name: At_Germinating_Seeds_cDNA_P Parameter: Age (day) Value: 1 vs. 0
  misc_feature: MA Experiment 108461 PARAMETER Experiment Name: At_Germinating_Seeds_cDNA_P Parameter: Tissue Value: Germinating Seeds
  misc_feature: MA Experiment ID: 108462 Result: Up-regulated in Transcription
  misc_feature: MA Experiment 108462 PARAMETER Experiment Name: At_Germinating_Seeds_cDNA_P Parameter: Age (day) Value: 2 vs. 0
  misc_feature: MA Experiment 108462 PARAMETER Experiment Name: At_Germinating_Seeds_cDNA_P Parameter: Tissue Value: Germinating Seeds
  misc_feature: MA Experiment ID: 20000179 Result: Up-regulated in Transcription
  misc_feature: MA Experiment 20000179 PARAMETER Experiment Name: At_Germinating_Seeds_P Parameter: Age (hr) Value: 6 vs. 0
  misc_feature: MA Experiment 20000179 PARAMETER Experiment Name: At_Germinating_Seeds_P Parameter: Tissue Value: Germinating Seeds
  misc_feature: MA Experiment ID: 20000180 Result: Up-regulated in Transcription
  misc_feature: MA Experiment 20000180 PARAMETER Experiment Name: At_Germinating_Seeds_P Parameter: Age (hr) Value: 24 vs. 0
  misc_feature: MA Experiment 20000180 PARAMETER Experiment Name: At_Germinating_Seeds_P Parameter: Tissue Value: Germinating Seeds
  misc_feature: MA Experiment ID: 20000794 Result: Up-regulated in Transcription
  misc_feature: MA Experiment 20000794 PARAMETER Experiment Name: At_Petals_P Parameter: Age (day) Value: 23-25 days
  misc_feature: MA Experiment 20000794 PARAMETER Experiment Name: At_Petals_P Parameter: Plant Line Value: WS
  misc_feature: MA Experiment 20000794 PARAMETER Experiment Name: At_Petals_P Parameter: Tissue Value: Petals vs. Whole plant
cgttacgttttaggcgtttaacacaattattattttctaaaacgagagccgtttaaagagaaagagaaatttctaactccagagagcgaagaacacaatcccagagtagcagaatctgatccatcccacctttttcaattctcaggcaaagtgtttgatctcatattcagataagtcaaacttgaaaaaatggaagggactgtgttcacgccttgtttggaaggaatgaagcatgtcaaatctgatcaaggcgagatgcttactaagccatttttagagctttgcaagaccatcttgcctgttatagataaatttggagctgctatgactctcgtgaaatctgacattggtggcaacataacgaggttggagaagaactacttatctgatcccgacaagttcaagtacttgtacacctttgttcaagtcgaaattgagtctaagatagcaaaaggatcgtctagctgtacaaacggtcttctctggttaaccagagcaatggatttcttagtggagctgttccgaaacttggtagcacatcaagactggtcaatgccacaagcttgtgctgactcataccaaaaaacactcaagaaatggcacggatggctcgccagctctaccttctctatggctttaaagctagctccggacaggaagaagttcatggatgtcatatctggttctggtaacatccaagccgacatggaaaggttttgtgctgagtttggtccgtttcttcatgataatcataagtttctggctagcgtcggtatggatgacatgaaagcttcttaagtcatcatatgattatcgccggtatcaaatcttctttgccggaatctttgtctgttttaacttttctccttccaattatagaacctccaaaaagaaacagaataatgtgttggtttctatctgaatgttcactttatattacaagttat

SEQ ID NO: 78765 - protein, 202 aa, Arabidopsis thaliana; identical to SEQ ID NO: 24242
  peptide (1)..(202): Ceres Seq. ID no. 12645082
  misc_feature (1)..(202): Homolog of NCBI NO: 18403285 NR Description: expressed protein; protein id: At2g33470.1, by cDNA: 19302. [Arabidopsis thaliana] >gi|25408274|pir||H84745
  misc_feature (1)..(202): Homolog of NCBI NO: 34901156 NR Description: hypothetical protein~similar to Arabidopsis
  misc_feature (25)..(202): Homolog of NCBI NO: 38344077 NR Description: OSJNBa0006B20.21 [Oryza sativa (japonica
  misc_feature (26)..(201): Homolog of NCBI NO: 9280228 NR Description: gene_id:MXL8.12~unknown protein [Arabidopsis
  misc_feature (25)..(191): Homolog of NCBI NO: 39545646 NR Description: OJ000114_01.1 [Oryza sativa (japonica
  misc_feature (59)..(201): Homolog of NCBI NO: 30686173 NR Description: expressed protein [Arabidopsis thaliana]
  misc_feature (19)..(164): Homolog of NCBI NO: 30481662 NR Description: Unknown (protein for MGC:58573) [Mus musculus]
  misc_feature (66)..(201): Homolog of NCBI NO: 18402939 NR Description: expressed protein; protein id: At3g21260.1,
  misc_feature (66)..(201): Homolog of NCBI NO: 21554671 NR Description: unknown [Arabidopsis thaliana]
  misc_feature (10)..(182): Homolog of NCBI NO: 28571195 NR Description: CG6299-PB [Drosophila melanogaster]

SEQ ID NO: 78766 - protein, 190 aa, Arabidopsis thaliana; identical to SEQ ID NO: 24243
  peptide (1)..(190): Ceres Seq. ID no. 12645083
  misc_feature (1)..(190): Homolog of NCBI NO: 18403285 NR Description: expressed protein; protein id: At2g33470.1, by cDNA: 19302. [Arabidopsis thaliana] >gi|25408274|pir||H84745
  misc_feature (1)..(190): Homolog of NCBI NO: 34901156 NR Description: hypothetical protein~similar to Arabidopsis
  misc_feature (13)..(190): Homolog of NCBI NO: 38344077 NR Description: OSJNBa0006B20.21 [Oryza sativa (japonica
  misc_feature (14)..(189): Homolog of NCBI NO: 9280228 NR Description: gene_id:MXL8.12~unknown protein [Arabidopsis
  misc_feature (13)..(179): Homolog of NCBI NO: 39545646 NR Description: OJ000114_01.1 [Oryza sativa (japonica
  misc_feature (47)..(189): Homolog of NCBI NO: 30686173 NR Description: expressed protein [Arabidopsis thaliana]
  misc_feature (7)..(152): Homolog of NCBI NO: 30481662 NR Description: Unknown (protein for MGC:58573) [Mus musculus]
  misc_feature (54)..(189): Homolog of NCBI NO: 18402939 NR Description: expressed protein; protein id: At3g21260.1,
  misc_feature (54)..(189): Homolog of NCBI NO: 21554671 NR Description: unknown [Arabidopsis thaliana]
  misc_feature (1)..(170): Homolog of NCBI NO: 28571195 NR Description: CG6299-PB [Drosophila melanogaster]

SEQ ID NO: 78767 - protein, 180 aa, Arabidopsis thaliana; identical to SEQ ID NO: 24244
  peptide (1)..(180): Ceres Seq. ID no. 12645084
  misc_feature (1)..(180): Homolog of NCBI NO: 18403285 NR Description: expressed protein; protein id: At2g33470.1, by cDNA: 19302. [Arabidopsis thaliana] >gi|25408274|pir||H84745
  misc_feature (1)..(180): Homolog of NCBI NO: 34901156 NR Description: hypothetical protein~similar to Arabidopsis
  misc_feature (3)..(180): Homolog of NCBI NO: 38344077 NR Description: OSJNBa0006B20.21 [Oryza sativa (japonica
  misc_feature (4)..(179): Homolog of NCBI NO: 9280228 NR Description: gene_id:MXL8.12~unknown protein [Arabidopsis
  misc_feature (3)..(169): Homolog of NCBI NO: 39545646 NR Description: OJ000114_01.1 [Oryza sativa (japonica
  misc_feature (37)..(179): Homolog of NCBI NO: 30686173 NR Description: expressed protein [Arabidopsis thaliana]
  misc_feature (1)..(142): Homolog of NCBI NO: 30481662 NR Description: Unknown (protein for MGC:58573) [Mus musculus]
  misc_feature (44)..(179): Homolog of NCBI NO: 18402939 NR Description: expressed protein; protein id: At3g21260.1,
  misc_feature (44)..(179): Homolog of NCBI NO: 21554671 NR Description: unknown [Arabidopsis thaliana]
  misc_feature (1)..(160): Homolog of NCBI NO: 28571195 NR Description: CG6299-PB [Drosophila melanogaster]

SEQ ID NO: 78768 - DNA, 1374 bp, Arabidopsis thaliana
  misc_feature (1)..(1374): Ceres Seq. ID no. 12645089
  misc_feature: MA Experiment ID: 20000182 Result: Up-regulated in Transcription
  misc_feature: MA Experiment 20000182 PARAMETER Experiment Name: At_2mM_SA_P Parameter: Age (day) Value: 14
  misc_feature: MA Experiment 20000182 PARAMETER Experiment Name: At_2mM_SA_P Parameter: Organism Value: A. thaliana
  misc_feature: MA Experiment 20000182 PARAMETER Experiment Name: At_2mM_SA_P Parameter: Plant Line Value: WS
  misc_feature: MA Experiment 20000182 PARAMETER Experiment Name: At_2mM_SA_P Parameter: Timepoint (hr) Value: 6
  misc_feature: MA Experiment 20000182 PARAMETER Experiment Name: At_2mM_SA_P Parameter: Tissue Value: Aerial
  misc_feature: MA Experiment 20000182 PARAMETER Experiment Name: At_2mM_SA_P Parameter: Treatment Value: 2mM SA vs. No Treatment
  misc_feature: MA Experiment ID: 20000437 Result: Down-regulated in Transcription
  misc_feature: MA Experiment 20000437 PARAMETER Experiment Name: At_Drought_P Parameter: Age (day) Value: 8
  misc_feature: MA Experiment 20000437 PARAMETER Experiment Name: At_Drought_P Parameter: Organism Value: A. thaliana
  misc_feature: MA Experiment 20000437 PARAMETER Experiment Name: At_Drought_P Parameter: Plant Line Value: WS
  misc_feature: MA Experiment 20000437 PARAMETER Experiment Name: At_Drought_P Parameter: Timepoint (hr) Value: 24
  misc_feature: MA Experiment 20000437 PARAMETER Experiment Name: At_Drought_P Parameter: Tissue Value: Whole Plant
  misc_feature: MA Experiment 20000437 PARAMETER Experiment Name: At_Drought_P Parameter: Treatment Value: Drought vs. No Drought
  misc_feature: MA Experiment ID: 20000527 Result: Down-regulated in Transcription
  misc_feature: MA Experiment 20000527 PARAMETER Experiment Name: At_10percent_PEG_P Parameter: Age (day) Value: 20
  misc_feature: MA Experiment 20000527 PARAMETER Experiment Name: At_10percent_PEG_P Parameter: Organism Value: A. thaliana
  misc_feature: MA Experiment 20000527 PARAMETER Experiment Name: At_10percent_PEG_P Parameter: Plant Line Value: WS
  misc_feature: MA Experiment 20000527 PARAMETER Experiment Name: At_10percent_PEG_P Parameter: Timepoint (day) Value: 20
  misc_feature: MA Experiment 20000527 PARAMETER Experiment Name: At_10percent_PEG_P Parameter: Tissue Value: Whole Plant
  misc_feature: MA Experiment 20000527 PARAMETER Experiment Name: At_10percent_PEG_P Parameter: Treatment Value: 10percent PEG vs. No Treatment
  misc_feature: MA Experiment ID: 20001248 Result: Down-regulated in Transcription
  misc_feature: MA Experiment 20001248 PARAMETER Experiment Name: At_Far-red-induction_P Parameter: Age (day) Value: 7
  misc_feature: MA Experiment 20001248 PARAMETER Experiment Name: At_Far-red-induction_P Parameter: Light Value: Far-red vs. White
  misc_feature: MA Experiment 20001248 PARAMETER Experiment Name: At_Far-red-induction_P Parameter: Organism Value: A. thaliana
  misc_feature: MA Experiment 20001248 PARAMETER Experiment Name: At_Far-red-induction_P Parameter: Plant Line Value: Columbia
  misc_feature: MA Experiment 20001248 PARAMETER Experiment Name: At_Far-red-induction_P Parameter: Timepoint (hr) Value: 4
  misc_feature: MA Experiment 20001248 PARAMETER Experiment Name: At_Far-red-induction_P Parameter: Tissue Value: Whole Plant
  misc_feature: MA Experiment ID: 20001559 Result: Down-regulated in Transcription
  misc_feature: MA Experiment 20001559 PARAMETER Experiment Name: At_Drought_Soil_Dry_P Parameter: Age (day) Value: 28
  misc_feature: MA Experiment 20001559 PARAMETER Experiment Name: At_Drought_Soil_Dry_P Parameter: Organism Value: A. thaliana
  misc_feature: MA Experiment 20001559 PARAMETER Experiment Name: At_Drought_Soil_Dry_P Parameter: Plant Line Value: WS
  misc_feature: MA Experiment 20001559 PARAMETER Experiment Name: At_Drought_Soil_Dry_P Parameter: Post Timepoint (hr) Value: 29
  misc_feature: MA Experiment 20001559 PARAMETER Experiment Name: At_Drought_Soil_Dry_P Parameter: Post-Treatment Value: Re-Water vs. No Drought
  misc_feature: MA Experiment 20001559 PARAMETER Experiment Name: At_Drought_Soil_Dry_P Parameter: Timepoint (day) Value: 14
  misc_feature: MA Experiment 20001559 PARAMETER Experiment Name: At_Drought_Soil_Dry_P Parameter: Treatment Value: Drought vs. No Drought
  misc_feature: MA Experiment ID: 20001560 Result: Down-regulated in Transcription
  misc_feature: MA Experiment 20001560 PARAMETER Experiment Name: At_Drought_Soil_Dry_P Parameter: Age (day) Value: 28
  misc_feature: MA Experiment 20001560 PARAMETER Experiment Name: At_Drought_Soil_Dry_P Parameter: Organism Value: A. thaliana
  misc_feature: MA Experiment 20001560 PARAMETER Experiment Name: At_Drought_Soil_Dry_P Parameter: Plant Line Value: WS
  misc_feature: MA Experiment 20001560 PARAMETER Experiment Name: At_Drought_Soil_Dry_P Parameter: Post Timepoint (hr) Value: None
  misc_feature: MA Experiment 20001560 PARAMETER Experiment Name: At_Drought_Soil_Dry_P Parameter: Post-Treatment Value: None
  misc_feature: MA Experiment 20001560 PARAMETER Experiment Name: At_Drought_Soil_Dry_P Parameter: Timepoint (day) Value: 14
  misc_feature: MA Experiment 20001560 PARAMETER Experiment Name: At_Drought_Soil_Dry_P Parameter: Treatment Value: Drought vs. No Drought
  misc_feature: MA Experiment ID: 20001911 Result: Down-regulated in Transcription
  misc_feature: MA Experiment 20001911 PARAMETER Experiment Name: At_Drought_Reproduction_P Parameter: Age (day) Value: 40
  misc_feature: MA Experiment 20001911 PARAMETER Experiment Name: At_Drought_Reproduction_P Parameter: Organism Value: A. thaliana
  misc_feature: MA Experiment 20001911 PARAMETER Experiment Name: At_Drought_Reproduction_P Parameter: Plant Line Value: WS
  misc_feature: MA Experiment 20001911 PARAMETER Experiment Name: At_Drought_Reproduction_P Parameter: Timepoint (day) Value: 10
  misc_feature: MA Experiment 20001911 PARAMETER Experiment Name: At_Drought_Reproduction_P Parameter: Tissue Value: Flowers
  misc_feature: MA Experiment 20001911 PARAMETER Experiment Name: At_Drought_Reproduction_P Parameter: Treatment Value: Drought vs. No Drought
atggcgacttcactaattctgctgcttcaagctctgagtttagtgagctcaactattctgtcccgggccgatcggatcacccgtttacccggtcaaccccgagtcgggtttcagcagtactcaggttatgtcactattgacgagaagaaacagagagctctgttttactacttggctgaagcagaaaccaaacccatctctaaacctctcgttctctggctcaatggaggacctggatgttcatcattaggtgttggtgcattctctgagaatggaccttttagaccaaagggatcaatcttggtgagaaatcaacacagctggaatcaagaggctaatatgttgtatctggagacacctgttggagttggattttcttatgcaaatgagagctcctcttatgagggtgtgaatgataagatcactgcaaaagacaatcttgtgttcttgcaaaaatggttcctcaaattccctcaatatctcaacagaagtctcttcatcactggtgaaagctatgctggccattatgttcctcagttggctcagcttatgattcagtacaacaagaagcacaatttgtttaatctcaaaggcattgctattggcaatccggttatggagtttgcaacggatttcaattcacgagcagagtatttctggtctcacgggttgatatcggatccaacttacaaattgttcacatcttcttgtaattactcgagatttttgagtgagtaccatagaggatcagtgtcgagtatgtgcactaaagtgctaagtcaagttggcatcgaaacaagtagattcatagacaaatatgacgttactcttgacgtctgcattccctctgtgctatctcaatccaaagtagttagccctcaacctcaacaagtgggagagacggtggatgtgtgtctagaagatgagacggtgaactatcttaaccggagagatgtgcaaaaagctctccacgctcggcttgtcggaactcgcaaatggactgtttgcagcgatgtgctggattacgaagtacttgatgtggaagtaccaacgataaatatcgtaggaagtcttgttaaagctggtgttccagtttttgtgtacagtggagatcaagactctgtgattccgttaaccggaagtagaacattagtgaagcgactggctgaagagttgggactaagaacaaccgtgccttatcgagtttggttcgcaggacaacaggttggtgggtggactcaagtttatgggaacacattggcgtttgccactgtgagaggagcagcccacgaggtaccattctcgcagcccgcgagagcgcttgtgttgtttaaagcattcttgggtggtcgtcctctccctgaagaattctaa

SEQ ID NO: 78769 - protein, 457 aa, Arabidopsis thaliana; identical to SEQ ID NO: 50170
  peptide (1)..(457): Ceres Seq. ID no. 12645090
  misc_feature (30)..(450): Pfam Name: Serine carboxypeptidase Pfam Description: Serine carboxypeptidase
  misc_feature (1)..(457): Homolog of NCBI NO: 30685740 NR Description: serine carboxypeptidase -related [Arabidopsis >gi|18377727|gb|AAL67013.1| putative serine carboxypeptidase II
  misc_feature (1)..(457): Homolog of NCBI NO: 25289793 NR Description: probable serine carboxypeptidase II [imported] - thaliana >gi|2459435|gb|AAB80670.1| putative serine
  misc_feature (6)..(457): Homolog of NCBI NO: 18396647 NR Description: serine carboxypeptidase II, putative; protein id: supported by cDNA: gi_16648968 [Arabidopsis thaliana]
  misc_feature (6)..(457): Homolog of NCBI NO: 25289785 NR Description: probable serine carboxypeptidase II [imported] - thaliana >gi|12322985|gb|AAG51475.1|AC069471_6 serine
  misc_feature (24)..(457): Homolog of NCBI NO: 38347156 NR Description: OSJNBa0039C07.2 [Oryza sativa (japonica
  misc_feature (24)..(456): Homolog of NCBI NO: 15218514 NR Description: serine carboxypeptidase II, putative; protein id:
  misc_feature (1)..(454): Homolog of NCBI NO: 15238328 NR Description: serine carboxypeptidase II-like; protein id:
  misc_feature (4)..(456): Homolog of NCBI NO: 15224454 NR Description: putative serine carboxypeptidase II; protein id: [Arabidopsis thaliana] >gi|25289797|pir||D84503 probable serine
  misc_feature (11)..(456): Homolog of NCBI NO: 15238327 NR Description: serine carboxypeptidase-II like; protein id:
  misc_feature (21)..(455): Homolog of NCBI NO: 15232847 NR Description: putative serine carboxypeptidase II; protein id: supported by cDNA: 42069., supported by cDNA: gi_14335061 thaliana] >gi|6513922|gb|AAF14826.1|AC011664_8 putative serine

SEQ ID NO: 78770 - protein, 344 aa, Arabidopsis thaliana
  peptide (1)..(344): Ceres Seq. ID no. 12645091
  misc_feature (1)..(337): Pfam Name: Serine carboxypeptidase Pfam Description: Serine carboxypeptidase
  misc_feature (1)..(344): Homolog of NCBI NO: 30685740 NR Description: serine carboxypeptidase -related [Arabidopsis >gi|18377727|gb|AAL67013.1| putative serine carboxypeptidase II
  misc_feature (1)..(344): Homolog of NCBI NO: 25289793 NR Description: probable serine carboxypeptidase II [imported] - thaliana >gi|2459435|gb|AAB80670.1| putative serine
  misc_feature (1)..(344): Homolog of NCBI NO: 18396647 NR Description: serine carboxypeptidase II, putative; protein id: supported by cDNA: gi_16648968 [Arabidopsis thaliana]
  misc_feature (1)..(344): Homolog of NCBI NO: 25289785 NR Description: probable serine carboxypeptidase II [imported] - thaliana >gi|12322985|gb|AAG51475.1|AC069471_6 serine
  misc_feature (1)..(344): Homolog of NCBI NO: 38347156 NR Description: OSJNBa0039C07.2 [Oryza sativa (japonica
  misc_feature (1)..(343): Homolog of NCBI NO: 15218514 NR Description: serine carboxypeptidase II, putative; protein id:
  misc_feature (1)..(341): Homolog of NCBI NO: 15238328 NR Description: serine carboxypeptidase II-like; protein id:
  misc_feature (1)..(343): Homolog of NCBI NO: 15224454 NR Description: putative serine carboxypeptidase II; protein id: [Arabidopsis thaliana] >gi|25289797|pir||D84503 probable serine
  misc_feature (1)..(343): Homolog of NCBI NO: 15238327 NR Description: serine carboxypeptidase-II like; protein id:
  misc_feature (1)..(342): Homolog of NCBI NO: 15232847 NR Description: putative serine carboxypeptidase II; protein id: supported by cDNA: 42069., supported by cDNA: gi_14335061 thaliana] >gi|6513922|gb|AAF14826.1|AC011664_8 putative serine
MLYLETPVGVGFSYANESSSYEGVNDKITAKDNLVFLQKWFLKFPQYLNRSLFITGESYAGHYVPQLAQLMIQYNKKHNLFNLKGIAIGNPVMEFATDFNSRAEYFWSHGLISDPTYKLFTSSCNYSRFLSEYHRGSVSSMCTKVLSQVGIETSRFIDKYDVTLDVCIPSVLSQSKVVSPQPQQVGETVDVCLEDETVNYLNRRDVQKALHARLVGTRKWTVCSDVLDYEVLDVEVPTINIVGSLVKAGVPVFVYSGDQDSVIPLTGSRTLVKRLAEELGLRTTVPYRVWFAGQQVGGWTQVYGNTLAFATVRGAAHEVPFSQPARALVLFKAFLGGRPLPEEF

SEQ ID NO: 78771 - protein, 274 aa, Arabidopsis thaliana
  peptide (1)..(274): Ceres Seq. ID no. 12645092
  misc_feature (1)..(267): Pfam Name: Serine carboxypeptidase Pfam Description: Serine carboxypeptidase
  misc_feature (1)..(274): Homolog of NCBI NO: 30685740 NR Description: serine carboxypeptidase -related [Arabidopsis >gi|18377727|gb|AAL67013.1| putative serine carboxypeptidase II
  misc_feature (1)..(274): Homolog of NCBI NO: 25289793 NR Description: probable serine carboxypeptidase II [imported] - thaliana >gi|2459435|gb|AAB80670.1| putative serine
  misc_feature (1)..(274): Homolog of NCBI NO: 18396647 NR Description: serine carboxypeptidase II, putative; protein id: supported by cDNA: gi_16648968 [Arabidopsis thaliana]
  misc_feature (1)..(274): Homolog of NCBI NO: 25289785 NR Description: probable serine carboxypeptidase II [imported] - thaliana >gi|12322985|gb|AAG51475.1|AC069471_6 serine
  misc_feature (1)..(274): Homolog of NCBI NO: 38347156 NR Description: OSJNBa0039C07.2 [Oryza sativa (japonica
  misc_feature (1)..(273): Homolog of NCBI NO: 15218514 NR Description: serine carboxypeptidase II, putative; protein id:
  misc_feature (1)..(271): Homolog of NCBI NO: 15238328 NR Description: serine carboxypeptidase II-like; protein id:
  misc_feature (1)..(273): Homolog of NCBI NO: 15224454 NR Description: putative serine carboxypeptidase II; protein id: [Arabidopsis thaliana] >gi|25289797|pir||D84503 probable serine
  misc_feature (1)..(273): Homolog of NCBI NO: 15238327 NR Description: serine carboxypeptidase-II like; protein id:
  misc_feature (1)..(272): Homolog of NCBI NO: 15232847 NR Description: putative serine carboxypeptidase II; protein id: supported by cDNA: 42069., supported by cDNA: gi_14335061 thaliana] >gi|6513922|gb|AAF14826.1|AC011664_8 putative serine
MIQYNKKHNLFNLKGIAIGNPVMEFATDFNSRAEYFWSHGLISDPTYKLFTSSCNYSRFLSEYHRGSVSSMCTKVLSQVGIETSRFIDKYDVTLDVCIPSVLSQSKVVSPQPQQVGETVDVCLEDETVNYLNRRDVQKALHARLVGTRKWTVCSDVLDYEVLDVEVPTINIVGSLVKAGVPVFVYSGDQDSVIPLTGSRTLVKRLAEELGLRTTVPYRVWFAGQQVGGWTQVYGNTLAFATVRGAAHEVPFSQPARALVLFKAFLGGRPLPEEF

SEQ ID NO: 78772 - DNA, 2331 bp, Arabidopsis thaliana
  misc_feature (1)..(2331): Ceres Seq. ID no. 12645105
  misc_feature: MA Experiment ID: 20000307 Result: Down-regulated in Transcription
  misc_feature: MA Experiment 20000307 PARAMETER Experiment Name: At_Germinating_Seeds_Sub_P Parameter: Age (hr) Value: 24 vs. 0
  misc_feature: MA Experiment 20000307 PARAMETER Experiment Name: At_Germinating_Seeds_Sub_P Parameter: Organism Value: A. thaliana
  misc_feature: MA Experiment 20000307 PARAMETER Experiment Name: At_Germinating_Seeds_Sub_P Parameter: Plant Line Value: WS
  misc_feature: MA Experiment 20000307 PARAMETER Experiment Name: At_Germinating_Seeds_Sub_P Parameter: Tissue Value: Germinating Seeds
  misc_feature: MA Experiment ID: 20000328 Result: Down-regulated in Transcription
  misc_feature: MA Experiment 20000328 PARAMETER Experiment Name: At_42deg_Heat_Sub_P Parameter: Age (day) Value: 14
  misc_feature: MA Experiment 20000328 PARAMETER Experiment Name: At_42deg_Heat_Sub_P Parameter: Organism Value: A. thaliana
  misc_feature: MA Experiment 20000328 PARAMETER Experiment Name: At_42deg_Heat_Sub_P Parameter: Plant Line Value: WS
  misc_feature: MA Experiment 20000328 PARAMETER Experiment Name: At_42deg_Heat_Sub_P Parameter: Temperature (deg C) Value: 42 vs. 22
  misc_feature: MA Experiment 20000328 PARAMETER Experiment Name: At_42deg_Heat_Sub_P Parameter: Timepoint (hr) Value: 6
  misc_feature: MA Experiment 20000328 PARAMETER Experiment Name: At_42deg_Heat_Sub_P Parameter: Tissue Value: Aerial
atgaagaaggaagaatttcaaagtagactatgggattcatggggatcaataaagaagaaacttgagaaagatatttacggagttggaagtattggccttttcactgatttagacagagagagtttagcgattagacagaaacctgggttggaagaacactctgttctagataaatcgagaacaacgactcaggacaaacaatgttctataccaatgcatccaagtacctttcaaacagaactcaacccgcatacttccacgttattaaaaaaactgactcatcattcacagcaaaggaacctcgtggctggacgtgcagttcatggacagatcatcagaacgggagcatcaacctgcatccaacatgccaatgtccttgtcaacttttatgcaaaatgtggaaaattggccaaagcccactccatctttaacgccataatctgcaaggatgttgtgtcctggaacagtctcatcactggctattctcagaacggcggtatctccagctcctacactgttatgcagctgtttcgtgagatgagagcgcaagatatactgccaaatgcttatacccttgctgggatttttaaggccgagtcgagtcttcaaagttctacagttgggaggcaggctcacgcgctagtggtcaaaatgtcaagttttggggatatatatgttgatacttcgttggtgggcatgtactgtaaagcgggcttggtcgaggatggacttaaagtgttcgcctatatgcctgaaagaaatacttatacatggtctactatggtttctggttatgctacaagaggacgcgttgaagaggcaattaaagtcttcaatttgtttcttagagagaaggaggaaggaagtgatagtgactatgtcttcaccgcggttctcagctcgctggctgcaaccatatacgtaggactaggcaggcaaatccattgcatcacaattaaaaatgggttgcttgggtttgtagctttgagtaatgcgcttgttacaatgtattcaaagtgtgagagcttgaatgaggcatgcaagatgtttgactcgtctggtgacagaaattcgattacatggtcagcaatggtcactggttattctcagaatggggaatcacttgaagcagtaaagcttttctctagaatgttttctgctggaatcaagcccagtgaatacacgattgttggggttcttaatgcatgcagtgacatttgctatctagaagaagggaagcaacttcattctttcttgttaaagttgggatttgaaagacatttatttgcaactactgctttggttgacatgtatgcaaaagccggttgtctagcagatgccagaaaaggttttgactgcctacaagaacgtgatgtggcgctttggacatcgcttattagcgggtatgttcaaaactcagataacgaagaggctttgattctgtaccgcagaatgaaaacagcaggtattatcccaaacgacccaaccatggcaagtgttctaaaagcttgctcttctctagctaccttggagctcggaaagcaagtacacggccacacaatcaagcatgggtttgggcttgaagttccaataggaagcgcactttctacaatgtactcaaagtgtgggagtttagaagatgggaacctcgtctttagaagaactcccaataaagatgttgtgtcttggaacgctatgatctcaggcttgtcccataatggacaaggagatgaggctttggaactgtttgaggagatgttagcagaaggaatggaaccagatgatgtcactttcgtgaacattatatcagcgtgtagccacaaaggttttgtagagagaggctggttttatttcaatatgatgtcagatcagatcgggcttgatccaaaagttgaccactatgcttgtatggttgatctgctgagccgtgcaggacagctcaaagaggcaaaagagttcatcgaatcagctaatattgatcacggtttatgcctttggcggatactattaagcgcatgtaagaaccatgggaaatgtgagctaggagtttacgcaggagagaagctcatggcccttggatcgagagaatcatcaacttatgtgcaattgtcaggcatttacacggctttagggcggatgagagatgtggaacgggtttggaaacacatgagagcaaacggggtgagcaaagaagtgggttgcagttggatcgagctgaagaatcagtaccatgtttttgttgtgggagatacaatgcatccgatgattgaagagacgaaggatttggtttgtttggttttaattttaggtgtgaaaatgtatcacaaatag

SEQ ID NO: 78773 - protein, 776 aa, Arabidopsis thaliana
  peptide (1)..(776): Ceres Seq. ID no. 12645106
  misc_feature (596)..(629): Pfam Name: PPR repeat Pfam Description: PPR repeat
  misc_feature (104)..(757): Homolog of NCBI NO: 34914806 NR Description: B1045D11.13 [Oryza sativa (japonica
  misc_feature (83)..(757): Homolog of NCBI NO: 38423978 NR Description: PPR-repeat protein-like [Oryza sativa (japonica
  misc_feature (331)..(758): Homolog of NCBI NO: 15237421 NR Description: putative protein; protein id: At5g16860.1
  misc_feature (105)..(390): Homolog of NCBI NO: 15237421 NR Description: putative protein; protein id: At5g16860.1
  misc_feature (111)..(771): Homolog of NCBI NO: 15235115 NR Description: putative protein; protein id: At4g39530.1
  misc_feature (80)..(757): Homolog of NCBI NO: 15234006 NR Description: putative protein; protein id: At4g18750.1
  misc_feature (86)..(756): Homolog of NCBI NO: 15232006 NR Description: hypothetical protein; protein id: At3g09040.1 thaliana] >gi|5923669|gb|AAD56320.1|AC009326_7 hypothetical
  misc_feature (67)..(763): Homolog of NCBI NO: 37536800 NR Description: putative PPR-repeat protein [Oryza sativa
  misc_feature (104)..(758): Homolog of NCBI NO: 15226200 NR Description: putative selenium-binding protein; protein id:
  misc_feature (94)..(772): Homolog of NCBI NO: 34906110 NR Description: P0020E09.15 [Oryza sativa (japonica
MKKEEFQSRLWDSWGSIKKKLEKDIYGVGSIGLFTDLDRESLAIRQKPGLEEHSVLDKSRTTTQDKQCSIPMHPSTFQTELNPHTSTLLKKLTHHSQQRNLVAGRAVHGQIIRTGASTCIQHANVLVNFYAKCGKLAKAHSIFNAIICKDVVSWNSLITGYSQNGGISSSYTVMQLFREMRAQDILPNAYTLAGIFKAESSLQSSTVGRQAHALVVKMSSFGDIYVDTSLVGMYCKAGLVEDGLKVFAYMPERNTYTWSTMVSGYATRGRVEEAIKVFNLFLREKEEGSDSDYVFTAVLSSLAATIYVGLGRQIHCITIKNGLLGFVALSNALVTMYSKCESLNEACKMFDSSGDRNSITWSAMVTGYSQNGESLEAVKLFSRMFSAGIKPSEYTIVGVLNACSDICYLEEGKQLHSFLLKLGFERHLFATTALVDMYAKAGCLADARKGFDCLQERDVALWTSLISGYVQNSDNEEALILYRRMKTAGIIPNDPTMASVLKACSSLATLELGKQVHGHTIKHGFGLEVPIGSALSTMYSKCGSLEDGNLVFRRTPNKDVVSWNAMISGLSHNGQGDEALELFEEMLAEGMEPDDVTFVNIISACSHKGFVERGWFYFNMMSDQIGLDPKVDHYACMVDLLSRAGQLKEAKEFIESANIDHGLCLWRILLSACKNHGKCELGVYAGEKLMALGSRESSTYVQLSGIYTALGRMRDVERVWKHMRANGVSKEVGCSWIELKNQYHVFVVGDTMHPMIEETKDLVCLVLILGVKMYHK

SEQ ID NO: 78774 - protein, 705 aa, Arabidopsis thaliana
  peptide (1)..(705): Ceres Seq. ID no. 12645107
  misc_feature (525)..(558): Pfam Name: PPR repeat Pfam Description: PPR repeat
  misc_feature (33)..(686): Homolog of NCBI NO: 34914806 NR Description: B1045D11.13 [Oryza sativa (japonica
  misc_feature (12)..(686): Homolog of NCBI NO: 38423978 NR Description: PPR-repeat protein-like [Oryza sativa (japonica
  misc_feature (260)..(687): Homolog of NCBI NO: 15237421 NR Description: putative protein; protein id: At5g16860.1
  misc_feature (34)..(319): Homolog of NCBI NO: 15237421 NR Description: putative protein; protein id: At5g16860.1
  misc_feature (40)..(700): Homolog of NCBI NO: 15235115 NR Description: putative protein; protein id: At4g39530.1
  misc_feature (9)..(686): Homolog of NCBI NO: 15234006 NR Description: putative protein; protein id: At4g18750.1
  misc_feature (15)..(685): Homolog of NCBI NO: 15232006 NR Description: hypothetical protein; protein id: At3g09040.1 thaliana] >gi|5923669|gb|AAD56320.1|AC009326_7 hypothetical
  misc_feature (1)..(692): Homolog of NCBI NO: 37536800 NR Description: putative PPR-repeat protein [Oryza sativa
  misc_feature (33)..(687): Homolog of NCBI NO: 15226200 NR Description: putative selenium-binding protein; protein id:
  misc_feature (23)..(701): Homolog of NCBI NO: 34906110 NR Description: P0020E09.15 [Oryza sativa (japonica
MHPSTFQTELNPHTSTLLKKLTHHSQQRNLVAGRAVHGQIIRTGASTCIQHANVLVNFYAKCGKLAKAHSIFNAIICKDVVSWNSLITGYSQNGGISSSYTVMQLFREMRAQDILPNAYTLAGIFKAESSLQSSTVGRQAHALVVKMSSFGDIYVDTSLVGMYCKAGLVEDGLKVFAYMPERNTYTWSTMVSGYATRGRVEEAIKVFNLFLREKEEGSDSDYVFTAVLSSLAATIYVGLGRQIHCITIKNGLLGFVALSNALVTMYSKCESLNEACKMFDSSGDRNSITWSAMVTGYSQNGESLEAVKLFSRMFSAGIKPSEYTIVGVLNACSDICYLEEGKQLHSFLLKLGFERHLFATTALVDMYAKAGCLADARKGFDCLQERDVALWTSLISGYVQNSDNEEALILYRRMKTAGIIPNDPTMASVLKACSSLATLELGKQVHGHTIKHGFGLEVPIGSALSTMYSKCGSLEDGNLVFRRTPNKDVVSWNAMISGLSHNGQGDEALELFEEMLAEGMEPDDVTFVNIISACSHKGFVERGWFYFNMMSDQIGLDPKVDHYACMVDLLSRAGQLKEAKEFIESANIDHGLCLWRILLSACKNHGKCELGVYAGEKLMALGSRESSTYVQLSGIYTALGRMRDVERVWKHMRANGVSKEVGCSWIELKNQYHVFVVGDTMHPMIEETKDLVCLVLILGVKMYHK

SEQ ID NO: 78775 - protein, 603 aa, Arabidopsis thaliana
  peptide (1)..(603): Ceres Seq. ID no. 12645108
  misc_feature (423)..(456): Pfam Name: PPR repeat Pfam Description: PPR repeat
  misc_feature (1)..(584): Homolog of NCBI NO: 34914806 NR Description: B1045D11.13 [Oryza sativa (japonica
  misc_feature (1)..(584): Homolog of NCBI NO: 38423978 NR Description: PPR-repeat protein-like [Oryza sativa (japonica
  misc_feature (158)..(585): Homolog of NCBI NO: 15237421 NR Description: putative protein; protein id: At5g16860.1
  misc_feature (1)..(217): Homolog of NCBI NO: 15237421 NR Description: putative protein; protein id: At5g16860.1
  misc_feature (1)..(598): Homolog of NCBI NO: 15235115 NR Description: putative protein; protein id: At4g39530.1
  misc_feature (1)..(584): Homolog of NCBI NO: 15234006 NR Description: putative protein; protein id: At4g18750.1
  misc_feature (1)..(583): Homolog of NCBI NO: 15232006 NR Description: hypothetical protein; protein id: At3g09040.1 thaliana] >gi|5923669|gb|AAD56320.1|AC009326_7 hypothetical
  misc_feature (1)..(590): Homolog of NCBI NO: 37536800 NR Description: putative PPR-repeat protein [Oryza sativa
  misc_feature (1)..(585): Homolog of NCBI NO: 15226200 NR Description: putative selenium-binding protein; protein id:
  misc_feature (1)..(599): Homolog of NCBI NO: 34906110 NR Description: P0020E09.15 [Oryza sativa (japonica
MQLFREMRAQDILPNAYTLAGIFKAESSLQSSTVGRQAHALVVKMSSFGDIYVDTSLVGMYCKAGLVEDGLKVFAYMPERNTYTWSTMVSGYATRGRVEEAIKVFNLFLREKEEGSDSDYVFTAVLSSLAATIYVGLGRQIHCITIKNGLLGFVALSNALVTMYSKCESLNEACKMFDSSGDRNSITWSAMVTGYSQNGESLEAVKLFSRMFSAGIKPSEYTIVGVLNACSDICYLEEGKQLHSFLLKLGFERHLFATTALVDMYAKAGCLADARKGFDCLQERDVALWTSLISGYVQNSDNEEALILYRRMKTAGIIPNDPTMASVLKACSSLATLELGKQVHGHTIKHGFGLEVPIGSALSTMYSKCGSLEDGNLVFRRTPNKDVVSWNAMISGLSHNGQGDEALELFEEMLAEGMEPDDVTFVNIISACSHKGFVERGWFYFNMMSDQIGLDPKVDHYACMVDLLSRAGQLKEAKEFIESANIDHGLCLWRILLSACKNHGKCELGVYAGEKLMALGSRESSTYVQLSGIYTALGRMRDVERVWKHMRANGVSKEVGCSWIELKNQYHVFVVGDTMHPMIEETKDLVCLVLILGVKMYHK

SEQ ID NO: 78776 - DNA, 1167 bp, Arabidopsis thaliana
  misc_feature (1)..(1167): Ceres Seq. ID no. 12645124
  misc_feature: MA Experiment ID: 20001451 Result: Up-regulated in Transcription
  misc_feature: MA Experiment 20001451 PARAMETER Experiment Name: At_Far-red-induction_P Parameter: Age (day) Value: 7
  misc_feature: MA Experiment 20001451 PARAMETER Experiment Name: At_Far-red-induction_P Parameter: Light Value: Far-red vs. White
  misc_feature: MA Experiment 20001451 PARAMETER Experiment Name: At_Far-red-induction_P Parameter: Organism Value: A. thaliana
  misc_feature: MA Experiment 20001451 PARAMETER Experiment Name: At_Far-red-induction_P Parameter: Plant Line Value: Columbia
  misc_feature: MA Experiment 20001451 PARAMETER Experiment Name: At_Far-red-induction_P Parameter: Timepoint (hr) Value: 24
  misc_feature: MA Experiment 20001451 PARAMETER Experiment Name: At_Far-red-induction_P Parameter: Tissue Value: Whole Plant
atggcttcttcgaatagacactggccaagcatgttcaagtccaaacctcatccccatcaatggcaacatgacatcaactctcctctcttgccttctgcttctcaccgatcttctcctttctcttcaggatgtgaagtggagaggagtccagagccaaaaccaagatggaatccaaagccagagcagattcggatacttgaagcaatctttaactccgggatggtgaatcctccaagagaggagatcaggaggattagggctcagcttcaagaatacggccaagtcggtgatgctaacgtcttctactggttccaaaaccgtaagtcccgtagtaaacacaaactccgcctcctccacaaccactccaaacactctctccctcaaacgcaaccgcagccgcagccgcaaccttcggcttcctcttcctcttcctcctcctcttcctcctccaaatccaccaaaccccgaaaaagcaagaacaagaacaacactaatctctctttgggtggtagtcaaatgatggggatgtttccaccggaaccggcgtttctcttcccggtctccactgtcggagggtttgaaggtatcaccgtctcatcccaattagggtttctctccggtgatatgattgagcaacaaaaaccggctccaacgtgtaccggactcctgctgagtgagatcatgaacggtagtgtgagttatggaactcatcatcaacaacacttgagtgagaaagaagttgaagaaatgaggatgaagatgttgcaacagccacagactcagatttgttacgctaccactaatcatcaaatagcttcttacaacaacaacaacaacaacaataacatcatgcttcatattcctcccactacttctactgccaccactattactacttcgcattctctcgctactgtcccatcaacttcggaccagcttcaagttcaagcggacgcacgaataagagttttcatcaatgaaatggagcttgaagtgagctcaggaccgttcaatgtgagggatgcatttggggaagaggttgttctgattaattccgcgggtcagcccattgtcaccgatgaatatggcgtcgctcttcaccctcttcaacacggagcctcgtactatctggttttgtttcctctctattttcctttgttatactaa

SEQ ID NO: 78777 - protein, 388 aa, Arabidopsis thaliana
  peptide (1)..(388): Ceres Seq. ID no. 12645125
  misc_feature (52)..(115): Pfam Name: Homeobox domain Pfam Description: Homeobox domain
  misc_feature (1)..(378): Homolog of NCBI NO: 30685885 NR Description: homeodomain transcription factor -related
  misc_feature (1)..(321): Homolog of NCBI NO: 25408317 NR Description: probable homeodomain transcription factor - Arabidopsis thaliana >gi|2253582|gb|AAC69146.1| putative
  misc_feature (74)..(378): Homolog of NCBI NO: 26452030 NR Description: putative homeodomain transcription factor thaliana] >gi|28950873|gb|AAO63360.1| At2g33880 [Arabidopsis
  misc_feature (1)..(125): Homolog of NCBI NO: 37955180 NR Description: WOX8 protein [Arabidopsis thaliana]
  misc_feature (320)..(378): Homolog of NCBI NO: 37955180 NR Description: WOX8 protein [Arabidopsis thaliana]
  misc_feature (1)..(125): Homolog of NCBI NO: 15237353 NR Description: homeodomain protein; protein id: At5g45980.1 thaliana] >gi|9757718|dbj|BAB08243.1| contains similarity to
  misc_feature (1)..(116): Homolog of NCBI NO: 34910936 NR Description: OSJNBb0063G05.13 [Oryza sativa (japonica
  misc_feature (27)..(148): Homolog of NCBI NO: 37955223 NR Description: WOX11 protein [Arabidopsis thaliana]
  misc_feature (300)..(378): Homolog of NCBI NO: 37955223 NR Description: WOX11 protein [Arabidopsis thaliana]
  misc_feature (33)..(127): Homolog of NCBI NO: 40253638 NR Description: putative homeodomain protein [Oryza sativa
MASSNRHWPSMFKSKPHPHQWQHDINSPLLPSASHRSSPFSSGCEVERSPEPKPRWNPKPEQIRILEAIFNSGMVNPPREEIRRIRAQLQEYGQVGDANVFYWFQNRKSRSKHKLRLLHNHSKHSLPQTQPQPQPQPSASSSSSSSSSSSKSTKPRKSKNKNNTNLSLGGSQMMGMFPPEPAFLFPVSTVGGFEGITVSSQLGFLSGDMIEQQKPAPTCTGLLLSEIMNGSVSYGTHHQQHLSEKEVEEMRMKMLQQPQTQICYATTNHQIASYNNNNNNNNIMLHIPPTTSTATTITTSHSLATVPSTSDQLQVQADARIRVFINEMELEVSSGPFNVRDAFGEEVVLINSAGQPIVTDEYGVALHPLQHGASYYLVLFPLYFPLLY

SEQ ID NO: 78778 - protein, 378 aa, Arabidopsis thaliana
  peptide (1)..(378): Ceres Seq. ID no. 12645126
  misc_feature (42)..(105): Pfam Name: Homeobox domain Pfam Description: Homeobox domain
  misc_feature (1)..(368): Homolog of NCBI NO: 30685885 NR Description: homeodomain transcription factor -related
  misc_feature (1)..(311): Homolog of NCBI NO: 25408317 NR Description: probable homeodomain transcription factor - Arabidopsis thaliana >gi|2253582|gb|AAC69146.1| putative
  misc_feature (64)..(368): Homolog of NCBI NO: 26452030 NR Description: putative homeodomain transcription factor thaliana] >gi|28950873|gb|AAO63360.1| At2g33880 [Arabidopsis
  misc_feature (1)..(115): Homolog of NCBI NO: 37955180 NR Description: WOX8 protein [Arabidopsis thaliana]
  misc_feature (310)..(368): Homolog of NCBI NO: 37955180 NR Description: WOX8 protein [Arabidopsis thaliana]
  misc_feature (1)..(115): Homolog of NCBI NO: 15237353 NR Description: homeodomain protein; protein id: At5g45980.1 thaliana] >gi|9757718|dbj|BAB08243.1| contains similarity to
  misc_feature (1)..(106): Homolog of NCBI NO: 34910936 NR Description: OSJNBb0063G05.13 [Oryza sativa (japonica
  misc_feature (17)..(138): Homolog of NCBI NO: 37955223 NR Description: WOX11 protein [Arabidopsis thaliana]
  misc_feature (290)..(368): Homolog of NCBI NO: 37955223 NR Description: WOX11 protein [Arabidopsis thaliana]
  misc_feature (23)..(117): Homolog of NCBI NO: 40253638 NR Description: putative homeodomain protein [Oryza sativa
MFKSKPHPHQWQHDINSPLLPSASHRSSPFSSGCEVERSPEPKPRWNPKPEQIRILEAIFNSGMVNPPREEIRRIRAQLQEYGQVGDANVFYWFQNRKSRSKHKLRLLHNHSKHSLPQTQPQPQPQPSASSSSSSSSSSSKSTKPRKSKNKNNTNLSLGGSQMMGMFPPEPAFLFPVSTVGGFEGITVSSQLGFLSGDMIEQQKPAPTCTGLLLSEIMNGSVSYGTHHQQHLSEKEVEEMRMKMLQQPQTQICYATTNHQIASYNNNNNNNNIMLHIPPTTSTATTITTSHSLATVPSTSDQLQVQADARIRVFINEMELEVSSGPFNVRDAFGEEVVLINSAGQPIVTDEYGVALHPLQHGASYYLVLFPLYFPLLY

SEQ ID NO: 78779 - protein, 315 aa, Arabidopsis thaliana
  peptide (1)..(315): Ceres Seq. ID no. 12645127
  misc_feature (1)..(305): Homolog of NCBI NO: 30685885 NR Description: homeodomain transcription factor -related
  misc_feature (1)..(248): Homolog of NCBI NO: 25408317 NR Description: probable homeodomain transcription factor - Arabidopsis thaliana >gi|2253582|gb|AAC69146.1| putative
  misc_feature (1)..(305): Homolog of NCBI NO: 26452030 NR Description: putative homeodomain transcription factor thaliana] >gi|28950873|gb|AAO63360.1| At2g33880 [Arabidopsis
  misc_feature (1)..(52): Homolog of NCBI NO: 37955180 NR Description: WOX8 protein [Arabidopsis thaliana]
  misc_feature (247)..(305): Homolog of NCBI NO: 37955180 NR Description: WOX8 protein [Arabidopsis thaliana]
  misc_feature (1)..(52): Homolog of NCBI NO: 15237353 NR Description: homeodomain protein; protein id: At5g45980.1 thaliana] >gi|9757718|dbj|BAB08243.1| contains similarity to
  misc_feature (1)..(43): Homolog of NCBI NO: 34910936 NR Description: OSJNBb0063G05.13 [Oryza sativa (japonica
  misc_feature (1)..(75): Homolog of NCBI NO: 37955223 NR Description: WOX11 protein [Arabidopsis thaliana]
  misc_feature (227)..(305): Homolog of NCBI NO: 37955223 NR Description: WOX11 protein [Arabidopsis thaliana]
  misc_feature (1)..(54): Homolog of NCBI NO: 40253638 NR Description: putative homeodomain protein [Oryza sativa
MVNPPREEIRRIRAQLQEYGQVGDANVFYWFQNRKSRSKHKLRLLHNHSKHSLPQTQPQPQPQPSASSSSSSSSSSSKSTKPRKSKNKNNTNLSLGGSQMMGMFPPEPAFLFPVSTVGGFEGITVSSQLGFLSGDMIEQQKPAPTCTGLLLSEIMNGSVSYGTHHQQHLSEKEVEEMRMKMLQQPQTQICYATTNHQIASYNNNNNNNNIMLHIPPTTSTATTITTSHSLATVPSTSDQLQVQADARIRVFINEMELEVSSGPFNVRDAFGEEVVLINSAGQPIVTDEYGVALHPLQHGASYYLVLFPLYFPLLY

SEQ ID NO: 78780 - DNA, 1701 bp, Arabidopsis thaliana
  misc_feature (1)..(1701): Ceres Seq. ID no. 12645128
  misc_feature: MA Experiment ID: 20000307 Result: Up-regulated in Transcription
  misc_feature: MA Experiment 20000307 PARAMETER Experiment Name: At_Germinating_Seeds_Sub_P Parameter: Age (hr) Value: 24 vs. 0
  misc_feature: MA Experiment 20000307 PARAMETER Experiment Name: At_Germinating_Seeds_Sub_P Parameter: Organism Value: A. thaliana
  misc_feature: MA Experiment 20000307 PARAMETER Experiment Name: At_Germinating_Seeds_Sub_P Parameter: Plant Line Value: WS
  misc_feature: MA Experiment 20000307 PARAMETER Experiment Name: At_Germinating_Seeds_Sub_P Parameter: Tissue Value: Germinating Seeds
  misc_feature: MA Experiment ID: 20000314 Result: Up-regulated in Transcription
  misc_feature: MA Experiment 20000314 PARAMETER Experiment Name: At_14day_Shoots-Roots_Sub_P Parameter: Age (day) Value: 14
  misc_feature: MA Experiment 20000314 PARAMETER Experiment Name: At_14day_Shoots-Roots_Sub_P Parameter: Organism Value: A. thaliana
  misc_feature: MA Experiment 20000314 PARAMETER Experiment Name: At_14day_Shoots-Roots_Sub_P Parameter: Plant Line Value: WS
  misc_feature: MA Experiment 20000314 PARAMETER Experiment Name: At_14day_Shoots-Roots_Sub_P Parameter: Tissue Value: Roots vs. Whole Plant
atggcaggtgttactctcttcttctcccttctctctatagctctgattatctctggtgtgagctctcgtgtcctgatcagtcatgtccctctgaataactcgatcttgatatctgatgggatccatgacgccttgaatcacgagtttctcaccctcgatcctccaaagagcttgtcaaggaccgcgtgtgttcatgtctacgggtttcttccatgtgcagacaatgttgaaggttatatcttccaagttttttcctttgggagtctcttgattatcggtgactatttcttgtccgaaggaagatctaaactctttgtaatattcgaggtcgggttctatggtggtatcatcttccctcttcttacaatgttcccaagaatcgctcttatgctctcgaccggactatcattgagtagggatgttgctagctcctttatagatgataacgttggacttactgtgggacacactgtgttttctctcacaattcaatggggagcttgtgttgtgtttagcatcactggtccacgttctgaccaagcagatggattgatcgaaaaactaaagatattgaaaggctttgttgaagcaagagtagaagcggatcctaagaataagaaagctgcagggattatgctgttgagtctatctccctttctcatggtgacattttcggctatatttgattcacattcttggagtcacatcattgtgttgatcacactcataatttcttcttcttcaaccgttgtctactttgtttactcgtatcttgatacggctaaccaagagaagagcttagatcacgcgaggtttgagctcatgtcagaagttcataagcacttaaagaggttttcaccgaaacaccttataaaagatggagaactaagcaaagagagcttgaaaagtttgttcaagaaaactgataagaacaaagatgggaagatacaaatatctgaactaaaagacttaaccatagagctttccaactttgggagaatgagatatgacatcaatgagcttgctaaagcttttcttgaggattttgatggagacaacgacggcgaattagaagagaatgaattcgaggaagggattgcgagacttctcaaacaatacaaattcaacgttgaggatcaaagagagaatcagactgaggaaaatggagttcttaagctggaaattaaaccgaagaaaacacttgttactaagttgctatctatggaaacattaatagctacgactgaagtcatcgtagggatcctaattgtactctttcttgcaaaaccatttatgctgaacatccagctcttatccatctcagctggaattccttctttctacatcgtgttcgcgatgatccctttcgctagaaacttaaagaacactctatctacacgcttctgtcgtggcaaagacaagaaaagagtctcgtccaatactttctccgagatctacaaagatattacaatgaacaatctcttgggaatgtcggtaatattggcaattgtgtatacaaggggcttgacttggaaatactcggtagaaactcttattatggtgatcgttggcctcataatcggcttaccaatctatataagatcgacttacccgttctggatgtgtgtcttggcctttgctatgtacttcttttctcttctccttatctatatccgtttaaattttctagacaagaactaa

SEQ ID NO: 78781 - protein, 566 aa, Arabidopsis thaliana
  peptide (1)..(566): Ceres Seq. ID no. 12645129
  misc_feature (423)..(556): Pfam Name: Sodium/calcium exchanger protein Pfam Description: Sodium/calcium exchanger protein
  misc_feature (233)..(492): Homolog of NCBI NO: 15226193 NR Description: unknown protein; protein id: At2g34030.1
  misc_feature (1)..(181): Homolog of NCBI NO: 15226193 NR Description: unknown protein; protein id: At2g34030.1
  misc_feature (5)..(561): Homolog of NCBI NO: 26449859 NR Description: unknown protein [Arabidopsis thaliana]
  misc_feature (1)..(529): Homolog of NCBI NO: 15218787 NR Description: unknown protein; protein id: At1g29020.1 thaliana] >gi|10764849|gb|AAF24539.2|AC007508_2 F1K23.2
  misc_feature (237)..(565): Homolog of NCBI NO: 15218787 NR Description: unknown protein; protein id: At1g29020.1 thaliana] >gi|10764849|gb|AAF24539.2|AC007508_2 F1K23.2
  misc_feature (11)..(229): Homolog of NCBI NO: 15218787 NR Description: unknown protein; protein id: At1g29020.1 thaliana] >gi|10764849|gb|AAF24539.2|AC007508_2 F1K23.2
  misc_feature (256)..(485): Homolog of NCBI NO: 15226191 NR Description: unknown protein; protein id: At2g34020.1
  misc_feature (5)..(179): Homolog of NCBI NO: 15226191 NR Description: unknown protein; protein id: At2g34020.1
  misc_feature (7)..(558): Homolog of NCBI NO: 25405975 NR Description: protein F12M16.12 [imported] - Arabidopsis >gi|7769854|gb|AAF69532.1|AC008007_7 F12M16.12 [Arabidopsis
  misc_feature (6)..(558): Homolog of NCBI NO: 30695448 NR Description: expressed protein [Arabidopsis thaliana]
MAGVTLFFSLLSIALIISGVSSRVLISHVPLNNSILISDGIHDALNHEFLTLDPPKSLSRTACVHVYGFLPCADNVEGYIFQVFSFGSLLIIGDYFLSEGRSKLFVIFEVGFYGGIIFPLLTMFPRIALMLSTGLSLSRDVASSFIDDNVGLTVGHTVFSLTIQWGACVVFSITGPRSDQADGLIEKLKILKGFVEARVEADPKNKKAAGIMLLSLSPFLMVTFSAIFDSHSWSHIIVLITLIISSSSTVVYFVYSYLDTANQEKSLDHARFELMSEVHKHLKRFSPKHLIKDGELSKESLKSLFKKTDKNKDGKIQISELKDLTIELSNFGRMRYDINELAKAFLEDFDGDNDGELEENEFEEGIARLLKQYKFNVEDQRENQTEENGVLKLEIKPKKTLVTKLLSMETLIATTEVIVGILIVLFLAKPFMLNIQLLSISAGIPSFYIVFAMIPFARNLKNTLSTRFCRGKDKKRVSSNTFSEIYKDITMNNLLGMSVILAIVYTRGLTWKYSVETLIMVIVGLIIGLPIYIRSTYPFWMCVLAFAMYFFSLLLIYIRLNFLDKN

SEQ ID NO: 78782 - protein, 444 aa, Arabidopsis thaliana
  peptide (1)..(444): Ceres Seq. ID no. 12645130
  misc_feature (301)..(434): Pfam Name: Sodium/calcium exchanger protein Pfam Description: Sodium/calcium exchanger protein
  misc_feature (111)..(370): Homolog of NCBI NO: 15226193 NR Description: unknown protein; protein id: At2g34030.1
  misc_feature (1)..(59): Homolog of NCBI NO: 15226193 NR Description: unknown protein; protein id: At2g34030.1
  misc_feature (1)..(439): Homolog of NCBI NO: 26449859 NR Description: unknown protein [Arabidopsis thaliana]
  misc_feature (1)..(407): Homolog of NCBI NO: 15218787 NR Description: unknown protein; protein id: At1g29020.1 thaliana] >gi|10764849|gb|AAF24539.2|AC007508_2 F1K23.2
  misc_feature (115)..(443): Homolog of NCBI NO: 15218787 NR Description: unknown protein; protein id: At1g29020.1 thaliana] >gi|10764849|gb|AAF24539.2|AC007508_2 F1K23.2
  misc_feature (1)..(107): Homolog of NCBI NO: 15218787 NR Description: unknown protein; protein id: At1g29020.1 thaliana] >gi|10764849|gb|AAF24539.2|AC007508_2 F1K23.2
  misc_feature (134)..(363): Homolog of NCBI NO: 15226191 NR Description: unknown protein; protein id: At2g34020.1
  misc_feature (1)..(57): Homolog of NCBI NO: 15226191 NR Description: unknown protein; protein id: At2g34020.1
  misc_feature (1)..(436): Homolog of NCBI NO: 25405975 NR Description: protein F12M16.12 [imported] - Arabidopsis >gi|7769854|gb|AAF69532.1|AC008007_7 F12M16.12 [Arabidopsis
  misc_feature (1)..(436): Homolog of NCBI NO: 30695448 NR Description: expressed protein [Arabidopsis thaliana]
MFPRIALMLSTGLSLSRDVASSFIDDNVGLTVGHTVFSLTIQWGACVVFSITGPRSDQADGLIEKLKILKGFVEARVEADPKNKKAAGIMLLSLSPFLMVTFSAIFDSHSWSHIIVLITLIISSSSTVVYFVYSYLDTANQEKSLDHARFELMSEVHKHLKRFSPKHLIKDGELSKESLKSLFKKTDKNKDGKIQISELKDLTIELSNFGRMRYDINELAKAFLEDFDGDNDGELEENEFEEGIARLLKQYKFNVEDQRENQTEENGVLKLEIKPKKTLVTKLLSMETLIATTEVIVGILIVLFLAKPFMLNIQLLSISAGIPSFYIVFAMIPFARNLKNTLSTRFCRGKDKKRVSSNTFSEIYKDITMNNLLGMSVILAIVYTRGLTWKYSVETLIMVIVGLIIGLPIYIRSTYPFWMCVLAFAMYFFSLLLIYIRLNFLDKN

SEQ ID NO: 78783 - protein, 437 aa, Arabidopsis thaliana
  peptide (1)..(437): Ceres Seq. ID no. 12645131
  misc_feature (294)..(427): Pfam Name: Sodium/calcium exchanger protein Pfam Description: Sodium/calcium exchanger protein
  misc_feature (104)..(363): Homolog of NCBI NO: 15226193 NR Description: unknown protein; protein id: At2g34030.1
  misc_feature (1)..(52): Homolog of NCBI NO: 15226193 NR Description: unknown protein; protein id: At2g34030.1
  misc_feature (1)..(432): Homolog of NCBI NO: 26449859 NR Description: unknown protein [Arabidopsis thaliana]
  misc_feature (1)..(400): Homolog of NCBI NO: 15218787 NR Description: unknown protein; protein id: At1g29020.1 thaliana] >gi|10764849|gb|AAF24539.2|AC007508_2 F1K23.2
  misc_feature (108)..(436): Homolog of NCBI NO: 15218787 NR Description: unknown protein; protein id: At1g29020.1 thaliana] >gi|10764849|gb|AAF24539.2|AC007508_2 F1K23.2
  misc_feature (1)..(100): Homolog of NCBI NO: 15218787 NR Description: unknown protein; protein id: At1g29020.1 thaliana] >gi|10764849|gb|AAF24539.2|AC007508_2 F1K23.2
  misc_feature (127)..(356): Homolog of NCBI NO: 15226191 NR Description: unknown protein; protein id: At2g34020.1
  misc_feature (1)..(50): Homolog of NCBI NO: 15226191 NR Description: unknown protein; protein id: At2g34020.1
  misc_feature (1)..(429): Homolog of NCBI NO: 25405975 NR Description: protein F12M16.12 [imported] - Arabidopsis >gi|7769854|gb|AAF69532.1|AC008007_7 F12M16.12 [Arabidopsis
  misc_feature (1)..(429): Homolog of NCBI NO: 30695448 NR Description: expressed protein [Arabidopsis thaliana]
MLSTGLSLSRDVASSFIDDNVGLTVGHTVFSLTIQWGACVVFSITGPRSDQADGLIEKLKILKGFVEARVEADPKNKKAAGIMLLSLSPFLMVTFSAIFDSHSWSHIIVLITLIISSSSTVVYFVYSYLDTANQEKSLDHARFELMSEVHKHLKRFSPKHLIKDGELSKESLKSLFKKTDKNKDGKIQISELKDLTIELSNFGRMRYDINELAKAFLEDFDGDNDGELEENEFEEGIARLLKQYKFNVEDQRENQTEENGVLKLEIKPKKTLVTKLLSMETLIATTEVIVGILIVLFLAKPFMLNIQLLSISAGIPSFYIVFAMIPFARNLKNTLSTRFCRGKDKKRVSSNTFSEIYKDITMNNLLGMSVILAIVYTRGLTWKYSVETLIMVIVGLIIGLPIYIRSTYPFWMCVLAFAMYFFSLLLIYIRLNFLDKN

SEQ ID NO: 78784 - DNA, 651 bp, Arabidopsis thaliana
  misc_feature (1)..(651): Ceres Seq. ID no. 12645234
  misc_feature: MA Experiment ID: 108435 Result: Down-regulated in Transcription
  misc_feature: MA Experiment 108435 PARAMETER Experiment Name: At_stm_Mutants_cDNA_P Parameter: Plant Line Value: wt Landsburg vs stm
  misc_feature: MA Experiment 108435 PARAMETER Experiment Name: At_stm_Mutants_cDNA_P Parameter: Tissue Value: Shoot Apical Meristem Region
  misc_feature: MA Experiment ID: 108461 Result: Up-regulated in Transcription
  misc_feature: MA Experiment 108461 PARAMETER Experiment Name: At_Germinating_Seeds_cDNA_P Parameter: Age (day) Value: 1 vs. 0
  misc_feature: MA Experiment 108461 PARAMETER Experiment Name: At_Germinating_Seeds_cDNA_P Parameter: Tissue Value: Germinating Seeds
  misc_feature: MA Experiment ID: 108462 Result: Up-regulated in Transcription
  misc_feature: MA Experiment 108462 PARAMETER Experiment Name: At_Germinating_Seeds_cDNA_P Parameter: Age (day) Value: 2 vs. 0
  misc_feature: MA Experiment 108462 PARAMETER Experiment Name: At_Germinating_Seeds_cDNA_P Parameter: Tissue Value: Germinating Seeds
  misc_feature: MA Experiment ID: 108595 Result: Down-regulated in Transcription
  misc_feature: MA Experiment 108595 PARAMETER Experiment Name: At_Ler-pi_Ovule_cDNA_P Parameter: Plant Line Value: null
  misc_feature: MA Experiment ID: 20000069 Result: Down-regulated in Transcription
  misc_feature: MA Experiment 20000069 PARAMETER Experiment Name: At_100uM_ABA_Mutants_cDNA_P Parameter: Plant Line Value: CS23
  misc_feature: MA Experiment 20000069 PARAMETER Experiment Name: At_100uM_ABA_Mutants_cDNA_P Parameter: Timepoint (hr) Value: 6
  misc_feature: MA Experiment 20000069 PARAMETER Experiment Name: At_100uM_ABA_Mutants_cDNA_P Parameter: Tissue Value: Aerial
  misc_feature: MA Experiment 20000069 PARAMETER Experiment Name: At_100uM_ABA_Mutants_cDNA_P Parameter: Treatment Value: 100uM ABA vs. No Treatment
  misc_feature: MA Experiment ID: 20000071 Result: Down-regulated in Transcription
  misc_feature: MA Experiment 20000071 PARAMETER Experiment Name: At_100uM_ABA_Mutants_cDNA_P Parameter: Plant Line Value: CS8104
  misc_feature: MA Experiment 20000071 PARAMETER Experiment Name: At_100uM_ABA_Mutants_cDNA_P Parameter: Timepoint (hr) Value: 6
  misc_feature: MA Experiment 20000071 PARAMETER Experiment Name: At_100uM_ABA_Mutants_cDNA_P Parameter: Tissue Value: Aerial
  misc_feature: MA Experiment 20000071 PARAMETER Experiment Name: At_100uM_ABA_Mutants_cDNA_P Parameter: Treatment Value: 100uM ABA vs. No Treatment
  misc_feature: MA Experiment ID: 20000072 Result: Down-regulated in Transcription
  misc_feature: MA Experiment 20000072 PARAMETER Experiment Name: At_100uM_ABA_Mutants_cDNA_P Parameter: Plant Line Value: CS8105
  misc_feature: MA Experiment 20000072 PARAMETER Experiment Name: At_100uM_ABA_Mutants_cDNA_P Parameter: Timepoint (hr) Value: 6
  misc_feature: MA Experiment 20000072 PARAMETER Experiment Name: At_100uM_ABA_Mutants_cDNA_P Parameter: Tissue Value: Aerial
  misc_feature: MA Experiment 20000072 PARAMETER Experiment Name: At_100uM_ABA_Mutants_cDNA_P Parameter: Treatment Value: 100uM ABA vs. No Treatment
  misc_feature: MA Experiment ID: 20000086 Result: Down-regulated in Transcription
  misc_feature: MA Experiment 20000086 PARAMETER Experiment Name: At_100uM_ABA_Mutants_cDNA_P Parameter: Plant Line Value: CS22
  misc_feature: MA Experiment 20000086 PARAMETER Experiment Name: At_100uM_ABA_Mutants_cDNA_P Parameter: Timepoint (hr) Value: 6
  misc_feature: MA Experiment 20000086 PARAMETER Experiment Name: At_100uM_ABA_Mutants_cDNA_P Parameter: Tissue Value: Aerial
  misc_feature: MA Experiment 20000086 PARAMETER Experiment Name: At_100uM_ABA_Mutants_cDNA_P Parameter: Treatment Value: 100uM ABA vs. No Treatment
  misc_feature: MA Experiment ID: 20000087 Result: Down-regulated in Transcription
  misc_feature: MA Experiment 20000087 PARAMETER Experiment Name: At_100uM_ABA_Mutants_cDNA_P Parameter: Plant Line Value: WS
  misc_feature: MA Experiment 20000087 PARAMETER Experiment Name: At_100uM_ABA_Mutants_cDNA_P Parameter: Timepoint (hr) Value: 6
  misc_feature: MA Experiment 20000087 PARAMETER Experiment Name: At_100uM_ABA_Mutants_cDNA_P Parameter: Tissue Value: Aerial
  misc_feature: MA Experiment 20000087 PARAMETER Experiment Name: At_100uM_ABA_Mutants_cDNA_P Parameter: Treatment Value: 100uM ABA vs. No Treatment
  misc_feature: MA Experiment ID: 20000117 Result: Down-regulated in Transcription
  misc_feature: MA Experiment 20000117 PARAMETER Experiment Name: At_100uM_ABA_Mutants_cDNA_P Parameter: Plant Line Value: Columbia
  misc_feature: MA Experiment 20000117 PARAMETER Experiment Name: At_100uM_ABA_Mutants_cDNA_P Parameter: Timepoint (hr) Value: 6
  misc_feature: MA Experiment 20000117 PARAMETER Experiment Name: At_100uM_ABA_Mutants_cDNA_P Parameter: Tissue Value: Aerial
  misc_feature: MA Experiment 20000117 PARAMETER Experiment Name: At_100uM_ABA_Mutants_cDNA_P Parameter: Treatment Value: 100uM ABA vs. No Treatment
atggctgcttcatcttcctctttcactctctgtaatcacaccacacttcgtactctccctctgagaaagacccttgtcaccaaaacccaattttcagttcccacaaaatcatcagaatctaacttctttggctccacactcactcactcatcgtatatctccccagtctcttcctcttctctcaaaggcttaatctttgccaaggttaacaagggtcaggctgcaccagacttcacactaaaggatcaaaacggaaagccggtgagcctcaaaaagtataaagggaagcctgttgttctctacttctaccctgcagatgaaacccctggctgcaccaagcaggcttgtgctttcagagactcttatgagaaattcaagaaagctggtgcagaggtcattggcattagtggagatgactctgcttctcacaaggcgtttgcaagcaaatacaaactaccgtatacattgttaagcgacgaagggaataaggtgagaaaagattggggagtgcctggagacctgtttggagcattgccagggagacagacttacgttcttgacaaaaacggtgttgttcagctcatctacaacaaccagttccagcctgagaaacacatcgacgagaccttgaagtttctcaaagctgcttga

SEQ ID NO: 78785 - protein, 216 aa, Arabidopsis thaliana; identical to SEQ ID NO: 77633
  peptide (1)..(216): Ceres Seq. ID no. 12645235
  misc_feature (71)..(210): Pfam Name: AhpC/TSA family Pfam Description: AhpC/TSA family
  misc_feature (1)..(216): Homolog of NCBI NO: 15230982 NR Description: putative peroxiredoxin; protein id: At3g26060.1, by cDNA: gi_15081742, supported by cDNA: gi_18252272 [Arabidopsis
  misc_feature (37)..(215): Homolog of NCBI NO: 6899842 NR Description: peroxiredoxin Q [Sedum lineare]
  misc_feature (23)..(216): Homolog of NCBI NO: 39748708 NR Description: peroxiredoxin Q [Gentiana triflora]
  misc_feature (69)..(214): Homolog of NCBI NO: 17230675 NR Description: bacterioferritin comigratory protein [Nostoc sp.
  misc_feature (69)..(214): Homolog of NCBI NO: 23125049 NR Description: hypothetical protein [Nostoc punctiforme]
  misc_feature (68)..(214): Homolog of NCBI NO: 28850433 NR Description: similar to Anabaena sp. (strain PCC 7120).
  misc_feature (68)..(214): Homolog of NCBI NO: 23041480 NR Description: hypothetical protein [Trichodesmium erythraeum
  misc_feature (69)..(214): Homolog of NCBI NO: 15898858 NR Description: Peroxiredoxin, bacterioferritin comigratory
  misc_feature (67)..(214): Homolog of NCBI NO: 21673494 NR Description: bacterioferritin comigratory protein, thiol putative [Chlorobium tepidum TLS] >gi|21646601|gb|AAM71901.1| comigratory protein, thiol peroxidase, putative [Chlorobium
  misc_feature (69)..(214): Homolog of NCBI NO: 16081486 NR Description: thiol-specific antioxidant related protein

SEQ ID NO: 78786 - DNA, 1014 bp, Arabidopsis thaliana
  misc_feature (1)..(1014): Ceres Seq. ID no. 12645257
  misc_feature: MA Experiment ID: 20000495 Result: Down-regulated in Transcription
  misc_feature: MA Experiment 20000495 PARAMETER Experiment Name: At_Guard_Cells_P Parameter: Harvest Date Value: 8/2/2002
  misc_feature: MA Experiment 20000495 PARAMETER Experiment Name: At_Guard_Cells_P Parameter: Organism Value: A. thaliana
  misc_feature: MA Experiment 20000495 PARAMETER Experiment Name: At_Guard_Cells_P Parameter: Tissue Value: Guard Cells vs. Leaves
atggcgacaattcagaagcttgaagaagttgcaggcaaagatcaaactctaagagccgttgatctaaccatcatcaacggcgtcagaaacgtcgaaacttcaagacctttccaagtaaatcccacagtgagtctcgagcccaaggcggagccggtgatgccgtcgttttcaatgtctttagctccaccgtcttcgacaggaccaccattgaagagagcttcgactaaagaccgtcacacgaaggttgaaggaagagggagaaggatacggatgcctgccacgtgtgcggctaggatttttcaattaactcgagagttaggtcacaaatccgacggcgaaacgattcggtggttgttggagaacgctgagccggcgattatagccgccacgggtacgggaacggttcccgccatcgccatgtcggttaacggaaccttaaaaatcccgacgacgacgaacgctgattctgatatgggtgaaaatctgatgaagaagaaacgtaaacgaccttctaacagtgagtatatagacataagcgacgccgtttcagcttcctccggtttagctccaattcaacttctgccgcaaggaatgtatccgatgtgggctattccatcaaacgcaatgattccgacggtcggagctttcttcttgattccacaaatcgctggtccgtcgaatcagcctcagttattagcttttcccgccgccgctgcttcgccgtcgtcttacgtcgccgctgttcaacaggcttccacgatggctagaccacctcctttacaagttgttccaagcagcggctttgtatccgtttcagacgttagcggttcgaatttatcaagagcgacgtcggttatggctccgagctcaagctcaggcgtaacaaccggtagttcatcgtcaattgcaacaacaacgacgcacacgctgagagacttctccctagagatatacgagaaacaagagcttcaccagttcatgagcaccacaacagcacggtcatcgaaccactga

SEQ ID NO: 78787 - protein, 337 aa, Arabidopsis thaliana
  peptide (1)..(337): Ceres Seq. ID no. 12645258
  misc_feature (59)..(234): Pfam Name: TCP family transcription factor Pfam Description: TCP family transcription factor
  misc_feature (1)..(305): Homolog of NCBI NO: 15225538 NR Description: putative PCF2-like DNA binding protein; protein At2g45680.1, supported by cDNA: gi_13877694, supported by cDNA:
  misc_feature (184)..(337): Homolog of NCBI NO: 15225538 NR Description: putative PCF2-like DNA binding protein; protein At2g45680.1, supported by cDNA: gi_13877694, supported by cDNA:
  misc_feature (47)..(247): Homolog of NCBI NO: 15242216 NR Description: putative protein; protein id: At5g51910.1, by cDNA: 247645. [Arabidopsis thaliana] contains similarity to DNA binding protein PCF1~gene_id:MJM18.6
  misc_feature (63)..(247): Homolog of NCBI NO: 21592496 NR Description: unknown [Arabidopsis thaliana]
  misc_feature (45)..(336): Homolog of NCBI NO: 7489534 NR Description: probable DNA binding protein PCF2 - rice
  misc_feature (68)..(147): Homolog of NCBI NO: 11357581 NR Description: hypothetical protein F1P2.170 - Arabidopsis >gi|6522545|emb|CAB61988.1| putative protein [Arabidopsis
  misc_feature (68)..(147): Homolog of NCBI NO: 22331641 NR Description: putative protein; protein id: At3g47620.1, by cDNA: gi_16604510 [Arabidopsis thaliana] AT3g47620/F1P2_170 [Arabidopsis thaliana]
  misc_feature (33)..(147): Homolog of NCBI NO: 5731257 NR Description: auxin-induced basic helix-loop-helix
  misc_feature (68)..(147): Homolog of NCBI NO: 18409345 NR Description: expressed protein; protein id: At1g69690.1, by cDNA: gi_15912212, supported by cDNA: gi_19547990 [Arabidopsis
  misc_feature (39)..(152): Homolog of NCBI NO: 15217857 NR Description: auxin-induced basic helix-loop-helix factor, putative; protein id: At1g58100.1, supported by cDNA:
MATIQKLEEVAGKDQTLRAVDLTIINGVRNVETSRPFQVNPTVSLEPKAEPVMPSFSMSLAPPSSTGPPLKRASTKDRHTKVEGRGRRIRMPATCAARIFQLTRELGHKSDGETIRWLLENAEPAIIAATGTGTVPAIAMSVNGTLKIPTTTNADSDMGENLMKKKRKRPSNSEYIDISDAVSASSGLAPIQLLPQGMYPMWAIPSNAMIPTVGAFFLIPQIAGPSNQPQLLAFPAAAASPSSYVAAVQQASTMARPPPLQVVPSSGFVSVSDVSGSNLSRATSVMAPSSSSGVTTGSSSSIATTTTHTLRDFSLEIYEKQELHQFMSTTTARSSNH

SEQ ID NO: 78788 - protein, 285 aa, Arabidopsis thaliana
  peptide (1)..(285): Ceres Seq. ID no. 12645259
  misc_feature (7)..(182): Pfam Name: TCP family transcription factor Pfam Description: TCP family transcription factor
  misc_feature (1)..(253): Homolog of NCBI NO: 15225538 NR Description: putative PCF2-like DNA binding protein; protein At2g45680.1, supported by cDNA: gi_13877694, supported by cDNA:
  misc_feature (132)..(285): Homolog of NCBI NO: 15225538 NR Description: putative PCF2-like DNA binding protein; protein At2g45680.1, supported by cDNA: gi_13877694, supported by cDNA:
  misc_feature (1)..(195): Homolog of NCBI NO: 15242216 NR Description: putative protein; protein id: At5g51910.1, by cDNA: 247645. [Arabidopsis thaliana] contains similarity to DNA binding protein PCF1~gene_id:MJM18.6
  misc_feature (11)..(195): Homolog of NCBI NO: 21592496 NR Description: unknown [Arabidopsis thaliana]
  misc_feature (1)..(284): Homolog of NCBI NO: 7489534 NR Description: probable DNA binding protein PCF2 - rice
  misc_feature (16)..(95): Homolog of NCBI NO: 11357581 NR Description: hypothetical protein F1P2.170 - Arabidopsis >gi|6522545|emb|CAB61988.1| putative protein [Arabidopsis
  misc_feature (16)..(95): Homolog of NCBI NO: 22331641 NR Description: putative protein; protein id: At3g47620.1, by cDNA: gi_16604510 [Arabidopsis thaliana] AT3g47620/F1P2_170 [Arabidopsis thaliana]
  misc_feature (1)..(95): Homolog of NCBI NO: 5731257 NR Description: auxin-induced basic helix-loop-helix
  misc_feature (16)..(95): Homolog of NCBI NO: 18409345 NR Description: expressed protein; protein id: At1g69690.1, by cDNA: gi_15912212, supported by cDNA: gi_19547990 [Arabidopsis
  misc_feature (1)..(100): Homolog of NCBI NO: 15217857 NR Description: auxin-induced basic helix-loop-helix factor, putative; protein id: At1g58100.1, supported by cDNA:
MPSFSMSLAPPSSTGPPLKRASTKDRHTKVEGRGRRIRMPATCAARIFQLTRELGHKSDGETIRWLLENAEPAIIAATGTGTVPAIAMSVNGTLKIPTTTNADSDMGENLMKKKRKRPSNSEYIDISDAVSASSGLAPIQLLPQGMYPMWAIPSNAMIPTVGAFFLIPQIAGPSNQPQLLAFPAAAASPSSYVAAVQQASTMARPPPLQVVPSSGFVSVSDVSGSNLSRATSVMAPSSSSGVTTGSSSSIATTTTHTLRDFSLEIYEKQELHQFMSTTTARSSNH

SEQ ID NO: 78789 - protein, 280 aa, Arabidopsis thaliana
  peptide (1)..(280): Ceres Seq. ID no. 12645260
  misc_feature (2)..(177): Pfam Name: TCP family transcription factor Pfam Description: TCP family transcription factor
  misc_feature (1)..(248): Homolog of NCBI NO: 15225538 NR Description: putative PCF2-like DNA binding protein; protein At2g45680.1, supported by cDNA: gi_13877694, supported by cDNA:
  misc_feature (127)..(280): Homolog of NCBI NO: 15225538 NR Description: putative PCF2-like DNA binding protein; protein At2g45680.1, supported by cDNA: gi_13877694, supported by cDNA:
  misc_feature (1)..(190): Homolog of NCBI NO: 15242216 NR Description: putative protein; protein id: At5g51910.1, by cDNA: 247645. [Arabidopsis thaliana] contains similarity to DNA binding protein PCF1~gene_id:MJM18.6
  misc_feature (6)..(190): Homolog of NCBI NO: 21592496 NR Description: unknown [Arabidopsis thaliana]
  misc_feature (1)..(279): Homolog of NCBI NO: 7489534 NR Description: probable DNA binding protein PCF2 - rice
  misc_feature (11)..(90): Homolog of NCBI NO: 11357581 NR Description: hypothetical protein F1P2.170 - Arabidopsis >gi|6522545|emb|CAB61988.1| putative protein [Arabidopsis
  misc_feature (11)..(90): Homolog of NCBI NO: 22331641 NR Description: putative protein; protein id: At3g47620.1, by cDNA: gi_16604510 [Arabidopsis thaliana] AT3g47620/F1P2_170 [Arabidopsis thaliana]
  misc_feature (1)..(90): Homolog of NCBI NO: 5731257 NR Description: auxin-induced basic helix-loop-helix
  misc_feature (11)..(90): Homolog of NCBI NO: 18409345 NR Description: expressed protein; protein id: At1g69690.1, by cDNA: gi_15912212, supported by cDNA: gi_19547990 [Arabidopsis
  misc_feature (1)..(95): Homolog of NCBI NO: 15217857 NR Description: auxin-induced basic helix-loop-helix factor, putative; protein id: At1g58100.1, supported by cDNA:
MSLAPPSSTGPPLKRASTKDRHTKVEGRGRRIRMPATCAARIFQLTRELGHKSDGETIRWLLENAEPAIIAATGTGTVPAIAMSVNGTLKIPTTTNADSDMGENLMKKKRKRPSNSEYIDISDAVSASSGLAPIQLLPQGMYPMWAIPSNAMIPTVGAFFLIPQIAGPSNQPQLLAFPAAAASPSSYVAAVQQASTMARPPPLQVVPSSGFVSVSDVSGSNLSRATSVMAPSSSSGVTTGSSSSIATTTTHTLRDFSLEIYEKQELHQFMSTTTARSSNH

SEQ ID NO: 78790 - DNA, 1572 bp, Arabidopsis thaliana
  misc_feature (1)..(1572): Ceres Seq. ID no. 12645272
  misc_feature: MA Experiment ID: 20000327 Result: Up-regulated in Transcription
  misc_feature: MA Experiment 20000327 PARAMETER Experiment Name: At_42deg_Heat_Sub_P Parameter: Age (day) Value: 14
  misc_feature: MA Experiment 20000327 PARAMETER Experiment Name: At_42deg_Heat_Sub_P Parameter: Organism Value: A. thaliana
  misc_feature: MA Experiment 20000327 PARAMETER Experiment Name: At_42deg_Heat_Sub_P Parameter: Plant Line Value: WS
  misc_feature: MA Experiment 20000327 PARAMETER Experiment Name: At_42deg_Heat_Sub_P Parameter: Temperature (deg C) Value: 42 vs. 22
  misc_feature: MA Experiment 20000327 PARAMETER Experiment Name: At_42deg_Heat_Sub_P Parameter: Timepoint (hr) Value: 1
  misc_feature: MA Experiment 20000327 PARAMETER Experiment Name: At_42deg_Heat_Sub_P Parameter: Tissue Value: Aerial
  misc_feature: MA Experiment ID: 20000328 Result: Up-regulated in Transcription
  misc_feature: MA Experiment 20000328 PARAMETER Experiment Name: At_42deg_Heat_Sub_P Parameter: Age (day) Value: 14
  misc_feature: MA Experiment 20000328 PARAMETER Experiment Name: At_42deg_Heat_Sub_P Parameter: Organism Value: A. thaliana
  misc_feature: MA Experiment 20000328 PARAMETER Experiment Name: At_42deg_Heat_Sub_P Parameter: Plant Line Value: WS
  misc_feature: MA Experiment 20000328 PARAMETER Experiment Name: At_42deg_Heat_Sub_P Parameter: Temperature (deg C) Value: 42 vs. 22
  misc_feature: MA Experiment 20000328 PARAMETER Experiment Name: At_42deg_Heat_Sub_P Parameter: Timepoint (hr) Value: 6
  misc_feature: MA Experiment 20000328 PARAMETER Experiment Name: At_42deg_Heat_Sub_P Parameter: Tissue Value: Aerial
  misc_feature: MA Experiment ID: 20000355 Result: Up-regulated in Transcription
  misc_feature: MA Experiment 20000355 PARAMETER Experiment Name: At_Siliques_Sub_P Parameter: Age (day) Value: 21
  misc_feature: MA Experiment 20000355 PARAMETER Experiment Name: At_Siliques_Sub_P Parameter: Organism Value: A. thaliana
  misc_feature: MA Experiment 20000355 PARAMETER Experiment Name: At_Siliques_Sub_P Parameter: Plant Line Value: WS
  misc_feature: MA Experiment 20000355 PARAMETER Experiment Name: At_Siliques_Sub_P Parameter: Tissue Value: Less Than 5mm Siliques vs. Whole Plant
atgagttctcacgtggttgatgatcaaaggcaacctaataactcaatctcgagtttaagttctaaactaaccaagccatggatcacaaccacaatcttcatctttgtcttcttcttcttcatcatcctcgttggagcttctctcaggtggatggacatgtttttaatcggtggaggtagaatcaaagtgacaccaatatttacaagaaacaccaacgcaactatccccaaggaaaaactcactacaccactgaacttcacattgcaatgctcactagaccagaacatagcaacccagacgtgtcctgcaagcaacccggagaaatcacaacctagtaaggacgagccagagacttgtccagactacttcaggtggatccacaaggatcttgaagcatggcgtgagactggaatcactcgagagacgttagagagagcaagtgataaagctcacttccggctgataataaaaggaggaagagtgtatgtgcatcaatacaagaaatcttttcagacaagagatgttttcactatatggggaatagtacagctgctaaggatgtatcctggtcaagtccctgatcttgagcttctcttcatgtgccatgactcacctgaaatctggagaagagactataggccaagaccaggagtcaatgtgacgtggccacctcctccactcttccactattgtggacattccggtgctttcgacattgtcttccctgactggagcttttggggctggccggagattaacataaaggagtggaataaacagtcggagttgataagtgaagggataaagaaggtgaagtgggaagagagagagccttacgcatattggaaggggaatcctggagttgccatggtcagaagagacctcatgcattgtcatgaccctatggttcatctctatcgccaggattggagcagagagggcaggattgggtataggacatcaaacctagaagatcaatgcacccacaggtacaagatttatgtagaaggaagggcttggtcagtgagtgagaagtatatattagcttgtgacagcatgactcttcttgtgaagccattttactttgacttcttcactagaagcttagttccaatggagcattattggcccataagacctcaagaaaaatgtagtgacattgtctttgctgtccattggggcaacaacaataccaaaaaggccagagctatagggagaaatggaagtgggtatgtgcgaaagaatctaaagatgaagtatgtgtatgattacatgttgcatctactgcaaagctatgggaagttgatgaagatgaatgtagaagtgcctcaaggagccaaggaagtgtgtccggagacaatggcttgtccaatcaatggaggccgaatgagacaatctatggatgactcattggttatgtctccgagcgttaaggctacttgtgagatgcctccaccttttgaagaagatgagctcaaaaagtttcttgagaagaaagaaagtgttgagaaagaagttgagaagtggactaatgagtattggcaggaacagaagaagattcttaaacattga

SEQ ID NO: 78791 - protein, 523 aa, Arabidopsis thaliana
  peptide (1)..(523): Ceres Seq. ID no. 12645273
  misc_feature (117)..(515): Pfam Name: Arabidopsis thaliana protein of unknown function Pfam Description: Arabidopsis thaliana protein of unknown
  misc_feature (1)..(292): Homolog of NCBI NO: 15225901 NR Description: hypothetical protein; protein id: At2g45840.1
  misc_feature (392)..(523): Homolog of NCBI NO: 15225901 NR Description: hypothetical protein; protein id: At2g45840.1
  misc_feature (187)..(523): Homolog of NCBI NO: 30267795 NR Description: hypothetical protein [Arabidopsis thaliana]
  misc_feature (80)..(519): Homolog of NCBI NO: 15233074 NR Description: putative protein; protein id: At3g61290.1
  misc_feature (187)..(514): Homolog of NCBI NO: 15233072 NR Description: putative protein; protein id: At3g61280.1
  misc_feature (69)..(522): Homolog of NCBI NO: 7486461 NR Description: hypothetical protein At2g45830 [imported] - thaliana >gi|3386611|gb|AAC28541.1| unknown protein [Arabidopsis
  misc_feature (33)..(519): Homolog of NCBI NO: 15229061 NR Description: putative protein; protein id: At3g48980.1
  misc_feature (63)..(519): Homolog of NCBI NO: 15237842 NR Description: putative protein; protein id: At5g23850.1 thaliana] >gi|10176852|dbj|BAB10058.1| contains similarity to
  misc_feature (90)..(515): Homolog of NCBI NO: 15233070 NR Description: putative protein; protein id: At3g61270.1
  misc_feature (75)..(516): Homolog of NCBI NO: 15222413 NR Description: hypothetical protein; protein id: At1g63420.1
MSSHVVDDQRQPNNSISSLSSKLTKPWITTTIFIFVFFFFIILVGASLRWMDMFLIGGGRIKVTPIFTRNTNATIPKEKLTTPLNFTLQCSLDQNIATQTCPASNPEKSQPSKDEPETCPDYFRWIHKDLEAWRETGITRETLERASDKAHFRLIIKGGRVYVHQYKKSFQTRDVFTIWGIVQLLRMYPGQVPDLELLFMCHDSPEIWRRDYRPRPGVNVTWPPPPLFHYCGHSGAFDIVFPDWSFWGWPEINIKEWNKQSELISEGIKKVKWEEREPYAYWKGNPGVAMVRRDLMHCHDPMVHLYRQDWSREGRIGYRTSNLEDQCTHRYKIYVEGRAWSVSEKYILACDSMTLLVKPFYFDFFTRSLVPMEHYWPIRPQEKCSDIVFAVHWGNNNTKKARAIGRNGSGYVRKNLKMKYVYDYMLHLLQSYGKLMKMNVEVPQGAKEVCPETMACPINGGRMRQSMDDSLVMSPSVKATCEMPPPFEEDELKKFLEKKESVEKEVEKWTNEYWQEQKKILKH

SEQ ID NO: 78792 - protein, 473 aa, Arabidopsis thaliana
  peptide (1)..(473): Ceres Seq. ID no. 12645274
  misc_feature (67)..(465): Pfam Name: Arabidopsis thaliana protein of unknown function Pfam Description: Arabidopsis thaliana protein of unknown
  misc_feature (1)..(242): Homolog of NCBI NO: 15225901 NR Description: hypothetical protein; protein id: At2g45840.1
  misc_feature (342)..(473): Homolog of NCBI NO: 15225901 NR Description: hypothetical protein; protein id: At2g45840.1
  misc_feature (137)..(473): Homolog of NCBI NO: 30267795 NR Description: hypothetical protein [Arabidopsis thaliana]
  misc_feature (30)..(469): Homolog of NCBI NO: 15233074 NR Description: putative protein; protein id: At3g61290.1
  misc_feature (137)..(464): Homolog of NCBI NO: 15233072 NR Description: putative protein; protein id: At3g61280.1
  misc_feature (19)..(472): Homolog of NCBI NO: 7486461 NR Description: hypothetical protein At2g45830 [imported] - thaliana >gi|3386611|gb|AAC28541.1| unknown protein [Arabidopsis
  misc_feature (1)..(469): Homolog of NCBI NO: 15229061 NR Description: putative protein; protein id: At3g48980.1
  misc_feature (13)..(469): Homolog of NCBI NO: 15237842 NR Description: putative protein; protein id: At5g23850.1 thaliana] >gi|10176852|dbj|BAB10058.1| contains similarity to
  misc_feature (40)..(465): Homolog of NCBI NO: 15233070 NR Description: putative protein; protein id: At3g61270.1
  misc_feature (25)..(466): Homolog of NCBI NO: 15222413 NR Description: hypothetical protein; protein id: At1g63420.1
MDMFLIGGGRIKVTPIFTRNTNATIPKEKLTTPLNFTLQCSLDQNIATQTCPASNPEKSQPSKDEPETCPDYFRWIHKDLEAWRETGITRETLERASDKAHFRLIIKGGRVYVHQYKKSFQTRDVFTIWGIVQLLRMYPGQVPDLELLFMCHDSPEIWRRDYRPRPGVNVTWPPPPLFHYCGHSGAFDIVFPDWSFWGWPEINIKEWNKQSELISEGIKKVKWEEREPYAYWKGNPGVAMVRRDLMHCHDPMVHLYRQDWSREGRIGYRTSNLEDQCTHRYKIYVEGRAWSVSEKYILACDSMTLLVKPFYFDFFTRSLVPMEHYWPIRPQEKCSDIVFAVHWGNNNTKKARAIGRNGSGYVRKNLKMKYVYDYMLHLLQSYGKLMKMNVEVPQGAKEVCPETMACPINGGRMRQSMDDSLVMSPSVKATCEMPPPFEEDELKKFLEKKESVEKEVEKWTNEYWQEQKKILKH

SEQ ID NO: 78793 - protein, 471 aa, Arabidopsis thaliana
  peptide (1)..(471): Ceres Seq. ID no. 12645275
  misc_feature (65)..(463): Pfam Name: Arabidopsis thaliana protein of unknown function Pfam Description: Arabidopsis thaliana protein of unknown
  misc_feature (1)..(240): Homolog of NCBI NO: 15225901 NR Description: hypothetical protein; protein id: At2g45840.1
  misc_feature (340)..(471): Homolog of NCBI NO: 15225901 NR Description: hypothetical protein; protein id: At2g45840.1
  misc_feature (135)..(471): Homolog of NCBI NO: 30267795 NR Description: hypothetical protein [Arabidopsis thaliana]
  misc_feature (28)..(467): Homolog of NCBI NO: 15233074 NR Description: putative protein; protein id: At3g61290.1
  misc_feature (135)..(462): Homolog of NCBI NO: 15233072 NR Description: putative protein; protein id: At3g61280.1
  misc_feature (17)..(470): Homolog of NCBI NO: 7486461 NR Description: hypothetical protein At2g45830 [imported] - thaliana >gi|3386611|gb|AAC28541.1| unknown protein [Arabidopsis
  misc_feature (1)..(467): Homolog of NCBI NO: 15229061 NR Description: putative protein; protein id: At3g48980.1
  misc_feature (11)..(467): Homolog of NCBI NO: 15237842 NR Description: putative protein; protein id: At5g23850.1 thaliana] >gi|10176852|dbj|BAB10058.1| contains similarity to
  misc_feature (38)..(463): Homolog of NCBI NO: 15233070 NR Description: putative protein; protein id: At3g61270.1
  misc_feature (23)..(464): Homolog of NCBI NO: 15222413 NR Description: hypothetical protein; protein id: At1g63420.1
MFLIGGGRIKVTPIFTRNTNATIPKEKLTTPLNFTLQCSLDQNIATQTCPASNPEKSQPSKDEPETCPDYFRWIHKDLEAWRETGITRETLERASDKAHFRLIIKGGRVYVHQYKKSFQTRDVFTIWGIVQLLRMYPGQVPDLELLFMCHDSPEIWRRDYRPRPGVNVTWPPPPLFHYCGHSGAFDIVFPDWSFWGWPEINIKEWNKQSELISEGIKKVKWEEREPYAYWKGNPGVAMVRRDLMHCHDPMVHLYRQDWSREGRIGYRTSNLEDQCTHRYKIYVEGRAWSVSEKYILACDSMTLLVKPFYFDFFTRSLVPMEHYWPIRPQEKCSDIVFAVHWGNNNTKKARAIGRNGSGYVRKNLKMKYVYDYMLHLLQSYGKLMKMNVEVPQGAKEVCPETMACPINGGRMRQSMDDSLVMSPSVKATCEMPPPFEEDELKKFLEKKESVEKEVEKWTNEYWQEQKKILKH

SEQ ID NO: 78794 - DNA, 1641 bp, Arabidopsis thaliana
  misc_feature (1)..(1641): Ceres Seq. ID no. 12645315
  misc_feature: MA Experiment ID: 20001451 Result: Up-regulated in Transcription
  misc_feature: MA Experiment 20001451 PARAMETER Experiment Name: At_Far-red-induction_P Parameter: Age (day) Value: 7
  misc_feature: MA Experiment 20001451 PARAMETER Experiment Name: At_Far-red-induction_P Parameter: Light Value: Far-red vs. White
  misc_feature: MA Experiment 20001451 PARAMETER Experiment Name: At_Far-red-induction_P Parameter: Organism Value: A. thaliana
  misc_feature: MA Experiment 20001451 PARAMETER Experiment Name: At_Far-red-induction_P Parameter: Plant Line Value: Columbia
  misc_feature: MA Experiment 20001451 PARAMETER Experiment Name: At_Far-red-induction_P Parameter: Timepoint (hr) Value: 24
  misc_feature: MA Experiment 20001451 PARAMETER Experiment Name: At_Far-red-induction_P Parameter: Tissue Value: Whole Plant
atgcgttttacattcctccgatcaactcggatcttccttgcgaaccatcagaaccacttatcatccttgcaaaacattagaaccattccttcttcttcttcttcacctgtagctatatcctctgtatcgaagttatctgctagcttggatcatctctctgacgtgaaacaagaacatggtttcatggtaaaacaagggatttacaattctctgtttcttcaaaacaagctcttgcaagcttacacgaaaatcagagaattcgatgatgcagataagctcttcgacgaaatgcctttgagaaatattgttacttggaacatactgattcacggggtcattcaacgagacggtgacaccaaccacagagctcatctaggtttttgttatttgagtcggattcttttcactgatgtgagtttggatcatgtgtcgttcatggggttgatacggttgtgtactgattcgaccaatatgaaagctggtatccaattacactgtctgatggtgaaacaaggtcttgaatcgagttgctttccgagtactagtctagttcatttctatgggaaatgtggtctcattgtagaagcaagacgagtttttgaggcggttttggatagagatttagtgctatggaacgctttagtttcgtcgtatgttcttaacggtatgattgatgaagcttttggtttactcaagctgatgggttctgacaaaaacagattcaggggtgattattttactttctcgagtcttctcagtgcatgcaggatcgaacaagggaagcagattcacgccattctcttcaaagtgtcatatcaattcgacattccggtggcgactgcattgctgaatatgtatgctaagagtaaccatttgagtgatgctcgggagtgttttgaatcgatggttgtgagaaatgtagtgtcttggaatgcgatgattgtaggttttgcacaaaatggagaaggaagagaagctatgagactttttgattttttgtcggtcgctaattctctgataagttcctactccaggaatggaaatttatctgaagcacttttatgttttcattcgatccgagaacctgatcttgtttcatggacttcagtgataggagctttggcttctcatggattcgcagaagaaagcttgcaaatgtttgaaagtatgctgcagaaacttcaaccagacaagatcacttttttagaggttctgtctgcttgtagccatggaggattagttcaagaagggctccgttgcttcaaacgaatgactgagttttacaagatagaagcagaggatgaacactacacgtgtctgatcgatcttcttggtcgagcaggtttcatcgacgaggcttctgatgttttaaattcaatgcccacagaaccaagcacacatgctttggcagctttcacaggaggatgtaacatccatgagaaaagagaatccatgaaatggggtgcaaagaagcttcttgaaattgaacctaccaaacctgtgaactactccatcctgtcaaacgcttatgtctctgaaggccattggaatcaagcggctctactgcgtaaaagagagaggagaaactgctacaatcccaaaactccaggttgcagttggctaggggactactcaatctag

SEQ ID NO: 78795 - protein, 546 aa, Arabidopsis thaliana
  peptide (1)..(546): Ceres Seq. ID no. 12645316
  misc_feature (501)..(535): Pfam Name: PPR repeat Pfam Description: PPR repeat
  misc_feature (1)..(452): Homolog of NCBI NO: 15225922 NR Description: hypothetical protein; protein id: At2g46050.1
  misc_feature (331)..(546): Homolog of NCBI NO: 15225922 NR Description: hypothetical protein; protein id: At2g46050.1
  misc_feature (68)..(376): Homolog of NCBI NO: 21740490 NR Description: OSJNBa0006B20.5 [Oryza sativa (japonica
  misc_feature (335)..(541): Homolog of NCBI NO: 21740490 NR Description: OSJNBa0006B20.5 [Oryza sativa (japonica
  misc_feature (52)..(330): Homolog of NCBI NO: 15220337 NR Description: hypothetical protein; protein id: At1g11290.1
  misc_feature (335)..(539): Homolog of NCBI NO: 15220337 NR Description: hypothetical protein; protein id: At1g11290.1
  misc_feature (40)..(333): Homolog of NCBI NO: 15234006 NR Description: putative protein; protein id: At4g18750.1
  misc_feature (335)..(541): Homolog of NCBI NO: 15234006 NR Description: putative protein; protein id: At4g18750.1
  misc_feature (56)..(330): Homolog of NCBI NO: 15226737 NR Description: unknown protein; protein id: At2g40720.1
  misc_feature (337)..(541): Homolog of NCBI NO: 15226737 NR Description: unknown protein; protein id: At2g40720.1
MRFTFLRSTRIFLANHQNHLSSLQNIRTIPSSSSSPVAISSVSKLSASLDHLSDVKQEHGFMVKQGIYNSLFLQNKLLQAYTKIREFDDADKLFDEMPLRNIVTWNILIHGVIQRDGDTNHRAHLGFCYLSRILFTDVSLDHVSFMGLIRLCTDSTNMKAGIQLHCLMVKQGLESSCFPSTSLVHFYGKCGLIVEARRVFEAVLDRDLVLWNALVSSYVLNGMIDEAFGLLKLMGSDKNRFRGDYFTFSSLLSACRIEQGKQIHAILFKVSYQFDIPVATALLNMYAKSNHLSDARECFESMVVRNVVSWNAMIVGFAQNGEGREAMRLFDFLSVANSLISSYSRNGNLSEALLCFHSIREPDLVSWTSVIGALASHGFAEESLQMFESMLQKLQPDKITFLEVLSACSHGGLVQEGLRCFKRMTEFYKIEAEDEHYTCLIDLLGRAGFIDEASDVLNSMPTEPSTHALAAFTGGCNIHEKRESMKWGAKKLLEIEPTKPVNYSILSNAYVSEGHWNQAALLRKRERRNCYNPKTPGCSWLGDYSI

SEQ ID NO: 78796 - protein, 485 aa, Arabidopsis thaliana
  peptide (1)..(485): Ceres Seq. ID no. 12645317
  misc_feature (440)..(474): Pfam Name: PPR repeat Pfam Description: PPR repeat
  misc_feature (1)..(391): Homolog of NCBI NO: 15225922 NR Description: hypothetical protein; protein id: At2g46050.1
  misc_feature (270)..(485): Homolog of NCBI NO: 15225922 NR Description: hypothetical protein; protein id: At2g46050.1
  misc_feature (7)..(315): Homolog of NCBI NO: 21740490 NR Description: OSJNBa0006B20.5 [Oryza sativa (japonica
  misc_feature (274)..(480): Homolog of NCBI NO: 21740490 NR Description: OSJNBa0006B20.5 [Oryza sativa (japonica
  misc_feature (1)..(269): Homolog of NCBI NO: 15220337 NR Description: hypothetical protein; protein id: At1g11290.1
  misc_feature (274)..(478): Homolog of NCBI NO: 15220337 NR Description: hypothetical protein; protein id: At1g11290.1
  misc_feature (1)..(272): Homolog of NCBI NO: 15234006 NR Description: putative protein; protein id: At4g18750.1
  misc_feature (274)..(480): Homolog of NCBI NO: 15234006 NR Description: putative protein; protein id: At4g18750.1
  misc_feature (1)..(269): Homolog of NCBI NO: 15226737 NR Description: unknown protein; protein id: At2g40720.1
  misc_feature (276)..(480): Homolog of NCBI NO: 15226737 NR Description: unknown protein; protein id: At2g40720.1
MVKQGIYNSLFLQNKLLQAYTKIREFDDADKLFDEMPLRNIVTWNILIHGVIQRDGDTNHRAHLGFCYLSRILFTDVSLDHVSFMGLIRLCTDSTNMKAGIQLHCLMVKQGLESSCFPSTSLVHFYGKCGLIVEARRVFEAVLDRDLVLWNALVSSYVLNGMIDEAFGLLKLMGSDKNRFRGDYFTFSSLLSACRIEQGKQIHAILFKVSYQFDIPVATALLNMYAKSNHLSDARECFESMVVRNVVSWNAMIVGFAQNGEGREAMRLFDFLSVANSLISSYSRNGNLSEALLCFHSIREPDLVSWTSVIGALASHGFAEESLQMFESMLQKLQPDKITFLEVLSACSHGGLVQEGLRCFKRMTEFYKIEAEDEHYTCLIDLLGRAGFIDEASDVLNSMPTEPSTHALAAFTGGCNIHEKRESMKWGAKKLLEIEPTKPVNYSILSNAYVSEGHWNQAALLRKRERRNCYNPKTPGCSWLGDYSI

SEQ ID NO: 78797 - protein, 450 aa, Arabidopsis thaliana
  peptide (1)..(450): Ceres Seq. ID no. 12645318
  misc_feature (405)..(439): Pfam Name: PPR repeat Pfam Description: PPR repeat
  misc_feature (1)..(356): Homolog of NCBI NO: 15225922 NR Description: hypothetical protein; protein id: At2g46050.1
  misc_feature (235)..(450): Homolog of NCBI NO: 15225922 NR Description: hypothetical protein; protein id: At2g46050.1
  misc_feature (1)..(280): Homolog of NCBI NO: 21740490 NR Description: OSJNBa0006B20.5 [Oryza sativa (japonica
  misc_feature (239)..(445): Homolog of NCBI NO: 21740490 NR Description: OSJNBa0006B20.5 [Oryza sativa (japonica
  misc_feature (1)..(234): Homolog of NCBI NO: 15220337 NR Description: hypothetical protein; protein id: At1g11290.1
  misc_feature (239)..(443): Homolog of NCBI NO: 15220337 NR Description: hypothetical protein; protein id: At1g11290.1
  misc_feature (1)..(237): Homolog of NCBI NO: 15234006 NR Description: putative protein; protein id: At4g18750.1
  misc_feature (239)..(445): Homolog of NCBI NO: 15234006 NR Description: putative protein; protein id: At4g18750.1
  misc_feature (1)..(234): Homolog of NCBI NO: 15226737 NR Description: unknown protein; protein id: At2g40720.1
  misc_feature (241)..(445): Homolog of NCBI NO: 15226737 NR Description: unknown protein; protein id: At2g40720.1
MPLRNIVTWNILIHGVIQRDGDTNHRAHLGFCYLSRILFTDVSLDHVSFMGLIRLCTDSTNMKAGIQLHCLMVKQGLESSCFPSTSLVHFYGKCGLIVEARRVFEAVLDRDLVLWNALVSSYVLNGMIDEAFGLLKLMGSDKNRFRGDYFTFSSLLSACRIEQGKQIHAILFKVSYQFDIPVATALLNMYAKSNHLSDARECFESMVVRNVVSWNAMIVGFAQNGEGREAMRLFDFLSVANSLISSYSRNGNLSEALLCFHSIREPDLVSWTSVIGALASHGFAEESLQMFESMLQKLQPDKITFLEVLSACSHGGLVQEGLRCFKRMTEFYKIEAEDEHYTCLIDLLGRAGFIDEASDVLNSMPTEPSTHALAAFTGGCNIHEKRESMKWGAKKLLEIEPTKPVNYSILSNAYVSEGHWNQAALLRKRERRNCYNPKTPGCSWLGDYSI

SEQ ID NO: 78798 - DNA, 1361 bp, Arabidopsis thaliana
  misc_feature (1)..(1361): Ceres Seq. ID no. 12645327
  misc_feature: MA Experiment ID: 108435 Result: Up-regulated in Transcription
  misc_feature: MA Experiment 108435 PARAMETER Experiment Name: At_stm_Mutants_cDNA_P Parameter: Plant Line Value: wt Landsburg vs stm
  misc_feature: MA Experiment 108435 PARAMETER Experiment Name: At_stm_Mutants_cDNA_P Parameter: Tissue Value: Shoot Apical Meristem Region
  misc_feature: MA Experiment ID: 108573 Result: Up-regulated in Transcription
  misc_feature: MA Experiment 108573 PARAMETER Experiment Name: At_Drought_cDNA_P Parameter: Timepoint (hr) Value: 6
  misc_feature: MA Experiment 108573 PARAMETER Experiment Name: At_Drought_cDNA_P Parameter: Tissue Value: Aerial
  misc_feature: MA Experiment 108573 PARAMETER Experiment Name: At_Drought_cDNA_P Parameter: Treatment Value: Drought vs. No Drought
  misc_feature: MA Experiment ID: 108576 Result: Up-regulated in Transcription
  misc_feature: MA Experiment 108576 PARAMETER Experiment Name: At_42deg_Heat_cDNA_P Parameter: Temperature (deg C) Value: 42 vs. 22
  misc_feature: MA Experiment 108576 PARAMETER Experiment Name: At_42deg_Heat_cDNA_P Parameter: Timepoint (hr) Value: 1
  misc_feature: MA Experiment 108576 PARAMETER Experiment Name: At_42deg_Heat_cDNA_P Parameter: Tissue Value: Aerial
  misc_feature: MA Experiment ID: 20000185 Result: Down-regulated in Transcription
  misc_feature: MA Experiment 20000185 PARAMETER Experiment Name: At_Roots__P Parameter: Age (day) Value: 7 vs. 21
  misc_feature: MA Experiment 20000185 PARAMETER Experiment Name: At_Roots__P Parameter: Organism Value: A. thaliana
  misc_feature: MA Experiment 20000185 PARAMETER Experiment Name: At_Roots__P Parameter: Tissue Value: Roots vs. Whole Plant
  misc_feature: MA Experiment ID: 20000438 Result: Up-regulated in Transcription
  misc_feature: MA Experiment 20000438 PARAMETER Experiment Name: At_Shoots__P Parameter: Age (day) Value: 14
  misc_feature: MA Experiment 20000438 PARAMETER Experiment Name: At_Shoots__P Parameter: Tissue Value: Shoots vs. Whole Plant
  misc_feature: MA Experiment ID: 20000439 Result: Down-regulated in Transcription
  misc_feature: MA Experiment 20000439 PARAMETER Experiment Name: At_Roots__P Parameter: Age (day) Value: 14 vs. 21
  misc_feature: MA Experiment 20000439 PARAMETER Experiment Name: At_Roots__P Parameter: Organism Value: A. thaliana
  misc_feature: MA Experiment 20000439 PARAMETER Experiment Name: At_Roots__P Parameter: Tissue Value: Roots vs. Whole Plant
  misc_feature: MA Experiment ID: 20001905 Result: Up-regulated in Transcription
  misc_feature: MA Experiment 20001905 PARAMETER Experiment Name: At_Drought_Reproduction_P Parameter: Age (day) Value: 40
  misc_feature: MA Experiment 20001905 PARAMETER Experiment Name: At_Drought_Reproduction_P Parameter: Organism Value: A. thaliana
  misc_feature: MA Experiment 20001905 PARAMETER Experiment Name: At_Drought_Reproduction_P Parameter: Plant Line Value: WS
  misc_feature: MA Experiment 20001905 PARAMETER Experiment Name: At_Drought_Reproduction_P Parameter: Timepoint (day) Value: 10
  misc_feature: MA Experiment 20001905 PARAMETER Experiment Name: At_Drought_Reproduction_P Parameter: Tissue Value: Rosettes
  misc_feature: MA Experiment 20001905 PARAMETER Experiment Name: At_Drought_Reproduction_P Parameter: Treatment Value: Drought vs. No Drought
  misc_feature: MA Experiment ID: 20001911 Result: Up-regulated in Transcription
  misc_feature: MA Experiment 20001911 PARAMETER Experiment Name: At_Drought_Reproduction_P Parameter: Age (day) Value: 40
  misc_feature: MA Experiment 20001911 PARAMETER Experiment Name: At_Drought_Reproduction_P Parameter: Organism Value: A. thaliana
  misc_feature: MA Experiment 20001911 PARAMETER Experiment Name: At_Drought_Reproduction_P Parameter: Plant Line Value: WS
  misc_feature: MA Experiment 20001911 PARAMETER Experiment Name: At_Drought_Reproduction_P Parameter: Timepoint (day) Value: 10
  misc_feature: MA Experiment 20001911 PARAMETER Experiment Name: At_Drought_Reproduction_P Parameter: Tissue Value: Flowers
  misc_feature: MA Experiment 20001911 PARAMETER Experiment Name: At_Drought_Reproduction_P Parameter: Treatment Value: Drought vs. No Drought
atggatttagtgtcttcaagagatactttaggagatccttcaacttcaacaaaagcccttcttcttggtttctctcgttctcggtctgatcattgcatcatcatgtctggagaatcaagctctggttctaccgaacattgcatcaaagttgtaccgacacacggtggccgctatgttcagtacaacgtttatggacaactctttgaagtttccagaaagtatgtccctcctattcgtcccattggtagaggcgcttgcggtattgtctgtgctgcggtgaactcagtgactggagagaaagtggctattaagaagatcggtaatgcttttgataacatcatcgatgctaagagaacgctacgtgaaattaaacttctcaggcatatggatcatgagaacgttataaccatcaaagatattgtaagacctccgcaacgagatatcttcaatgatgtctacattgtctatgagttaatggacactgatcttcagcgaatcctccgttctaaccaaacactgaccagtgatcaatgccgtttcctagtataccagctcttaagagggctcaaatacgtgcactcggccaacatattacatcgtgatctaaggccaagcaacgtgctacttaactcgaaaaacgagctaaagattggtgattttgggcttgcaagaacaacttccgacacagacttcatgactgaatatgtcgttacccgttggtacagggctcctgagttgcttcttaactgctcagagtacaccgcagctattgatatttggtctgttggctgcatactcggcgaaatcatgacgggacaaccgttgtttccaggcaaagattatgttcatcagcttaggcttataacagagcttgtaggctctccagacaattccagcctcggcttccttcgcagtgacaacgcaagaagatacgtcaggcaacttccgcgatacccgaaacaacagtttgctgctagattcccgaaaatgcccactacggctatcgatttgcttgagagaatgctcgtctttgatcctaaccggcgcatctcagtcgatgaagcccttggccatgcttacctatcaccgcaccatgatgtggccaaagaaccggtctgttcgactcctttcagctttgatttcgaacatccttcttgcacagaagaacacataaaggagcttatctacaaggagtctgtcaaattcaatcctgaccactgagagagaaacatgtttgaatgatttgattcctttttaaaagtctgctccgtttggtttgatctaagattcctttatattgaatctaaactcattttatctttgattgaataattgctatgatgatacacacatatttatcc

SEQ ID NO: 78799 - protein, 406 aa, Arabidopsis thaliana
  peptide (1)..(406): Ceres Seq. ID no. 12645328
  misc_feature (75)..(361): Pfam Name: Protein kinase domain Pfam Description: Protein kinase domain
  misc_feature (1)..(406): Homolog of NCBI NO: 25387109 NR Description: probable mitogen-activated protein kinase
  misc_feature (35)..(406): Homolog of NCBI NO: 30690210 NR Description: mitogen-activated protein kinase (MAPK), putative
  misc_feature (38)..(405): Homolog of NCBI NO: 25052804 NR Description: mitogen-activated protein kinase 4 [Petroselinum
  misc_feature (35)..(404): Homolog of NCBI NO: 15234152 NR Description: MAP kinase 4 (MPK4); protein id: At4g01370.1, by cDNA: 7653., supported by cDNA: gi_13430637, supported by gi_14532813, supported by cDNA: gi_457399 [Arabidopsis thaliana]
  misc_feature (35)..(404): Homolog of NCBI NO: 2129645 NR Description: mitogen-activated protein kinase 4 (EC 2.7.1.-) - thaliana >gi|457400|dbj|BAA04867.1| MAP kinase [Arabidopsis
  misc_feature (43)..(405): Homolog of NCBI NO: 2129855 NR Description: mitogen-activated protein kinase MMK2 (EC
  misc_feature (43)..(405): Homolog of NCBI NO: 2499613 NR Description: MITOGEN-ACTIVATED PROTEIN KINASE HOMOLOG MMK2
  misc_feature (51)..(404): Homolog of NCBI NO: 18378855 NR Description: MAP kinase, putative; protein id: At1g01560.1
  misc_feature (39)..(405): Homolog of NCBI NO: 27312014 NR Description: mitogen-activated protein kinase [Malus
  misc_feature (37)..(406): Homolog of NCBI NO: 21165527 NR Description: mitogen-activated protein kinase [Solanum
MDLVSSRDTLGDPSTSTKALLLGFSRSRSDHCIIMSGESSSGSTEHCIKVVPTHGGRYVQYNVYGQLFEVSRKYVPPIRPIGRGACGIVCAAVNSVTGEKVAIKKIGNAFDNIIDAKRTLREIKLLRHMDHENVITIKDIVRPPQRDIFNDVYIVYELMDTDLQRILRSNQTLTSDQCRFLVYQLLRGLKYVHSANILHRDLRPSNVLLNSKNELKIGDFGLARTTSDTDFMTEYVVTRWYRAPELLLNCSEYTAAIDIWSVGCILGEIMTGQPLFPGKDYVHQLRLITELVGSPDNSSLGFLRSDNARRYVRQLPRYPKQQFAARFPKMPTTAIDLLERMLVFDPNRRISVDEALGHAYLSPHHDVAKEPVCSTPFSFDFEHPSCTEEHIKELIYKESVKFNPDH

SEQ ID NO: 78800 - protein, 372 aa, Arabidopsis thaliana; identical to SEQ ID NO: 23972
  peptide (1)..(372): Ceres Seq. ID no. 12645329
  misc_feature (41)..(327): Pfam Name: Protein kinase domain Pfam Description: Protein kinase domain
  misc_feature (1)..(372): Homolog of NCBI NO: 25387109 NR Description: probable mitogen-activated protein kinase
  misc_feature (1)..(372): Homolog of NCBI NO: 30690210 NR Description: mitogen-activated protein kinase (MAPK), putative
  misc_feature (4)..(371): Homolog of NCBI NO: 25052804 NR Description: mitogen-activated protein kinase 4 [Petroselinum
  misc_feature (1)..(370): Homolog of NCBI NO: 15234152 NR Description: MAP kinase 4 (MPK4); protein id: At4g01370.1, by cDNA: 7653., supported by cDNA: gi_13430637, supported by gi_14532813, supported by cDNA: gi_457399 [Arabidopsis thaliana]
  misc_feature (1)..(370): Homolog of NCBI NO: 2129645 NR Description: mitogen-activated protein kinase 4 (EC 2.7.1.-) - thaliana >gi|457400|dbj|BAA04867.1| MAP kinase [Arabidopsis
  misc_feature (9)..(371): Homolog of NCBI NO: 2129855 NR Description: mitogen-activated protein kinase MMK2 (EC
  misc_feature (9)..(371): Homolog of NCBI NO: 2499613 NR Description: MITOGEN-ACTIVATED PROTEIN KINASE HOMOLOG MMK2
  misc_feature (17)..(370): Homolog of NCBI NO: 18378855 NR Description: MAP kinase, putative; protein id: At1g01560.1
  misc_feature (5)..(371): Homolog of NCBI NO: 27312014 NR Description: mitogen-activated protein kinase [Malus
  misc_feature (3)..(372): Homolog of NCBI NO: 21165527 NR Description: mitogen-activated protein kinase [Solanum

SEQ ID NO: 78801 - protein, 278 aa, Arabidopsis thaliana; identical to SEQ ID NO: 23973
  peptide (1)..(278): Ceres Seq. ID no. 12645330
  misc_feature (1)..(233): Pfam Name: Protein kinase domain Pfam Description: Protein kinase domain
  misc_feature (1)..(278): Homolog of NCBI NO: 25387109 NR Description: probable mitogen-activated protein kinase
  misc_feature (1)..(278): Homolog of NCBI NO: 30690210 NR Description: mitogen-activated protein kinase (MAPK), putative
  misc_feature (1)..(277): Homolog of NCBI NO: 25052804 NR Description: mitogen-activated protein kinase 4 [Petroselinum
  misc_feature (1)..(276): Homolog of NCBI NO: 15234152 NR Description: MAP kinase 4 (MPK4); protein id: At4g01370.1, by cDNA: 7653., supported by cDNA: gi_13430637, supported by gi_14532813, supported by cDNA: gi_457399 [Arabidopsis thaliana]
  misc_feature (1)..(276): Homolog of NCBI NO: 2129645 NR Description: mitogen-activated protein kinase 4 (EC 2.7.1.-) - thaliana >gi|457400|dbj|BAA04867.1| MAP kinase [Arabidopsis
  misc_feature (1)..(277): Homolog of NCBI NO: 2129855 NR Description: mitogen-activated protein kinase MMK2 (EC
  misc_feature (1)..(277): Homolog of NCBI NO: 2499613 NR Description: MITOGEN-ACTIVATED PROTEIN KINASE HOMOLOG MMK2
  misc_feature (1)..(276): Homolog of NCBI NO: 18378855 NR Description: MAP kinase, putative; protein id: At1g01560.1
  misc_feature (1)..(277): Homolog of NCBI NO: 27312014 NR Description: mitogen-activated protein kinase [Malus
  misc_feature (1)..(278): Homolog of NCBI NO: 21165527 NR Description: mitogen-activated protein kinase [Solanum

SEQ ID NO: 78802 - DNA, 1806 bp, Arabidopsis thaliana
  misc_feature (1)..(1806): Ceres Seq. ID no. 12645331
  misc_feature: MA Experiment ID: 20000227 Result: Down-regulated in Transcription
  misc_feature: MA Experiment 20000227 PARAMETER Experiment Name: At_Root-Tips-vs-Tops_P Parameter: Tissue Value: Root Tips vs. Root Tops
  misc_feature: MA Experiment ID: 20000264 Result: Up-regulated in Transcription
  misc_feature: MA Experiment 20000264 PARAMETER Experiment Name: At_Open_Flower_P Parameter: Age (day) Value: 21
  misc_feature: MA Experiment 20000264 PARAMETER Experiment Name: At_Open_Flower_P Parameter: Plant Line Value: WS
  misc_feature: MA Experiment 20000264 PARAMETER Experiment Name: At_Open_Flower_P Parameter: Tissue Value: Open Flower vs. Whole Plant
  misc_feature: MA Experiment ID: 20000438 Result: Up-regulated in Transcription
  misc_feature: MA Experiment 20000438 PARAMETER Experiment Name: At_Shoots__P Parameter: Age (day) Value: 14
  misc_feature: MA Experiment 20000438 PARAMETER Experiment Name: At_Shoots__P Parameter: Tissue Value: Shoots vs. Whole Plant
  misc_feature: MA Experiment ID: 20000495 Result: Down-regulated in Transcription
  misc_feature: MA Experiment 20000495 PARAMETER Experiment Name: At_Guard_Cells_P Parameter: Harvest Date Value: 8/2/2002
  misc_feature: MA Experiment 20000495 PARAMETER Experiment Name: At_Guard_Cells_P Parameter: Organism Value: A. thaliana
  misc_feature: MA Experiment 20000495 PARAMETER Experiment Name: At_Guard_Cells_P Parameter: Tissue Value: Guard Cells vs. Leaves
  misc_feature: MA Experiment ID: 20001248 Result: Down-regulated in Transcription
  misc_feature: MA Experiment 20001248 PARAMETER Experiment Name: At_Far-red-induction_P Parameter: Age (day) Value: 7
  misc_feature: MA Experiment 20001248 PARAMETER Experiment Name: At_Far-red-induction_P Parameter: Light Value: Far-red vs. White
  misc_feature: MA Experiment 20001248 PARAMETER Experiment Name: At_Far-red-induction_P Parameter: Organism Value: A. thaliana
  misc_feature: MA Experiment 20001248 PARAMETER Experiment Name: At_Far-red-induction_P Parameter: Plant Line Value: Columbia
  misc_feature: MA Experiment 20001248 PARAMETER Experiment Name: At_Far-red-induction_P Parameter: Timepoint (hr) Value: 4
  misc_feature: MA Experiment 20001248 PARAMETER Experiment Name: At_Far-red-induction_P Parameter: Tissue Value: Whole Plant
  misc_feature: MA Experiment ID: 20001450 Result: Down-regulated in Transcription
  misc_feature: MA Experiment 20001450 PARAMETER Experiment Name: At_Far-red-induction_P Parameter: Age (day) Value: 7
  misc_feature: MA Experiment 20001450 PARAMETER Experiment Name: At_Far-red-induction_P Parameter: Light Value: Far-red vs. White
  misc_feature: MA Experiment 20001450 PARAMETER Experiment Name: At_Far-red-induction_P Parameter: Organism Value: A. thaliana
  misc_feature: MA Experiment 20001450 PARAMETER Experiment Name: At_Far-red-induction_P Parameter: Plant Line Value: Columbia
  misc_feature: MA Experiment 20001450 PARAMETER Experiment Name: At_Far-red-induction_P Parameter: Timepoint (hr) Value: 8
  misc_feature: MA Experiment 20001450 PARAMETER Experiment Name: At_Far-red-induction_P Parameter: Tissue Value: Whole Plant
  misc_feature: MA Experiment ID: 20001557 Result: Down-regulated in Transcription
  misc_feature: MA Experiment 20001557 PARAMETER Experiment Name: At_Drought_Soil_Dry_P Parameter: Age (day) Value: 27
  misc_feature: MA Experiment 20001557 PARAMETER Experiment Name: At_Drought_Soil_Dry_P Parameter: Organism Value: A. thaliana
  misc_feature: MA Experiment 20001557 PARAMETER Experiment Name: At_Drought_Soil_Dry_P Parameter: Plant Line Value: WS
  misc_feature: MA Experiment 20001557 PARAMETER Experiment Name: At_Drought_Soil_Dry_P Parameter: Post Timepoint (hr) Value: 3
  misc_feature: MA Experiment 20001557 PARAMETER Experiment Name: At_Drought_Soil_Dry_P Parameter: Post-Treatment Value: Re-Water vs. No Drought
  misc_feature: MA Experiment 20001557 PARAMETER Experiment Name: At_Drought_Soil_Dry_P Parameter: Timepoint (day) Value: 13
  misc_feature: MA Experiment 20001557 PARAMETER Experiment Name: At_Drought_Soil_Dry_P Parameter: Treatment Value: Drought vs. No Drought
  misc_feature: MA Experiment ID: 20001558 Result: Down-regulated in Transcription
  misc_feature: MA Experiment 20001558 PARAMETER Experiment Name: At_Drought_Soil_Dry_P Parameter: Age (day) Value: 27
  misc_feature: MA Experiment 20001558 PARAMETER Experiment Name: At_Drought_Soil_Dry_P Parameter: Organism Value: A. thaliana
  misc_feature: MA Experiment 20001558 PARAMETER Experiment Name: At_Drought_Soil_Dry_P Parameter: Plant Line Value: WS
  misc_feature: MA Experiment 20001558 PARAMETER Experiment Name: At_Drought_Soil_Dry_P Parameter: Post Timepoint (hr) Value: 6
  misc_feature: MA Experiment 20001558 PARAMETER Experiment Name: At_Drought_Soil_Dry_P Parameter: Post-Treatment Value: Re-Water vs. No Drought
  misc_feature: MA Experiment 20001558 PARAMETER Experiment Name: At_Drought_Soil_Dry_P Parameter: Timepoint (day) Value: 13
  misc_feature: MA Experiment 20001558 PARAMETER Experiment Name: At_Drought_Soil_Dry_P Parameter: Treatment Value: Drought vs. No Drought
atgctacgatccacttgctgcactccactttgccctttcacggcgaaacaaccttctttccttaggaaacagcaacgtattacctctgatcgcttcacctttcgcggtggtggtggtggcgatgccgccgccgtcgtctcctcctccggcctccgtgatctcgttttcgtcgtaaaccctcaaggtgctaatggtagaacagctaaagaatggaagaagttgcttcctcaccttcgatctcgtcttggtaaagactgtaatgtaagtgaattattaacatcgggtccttctcatgccattgacattacaagagaggctataagggatggtgcagatgctgtcattgcggttggaggtgatggaacacttcatgaggttgttaatggtttcttttgggaggggaaacctgtcggttatctcagtggggaagctagtcgatcgactgcacttggtctgattcccttaggtactggctcagattttgctagaacatttggttggaacaatgatccttgtgaagcagtggagcgcattgctagagggatgcgatcacggattgatgttggtgttatcgacaaggaaggaaaggatttgcattacttcatcaatgtagctgatgttcatttgagcgcaaaggcaggattttacgcttcaaaatacaagaaatttggaaacttgtgctacgtaattggtgccctacaagcgttcatgggccatcataaccaagatatgagaatcagagtcaatggaggcgaatgggaaatatatccccaggtcactgctctctgcgttggaaacgcaaaatactttggtggtggaatgaaaatcacacccaacgccatccctggaaatggaaatcttgaggttgtggttcttcaaaacttcaaatggtatgatttcgtacttaaacttcataagctgtacaacgggactcatctttcggttaacaatgtgacttcaagaagtgtacaaagcatcgaagttgaagagattacagacagtggaagtatctatgtgcagtcagatggagaacatcttggattcctacctagaaagtttcaggtgttacccggtgccatagacataatcacttctctttcctttcattccatcgccaccgttaatccaatcttctccggcgatggtggtcgttcaatcttccggactaatcgccgattcgaagcaactggagtgagttgccgaggacagaatcctactgacgagccacagacaagtaaaggacccgagccggataatgttctactcaaaatcgcttggtacggatctgagctactcggaatagctgcttctgttttccgatctccggagacttctccgattgtgacaggctttgaggttcctgttgattgttctggtcgagccgttcgtgtagctgtcgtggactcgattaaacaagactttaaacgatcctacttcgtcacaggtaatttgacgccggaggtttatgaggagaagtgtgaattcgctgatccggctggatccttcaagggtcttgctcgtttcaaaaggaattgcactaatttcggaagccttatcgagaaatccaatatgaagctcatgaaatgggagaattttgaggataaaggaattggacattggaaatttagctgtgtcatgtcgtttccatggaaacccattctttcagcaactggttacacggagtattatttcgacacagaatccgggaaaatttgcaggcacgtggagcattggaatgtccctaagattgctctgttcaaacaacttctgagacccagccgtggtttagtggggacacaaaactag

SEQ ID NO: 78803 - protein, 601 aa, Arabidopsis thaliana
  peptide (1)..(601): Ceres Seq. ID no. 12645332
  misc_feature (53)..(194): Pfam Name: Diacylglycerol kinase catalytic domain (presumed) Pfam Description: Diacylglycerol kinase catalytic domain
  misc_feature (1)..(364): Homolog of NCBI NO: 18406971 NR Description: expressed protein; protein id: At2g46090.1, by cDNA: gi_14423553 [Arabidopsis thaliana]
  misc_feature (362)..(601): Homolog of NCBI NO: 30690220 NR Description: expressed protein [Arabidopsis thaliana]
  misc_feature (1)..(211): Homolog of NCBI NO: 14423554 NR Description: Unknown protein [Arabidopsis thaliana]
  misc_feature (362)..(601): Homolog of NCBI NO: 25370832 NR Description: hypothetical protein At2g46100 [imported] - thaliana >gi|3702337|gb|AAC62894.1| unknown protein [Arabidopsis
  misc_feature (57)..(362): Homolog of NCBI NO: 13472344 NR Description: hypothetical protein [Mesorhizobium loti]
  misc_feature (53)..(363): Homolog of NCBI NO: 33413155 NR Description: hypothetical protein [Thermotoga sp. RQ2]
  misc_feature (54)..(363): Homolog of NCBI NO: 15643126 NR Description: conserved hypothetical protein [Thermotoga
  misc_feature (57)..(363): Homolog of NCBI NO: 15614516 NR Description: BH1953~unknown conserved protein [Bacillus
  misc_feature (150)..(363): Homolog of NCBI NO: 17230373 NR Description: hypothetical protein [Nostoc sp. PCC 7120]
  misc_feature (57)..(366): Homolog of NCBI NO: 29349730 NR Description: conserved hypothetical protein, with a
MLRSTCCTPLCPFTAKQPSFLRKQQRITSDRFTFRGGGGGDAAAVVSSSGLRDLVFVVNPQGANGRTAKEWKKLLPHLRSRLGKDCNVSELLTSGPSHAIDITREAIRDGADAVIAVGGDGTLHEVVNGFFWEGKPVGYLSGEASRSTALGLIPLGTGSDFARTFGWNNDPCEAVERIARGMRSRIDVGVIDKEGKDLHYFINVADVHLSAKAGFYASKYKKFGNLCYVIGALQAFMGHHNQDMRIRVNGGEWEIYPQVTALCVGNAKYFGGGMKITPNAIPGNGNLEVVVLQNFKWYDFVLKLHKLYNGTHLSVNNVTSRSVQSIEVEEITDSGSIYVQSDGEHLGFLPRKFQVLPGAIDIITSLSFHSIATVNPIFSGDGGRSIFRTNRRFEATGVSCRGQNPTDEPQTSKGPEPDNVLLKIAWYGSELLGIAASVFRSPETSPIVTGFEVPVDCSGRAVRVAVVDSIKQDFKRSYFVTGNLTPEVYEEKCEFADPAGSFKGLARFKRNCTNFGSLIEKSNMKLMKWENFEDKGIGHWKFSCVMSFPWKPILSATGYTEYYFDTESGKICRHVEHWNVPKIALFKQLLRPSRGLVGTQN

SEQ ID NO: 78804 - protein, 420 aa, Arabidopsis thaliana
  peptide (1)..(420): Ceres Seq. ID no. 12645333
  misc_feature (1)..(183): Homolog of NCBI NO: 18406971 NR Description: expressed protein; protein id: At2g46090.1, by cDNA: gi_14423553 [Arabidopsis thaliana]
  misc_feature (181)..(420): Homolog of NCBI NO: 30690220 NR Description: expressed protein [Arabidopsis thaliana]
  misc_feature (1)..(30): Homolog of NCBI NO: 14423554 NR Description: Unknown protein [Arabidopsis thaliana]
  misc_feature (181)..(420): Homolog of NCBI NO: 25370832 NR Description: hypothetical protein At2g46100 [imported] - thaliana >gi|3702337|gb|AAC62894.1| unknown protein [Arabidopsis
  misc_feature (1)..(181): Homolog of NCBI NO: 13472344 NR Description: hypothetical protein [Mesorhizobium loti]
  misc_feature (1)..(182): Homolog of NCBI NO: 33413155 NR Description: hypothetical protein [Thermotoga sp. RQ2]
  misc_feature (1)..(182): Homolog of NCBI NO: 15643126 NR Description: conserved hypothetical protein [Thermotoga
  misc_feature (1)..(182): Homolog of NCBI NO: 15614516 NR Description: BH1953~unknown conserved protein [Bacillus
  misc_feature (1)..(182): Homolog of NCBI NO: 17230373 NR Description: hypothetical protein [Nostoc sp. PCC 7120]
  misc_feature (1)..(185): Homolog of NCBI NO: 29349730 NR Description: conserved hypothetical protein, with a
MRSRIDVGVIDKEGKDLHYFINVADVHLSAKAGFYASKYKKFGNLCYVIGALQAFMGHHNQDMRIRVNGGEWEIYPQVTALCVGNAKYFGGGMKITPNAIPGNGNLEVVVLQNFKWYDFVLKLHKLYNGTHLSVNNVTSRSVQSIEVEEITDSGSIYVQSDGEHLGFLPRKFQVLPGAIDIITSLSFHSIATVNPIFSGDGGRSIFRTNRRFEATGVSCRGQNPTDEPQTSKGPEPDNVLLKIAWYGSELLGIAASVFRSPETSPIVTGFEVPVDCSGRAVRVAVVDSIKQDFKRSYFVTGNLTPEVYEEKCEFADPAGSFKGLARFKRNCTNFGSLIEKSNMKLMKWENFEDKGIGHWKFSCVMSFPWKPILSATGYTEYYFDTESGKICRHVEHWNVPKIALFKQLLRPSRGLVGTQN

SEQ ID NO: 78805 - protein, 365 aa, Arabidopsis thaliana
  peptide (1)..(365): Ceres Seq. ID no. 12645334
  misc_feature (1)..(128): Homolog of NCBI NO: 18406971 NR Description: expressed protein; protein id: At2g46090.1, by cDNA: gi_14423553 [Arabidopsis thaliana]
  misc_feature (126)..(365): Homolog of NCBI NO: 30690220 NR Description: expressed protein [Arabidopsis thaliana]
  misc_feature (126)..(365): Homolog of NCBI NO: 25370832 NR Description: hypothetical protein At2g46100 [imported] - thaliana >gi|3702337|gb|AAC62894.1| unknown protein [Arabidopsis
  misc_feature (1)..(126): Homolog of NCBI NO: 13472344 NR Description: hypothetical protein [Mesorhizobium loti]
  misc_feature (1)..(127): Homolog of NCBI NO: 33413155 NR Description: hypothetical protein [Thermotoga sp. RQ2]
  misc_feature (1)..(127): Homolog of NCBI NO: 15643126 NR Description: conserved hypothetical protein [Thermotoga
  misc_feature (1)..(127): Homolog of NCBI NO: 15614516 NR Description: BH1953~unknown conserved protein [Bacillus
  misc_feature (1)..(127): Homolog of NCBI NO: 17230373 NR Description: hypothetical protein [Nostoc sp. PCC 7120]
  misc_feature (1)..(130): Homolog of NCBI NO: 29349730 NR Description: conserved hypothetical protein, with a
  misc_feature (1)..(132): Homolog of NCBI NO: 23098222 NR Description: hypothetical protein [Oceanobacillus iheyensis >gi|22776447|dbj|BAC12723.1| hypothetical conserved protein
MGHHNQDMRIRVNGGEWEIYPQVTALCVGNAKYFGGGMKITPNAIPGNGNLEVVVLQNFKWYDFVLKLHKLYNGTHLSVNNVTSRSVQSIEVEEITDSGSIYVQSDGEHLGFLPRKFQVLPGAIDIITSLSFHSIATVNPIFSGDGGRSIFRTNRRFEATGVSCRGQNPTDEPQTSKGPEPDNVLLKIAWYGSELLGIAASVFRSPETSPIVTGFEVPVDCSGRAVRVAVVDSIKQDFKRSYFVTGNLTPEVYEEKCEFADPAGSFKGLARFKRNCTNFGSLIEKSNMKLMKWENFEDKGIGHWKFSCVMSFPWKPILSATGYTEYYFDTESGKICRHVEHWNVPKIALFKQLLRPSRGLVGTQN

SEQ ID NO: 78806 - DNA, 642 bp, Arabidopsis thaliana
  misc_feature (1)..(642): Ceres Seq. ID no. 12645445
  misc_feature: MA Experiment ID: 20000264 Result: Up-regulated in Transcription
  misc_feature: MA Experiment 20000264 PARAMETER Experiment Name: At_Open_Flower_P Parameter: Age (day) Value: 21
  misc_feature: MA Experiment 20000264 PARAMETER Experiment Name: At_Open_Flower_P Parameter: Plant Line Value: WS
  misc_feature: MA Experiment 20000264 PARAMETER Experiment Name: At_Open_Flower_P Parameter: Tissue Value: Open Flower vs. Whole Plant
  misc_feature: MA Experiment ID: 20000286 Result: Up-regulated in Transcription
  misc_feature: MA Experiment 20000286 PARAMETER Experiment Name: At_Open_Flower_P Parameter: Age (day) Value: 21
  misc_feature: MA Experiment 20000286 PARAMETER Experiment Name: At_Open_Flower_P Parameter: Plant Line Value: WS
  misc_feature: MA Experiment 20000286 PARAMETER Experiment Name: At_Open_Flower_P Parameter: Tissue Value: Half Open vs. Whole Plant
  misc_feature: MA Experiment ID: 20000439 Result: Up-regulated in Transcription
  misc_feature: MA Experiment 20000439 PARAMETER Experiment Name: At_Roots__P Parameter: Age (day) Value: 14 vs. 21
  misc_feature: MA Experiment 20000439 PARAMETER Experiment Name: At_Roots__P Parameter: Organism Value: A. thaliana
  misc_feature: MA Experiment 20000439 PARAMETER Experiment Name: At_Roots__P Parameter: Tissue Value: Roots vs. Whole Plant
  misc_feature: MA Experiment ID: 20000794 Result: Up-regulated in Transcription
  misc_feature: MA Experiment 20000794 PARAMETER Experiment Name: At_Petals_P Parameter: Age (day) Value: 23-25 days
  misc_feature: MA Experiment 20000794 PARAMETER Experiment Name: At_Petals_P Parameter: Plant Line Value: WS
  misc_feature: MA Experiment 20000794 PARAMETER Experiment Name: At_Petals_P Parameter: Tissue Value: Petals vs. Whole plant
  misc_feature: MA Experiment ID: 20001450 Result: Down-regulated in Transcription
  misc_feature: MA Experiment 20001450 PARAMETER Experiment Name: At_Far-red-induction_P Parameter: Age (day) Value: 7
  misc_feature: MA Experiment 20001450 PARAMETER Experiment Name: At_Far-red-induction_P Parameter: Light Value: Far-red vs. White
  misc_feature: MA Experiment 20001450 PARAMETER Experiment Name: At_Far-red-induction_P Parameter: Organism Value: A. thaliana
  misc_feature: MA Experiment 20001450 PARAMETER Experiment Name: At_Far-red-induction_P Parameter: Plant Line Value: Columbia
  misc_feature: MA Experiment 20001450 PARAMETER Experiment Name: At_Far-red-induction_P Parameter: Timepoint (hr) Value: 8
  misc_feature: MA Experiment 20001450 PARAMETER Experiment Name: At_Far-red-induction_P Parameter: Tissue Value: Whole Plant
  misc_feature: MA Experiment ID: 20001910 Result: Up-regulated in Transcription
  misc_feature: MA Experiment 20001910 PARAMETER Experiment Name: At_Drought_Reproduction_P Parameter: Age (day) Value: 37
  misc_feature: MA Experiment 20001910 PARAMETER Experiment Name: At_Drought_Reproduction_P Parameter: Organism Value: A. thaliana
  misc_feature: MA Experiment 20001910 PARAMETER Experiment Name: At_Drought_Reproduction_P Parameter: Plant Line Value: WS
  misc_feature: MA Experiment 20001910 PARAMETER Experiment Name: At_Drought_Reproduction_P Parameter: Timepoint (day) Value: 7
  misc_feature: MA Experiment 20001910 PARAMETER Experiment Name: At_Drought_Reproduction_P Parameter: Tissue Value: Flowers
  misc_feature: MA Experiment 20001910 PARAMETER Experiment Name: At_Drought_Reproduction_P Parameter: Treatment Value: Drought vs. No Drought
  misc_feature: MA Experiment ID: 20001911 Result: Up-regulated in Transcription
  misc_feature: MA Experiment 20001911 PARAMETER Experiment Name: At_Drought_Reproduction_P Parameter: Age (day) Value: 40
  misc_feature: MA Experiment 20001911 PARAMETER Experiment Name: At_Drought_Reproduction_P Parameter: Organism Value: A. thaliana
  misc_feature: MA Experiment 20001911 PARAMETER Experiment Name: At_Drought_Reproduction_P Parameter: Plant Line Value: WS
  misc_feature: MA Experiment 20001911 PARAMETER Experiment Name: At_Drought_Reproduction_P Parameter: Timepoint (day) Value: 10
  misc_feature: MA Experiment 20001911 PARAMETER Experiment Name: At_Drought_Reproduction_P Parameter: Tissue Value: Flowers
  misc_feature: MA Experiment 20001911 PARAMETER Experiment Name: At_Drought_Reproduction_P Parameter: Treatment Value: Drought vs. No Drought
atgagtgaagaagcatatgaagaaactcaggaatcaagtcaatctcctcgtccggttccaaaactgaacgagaggattctctcaacactatccaggagatctgtagctgcacatccatggcacgaccttgagattggtcctgaagctccattggtcttcaatgtggtggttgagatcacaaagggaagcaaagtgaaatatgaactcgacaaaaagaccggtcttatcaaggttgaccggatcttgtactcctccgttgtttatccacacaattacggattcatcccacggacattgtgtgaagacaacgatcctcttgatgtccttgtccttatgcaggaaccagtgcttcccggatgtttcctccgtgctagagccattggattaatgcccatgattgatcagggagagaaagacgacaaaatcatagccgtatgtgctgatgatccagagtacaaacatttcacagacatcaaacaactcgctcctcatcgtctccaagaaatccgccgtttcttcgaagactataagaagaacgagaacaagaaagtggctgtcaacgatttcttgccatcagagagtgcacatgaagctattcaggatctatacgctgagtatattctccacacgttgaggagatga

SEQ ID NO: 78807 - protein, 213 aa, Arabidopsis thaliana
  peptide (1)..(213): Ceres Seq. ID no. 12645446
  misc_feature (54)..(205): Pfam Name: Inorganic pyrophosphatase Pfam Description: Inorganic pyrophosphatase
  misc_feature (1)..(213): Homolog of NCBI NO: 15226453 NR Description: putative inorganic pyrophosphatase; protein id: [Arabidopsis thaliana] >gi|7436034|pir||T02201 probable inorganic
  misc_feature (1)..(213): Homolog of NCBI NO: 26451240 NR Description: putative inorganic pyrophosphatase [Arabidopsis
  misc_feature (7)..(213): Homolog of NCBI NO: 15223288 NR Description: soluble inorganic pyrophosphatase, putative; id: At1g01050.1, supported by cDNA: 124537., supported by cDNA: supported by cDNA: gi_16323128, supported by cDNA:
  misc_feature (8)..(213): Homolog of NCBI NO: 5669924 NR Description: soluble inorganic pyrophosphatase [Populus
  misc_feature (7)..(175): Homolog of NCBI NO: 25290346 NR Description: protein T25K16.5 [imported] - Arabidopsis >gi|6715648|gb|AAF26475.1|AC007323_16 T25K16.5 [Arabidopsis
  misc_feature (177)..(213): Homolog of NCBI NO: 25290346 NR Description: protein T25K16.5 [imported] - Arabidopsis >gi|6715648|gb|AAF26475.1|AC007323_16 T25K16.5 [Arabidopsis
  misc_feature (1)..(213): Homolog of NCBI NO: 4033424 NR Description: Soluble inorganic pyrophosphatase (Pyrophosphate hydrolase) (PPase) >gi|7436036|pir||T01370 inorganic
  misc_feature (15)..(213): Homolog of NCBI NO: 2500047 NR Description: Soluble inorganic pyrophosphatase (Pyrophosphate hydrolase) (PPase) >gi|7436030|pir||T07594 probable inorganic
  misc_feature (1)..(213): Homolog of NCBI NO: 15234191 NR Description: putative inorganic phosphatase; protein id: supported by cDNA: gi_15450871, supported by cDNA: gi_20148676
  misc_feature (1)..(213): Homolog of NCBI NO: 38345829 NR Description: OSJNBa0070M12.12 [Oryza sativa (japonica
MSEEAYEETQESSQSPRPVPKLNERILSTLSRRSVAAHPWHDLEIGPEAPLVFNVVVEITKGSKVKYELDKKTGLIKVDRILYSSVVYPHNYGFIPRTLCEDNDPLDVLVLMQEPVLPGCFLRARAIGLMPMIDQGEKDDKIIAVCADDPEYKHFTDIKQLAPHRLQEIRRFFEDYKKNENKKVAVNDFLPSESAHEAIQDLYAEYILHTLRR

SEQ ID NO: 78808 - DNA, 1446 bp, Arabidopsis thaliana
  misc_feature (1)..(1446): Ceres Seq. ID no. 12645466
  misc_feature: MA Experiment ID: 20000180 Result: Up-regulated in Transcription
  misc_feature: MA Experiment 20000180 PARAMETER Experiment Name: At_Germinating_Seeds_P Parameter: Age (hr) Value: 24 vs. 0
  misc_feature: MA Experiment 20000180 PARAMETER Experiment Name: At_Germinating_Seeds_P Parameter: Tissue Value: Germinating Seeds
  misc_feature: MA Experiment ID: 20000184 Result: Up-regulated in Transcription
  misc_feature: MA Experiment 20000184 PARAMETER Experiment Name: At_Shoots__P Parameter: Age (day) Value: 7
  misc_feature: MA Experiment 20000184 PARAMETER Experiment Name: At_Shoots__P Parameter: Tissue Value: Shoots vs. Whole Plant
  misc_feature: MA Experiment ID: 20000185 Result: Down-regulated in Transcription
  misc_feature: MA Experiment 20000185 PARAMETER Experiment Name: At_Roots__P Parameter: Age (day) Value: 7 vs. 21
  misc_feature: MA Experiment 20000185 PARAMETER Experiment Name: At_Roots__P Parameter: Organism Value: A. thaliana
  misc_feature: MA Experiment 20000185 PARAMETER Experiment Name: At_Roots__P Parameter: Tissue Value: Roots vs. Whole Plant
  misc_feature: MA Experiment ID: 20000234 Result: Up-regulated in Transcription
  misc_feature: MA Experiment 20000234 PARAMETER Experiment Name: At_Siliques_P Parameter: Age (day) Value: 21
  misc_feature: MA Experiment 20000234 PARAMETER Experiment Name: At_Siliques_P Parameter: Organism Value: A. thaliana
  misc_feature: MA Experiment 20000234 PARAMETER Experiment Name: At_Siliques_P Parameter: Plant Line Value: WS
  misc_feature: MA Experiment 20000234 PARAMETER Experiment Name: At_Siliques_P Parameter: Tissue Value: Less Than 5mm Siliques vs. Whole Plant
  misc_feature: MA Experiment ID: 20000235 Result: Up-regulated in Transcription
  misc_feature: MA Experiment 20000235 PARAMETER Experiment Name: At_Siliques_P Parameter: Age (day) Value: 21
  misc_feature: MA Experiment 20000235 PARAMETER Experiment Name: At_Siliques_P Parameter: Organism Value: A. thaliana
  misc_feature: MA Experiment 20000235 PARAMETER Experiment Name: At_Siliques_P Parameter: Plant Line Value: WS
  misc_feature: MA Experiment 20000235 PARAMETER Experiment Name: At_Siliques_P Parameter: Tissue Value: 5-10mm Siliques vs. Whole Plant
  misc_feature: MA Experiment ID: 20000264 Result: Up-regulated in Transcription
  misc_feature: MA Experiment 20000264 PARAMETER Experiment Name: At_Open_Flower_P Parameter: Age (day) Value: 21
  misc_feature: MA Experiment 20000264 PARAMETER Experiment Name: At_Open_Flower_P Parameter: Plant Line Value: WS
  misc_feature: MA Experiment 20000264 PARAMETER Experiment Name: At_Open_Flower_P Parameter: Tissue Value: Open Flower vs. Whole Plant
  misc_feature: MA Experiment ID: 20000265 Result: Up-regulated in Transcription
  misc_feature: MA Experiment 20000265 PARAMETER Experiment Name: At_Open_Flower_P Parameter: Age (day) Value: 21
  misc_feature: MA Experiment 20000265 PARAMETER Experiment Name: At_Open_Flower_P Parameter: Plant Line Value: WS
  misc_feature: MA Experiment 20000265 PARAMETER Experiment Name: At_Open_Flower_P Parameter: Tissue Value: Closed Flower vs. Whole Plant
  misc_feature: MA Experiment ID: 20000286 Result: Up-regulated in Transcription
  misc_feature: MA Experiment 20000286 PARAMETER Experiment Name: At_Open_Flower_P Parameter: Age (day) Value: 21
  misc_feature: MA Experiment 20000286 PARAMETER Experiment Name: At_Open_Flower_P Parameter: Plant Line Value: WS
  misc_feature: MA Experiment 20000286 PARAMETER Experiment Name: At_Open_Flower_P Parameter: Tissue Value: Half Open vs. Whole Plant
  misc_feature: MA Experiment ID: 20000451 Result: Up-regulated in Transcription
  misc_feature: MA Experiment 20000451 PARAMETER Experiment Name: At_CS6879_Shoots-Roots_P Parameter: Age (day) Value: 14
  misc_feature: MA Experiment 20000451 PARAMETER Experiment Name: At_CS6879_Shoots-Roots_P Parameter: Organism Value: A. thaliana
  misc_feature: MA Experiment 20000451 PARAMETER Experiment Name: At_CS6879_Shoots-Roots_P Parameter: Plant Line Value: CS6879 vs. WS
  misc_feature: MA Experiment 20000451 PARAMETER Experiment Name: At_CS6879_Shoots-Roots_P Parameter: Tissue Value: Roots
  misc_feature: MA Experiment ID: 20000495 Result: Up-regulated in Transcription
  misc_feature: MA Experiment 20000495 PARAMETER Experiment Name: At_Guard_Cells_P Parameter: Harvest Date Value: 8/2/2002
  misc_feature: MA Experiment 20000495 PARAMETER Experiment Name: At_Guard_Cells_P Parameter: Organism Value: A. thaliana
  misc_feature: MA Experiment 20000495 PARAMETER Experiment Name: At_Guard_Cells_P Parameter: Tissue Value: Guard Cells vs. Leaves
  misc_feature: MA Experiment ID: 20001450 Result: Down-regulated in Transcription
  misc_feature: MA Experiment 20001450 PARAMETER Experiment Name: At_Far-red-induction_P Parameter: Age (day) Value: 7
  misc_feature: MA Experiment 20001450 PARAMETER Experiment Name: At_Far-red-induction_P Parameter: Light Value: Far-red vs. White
  misc_feature: MA Experiment 20001450 PARAMETER Experiment Name: At_Far-red-induction_P Parameter: Organism Value: A. thaliana
  misc_feature: MA Experiment 20001450 PARAMETER Experiment Name: At_Far-red-induction_P Parameter: Plant Line Value: Columbia
  misc_feature: MA Experiment 20001450 PARAMETER Experiment Name: At_Far-red-induction_P Parameter: Timepoint (hr) Value: 8
  misc_feature: MA Experiment 20001450 PARAMETER Experiment Name: At_Far-red-induction_P Parameter: Tissue Value: Whole Plant
  misc_feature: MA Experiment ID: 20001555 Result: Down-regulated in Transcription
  misc_feature: MA Experiment 20001555 PARAMETER Experiment Name: At_Drought_Soil_Dry_P Parameter: Age (day) Value: 24
  misc_feature: MA Experiment 20001555 PARAMETER Experiment Name: At_Drought_Soil_Dry_P Parameter: Organism Value: A. thaliana
  misc_feature: MA Experiment 20001555 PARAMETER Experiment Name: At_Drought_Soil_Dry_P Parameter: Plant Line Value: WS
  misc_feature: MA Experiment 20001555 PARAMETER Experiment Name: At_Drought_Soil_Dry_P Parameter: Post Timepoint (hr) Value: None
  misc_feature: MA Experiment 20001555 PARAMETER Experiment Name: At_Drought_Soil_Dry_P Parameter: Post-Treatment Value: None
  misc_feature: MA Experiment 20001555 PARAMETER Experiment Name: At_Drought_Soil_Dry_P Parameter: Timepoint (day) Value: 10
  misc_feature: MA Experiment 20001555 PARAMETER Experiment Name: At_Drought_Soil_Dry_P Parameter: Treatment Value: Drought vs. No Drought
  misc_feature: MA Experiment ID: 20001906 Result: Down-regulated in Transcription
  misc_feature: MA Experiment 20001906 PARAMETER Experiment Name: At_Drought_Reproduction_P Parameter: Age (day) Value: 35
  misc_feature: MA Experiment 20001906 PARAMETER Experiment Name: At_Drought_Reproduction_P Parameter: Organism Value: A. thaliana
  misc_feature: MA Experiment 20001906 PARAMETER Experiment Name: At_Drought_Reproduction_P Parameter: Plant Line Value: WS
  misc_feature: MA Experiment 20001906 PARAMETER Experiment Name: At_Drought_Reproduction_P Parameter: Timepoint (day) Value: 5
  misc_feature: MA Experiment 20001906 PARAMETER Experiment Name: At_Drought_Reproduction_P Parameter: Tissue Value: Siliques
  misc_feature: MA Experiment 20001906 PARAMETER Experiment Name: At_Drought_Reproduction_P Parameter: Treatment Value: Drought vs. No Drought
  misc_feature: MA Experiment ID: 20001907 Result: Down-regulated in Transcription
  misc_feature: MA Experiment 20001907 PARAMETER Experiment Name: At_Drought_Reproduction_P Parameter: Age (day) Value: 37
  misc_feature: MA Experiment 20001907 PARAMETER Experiment Name: At_Drought_Reproduction_P Parameter: Organism Value: A. thaliana
  misc_feature: MA Experiment 20001907 PARAMETER Experiment Name: At_Drought_Reproduction_P Parameter: Plant Line Value: WS
  misc_feature: MA Experiment 20001907 PARAMETER Experiment Name: At_Drought_Reproduction_P Parameter: Timepoint (day) Value: 7
  misc_feature: MA Experiment 20001907 PARAMETER Experiment Name: At_Drought_Reproduction_P Parameter: Tissue Value: Siliques
  misc_feature: MA Experiment 20001907 PARAMETER Experiment Name: At_Drought_Reproduction_P Parameter: Treatment Value: Drought vs. No Drought
  misc_feature: MA Experiment ID: 20001910 Result: Down-regulated in Transcription
  misc_feature: MA Experiment 20001910 PARAMETER Experiment Name: At_Drought_Reproduction_P Parameter: Age (day) Value: 37
  misc_feature: MA Experiment 20001910 PARAMETER Experiment Name: At_Drought_Reproduction_P Parameter: Organism Value: A. thaliana
  misc_feature: MA Experiment 20001910 PARAMETER Experiment Name: At_Drought_Reproduction_P Parameter: Plant Line Value: WS
  misc_feature: MA Experiment 20001910 PARAMETER Experiment Name: At_Drought_Reproduction_P Parameter: Timepoint (day) Value: 7
  misc_feature: MA Experiment 20001910 PARAMETER Experiment Name: At_Drought_Reproduction_P Parameter: Tissue Value: Flowers
  misc_feature: MA Experiment 20001910 PARAMETER Experiment Name: At_Drought_Reproduction_P Parameter: Treatment Value: Drought vs. No Drought
  misc_feature: MA Experiment ID: 20001911 Result: Down-regulated in Transcription
  misc_feature: MA Experiment 20001911 PARAMETER Experiment Name: At_Drought_Reproduction_P Parameter: Age (day) Value: 40
  misc_feature: MA Experiment 20001911 PARAMETER Experiment Name: At_Drought_Reproduction_P Parameter: Organism Value: A. thaliana
  misc_feature: MA Experiment 20001911 PARAMETER Experiment Name: At_Drought_Reproduction_P Parameter: Plant Line Value: WS
  misc_feature: MA Experiment 20001911 PARAMETER Experiment Name: At_Drought_Reproduction_P Parameter: Timepoint (day) Value: 10
  misc_feature: MA Experiment 20001911 PARAMETER Experiment Name: At_Drought_Reproduction_P Parameter: Tissue Value: Flowers
  misc_feature: MA Experiment 20001911 PARAMETER Experiment Name: At_Drought_Reproduction_P Parameter: Treatment Value: Drought vs. No Drought
atgaagcaactggctccaatcttggccgtggtaaacttgatcctcctggttcatggagacgagagatcagcggttggagatcctgggatgaagagagacggtctcagagtggcatttgaagcttggaacttctgcaatgaggttggcttcgaagctcctcacatgggtagtcctcgagctgcagattgcttcgatttgtcatctaaatgcatcaaagcatacacagaagaccaatcaaacaaaaccaccagtggatcttccttggtgcacaaggtatcagactcggataatgagctagggattggaaagcctaaaccaggaatcatatcagaatcagcattgcataaccctgacctttacgcggtcgagaaagaactctacctaggctccctctgtcaagtctcagacaaaccaaacccatggagtttctggatggtcatgctcaaaaatggaaactacgacacaaaatctgctctttgccctaaaaacggcaaaaagatcccacctttcaatcaacccggattattcccctgtttcggcagcggttgtatgaaccaaccgacgctgaaccacggaaaaaccgagcttcagagagatggtcaaaccatgaagggatggttcaatggtacgtacgagcaaggggcagattttggaaatgggttggatgggataagttattacgaggttgtgtgggagaagagagtaggcgttggtggttgggtatttaaacataagcttaagacttcagctaagtacccatggcttatgctttaccttagagctgatgccactaaaggattctctggtggataccattatgacactagaggaatgctcaaaacacttccggagtcaccaaactttaaagtgagactaacactaaatgtaaaacaaggaggcggagccaagagtcaattctatcttctcgacatcggaagctgctggaaaaacaacggcaagccctgcgacggtgacgtaaccaccgacgttactcgttactcggagatgatcataaaccctgaaaccccactttggtgcaaccccaagagtcttcacaactgtccaccgtaccacacgtttcggaacggcaccagagttcaccgtacggaccaccggagcttcccttacgaggcttaccacgtttactgtgcgccgggaaacgccgagcatcttgagcttccggtggggacttgtgatgcttatagtaacccacaagctcaggagattcttcagcttttgcctcacccggtttggggtgaatatggatatcctacccggttgggtgatggttgggtgggtgacccgagaacttgggatcttgatgatcccggtacgattccagcgaggaggatttggacatcggtggatgttggcaccgagatttataaagaagatgaagcaattgcagaatgggatctctctgatttcgatgttcttattacttga

SEQ ID NO: 78809 - protein, 481 aa, Arabidopsis thaliana
  peptide (1)..(481): Ceres Seq. ID no. 12645467
  misc_feature (1)..(481): Homolog of NCBI NO: 16612271 NR Description: At2g47010/F14M4.16 [Arabidopsis thaliana]
  misc_feature (1)..(481): Homolog of NCBI NO: 7459476 NR Description: hypothetical protein At2g47010 [imported] -
  misc_feature (1)..(444): Homolog of NCBI NO: 18407231 NR Description: expressed protein; protein id: At2g47010.1, by cDNA: gi_16612270 [Arabidopsis thaliana]
  misc_feature (23)..(480): Homolog of NCBI NO: 30685122 NR Description: expressed protein [Arabidopsis thaliana]
  misc_feature (30)..(480): Homolog of NCBI NO: 25335639 NR Description: F20D23.27 protein - Arabidopsis thaliana
  misc_feature (428)..(480): Homolog of NCBI NO: 22328547 NR Description: hypothetical protein; protein id: At4g09965.1
MKQLAPILAVVNLILLVHGDERSAVGDPGMKRDGLRVAFEAWNFCNEVGFEAPHMGSPRAADCFDLSSKCIKAYTEDQSNKTTSGSSLVHKVSDSDNELGIGKPKPGIISESALHNPDLYAVEKELYLGSLCQVSDKPNPWSFWMVMLKNGNYDTKSALCPKNGKKIPPFNQPGLFPCFGSGCMNQPTLNHGKTELQRDGQTMKGWFNGTYEQGADFGNGLDGISYYEVVWEKRVGVGGWVFKHKLKTSAKYPWLMLYLRADATKGFSGGYHYDTRGMLKTLPESPNFKVRLTLNVKQGGGAKSQFYLLDIGSCWKNNGKPCDGDVTTDVTRYSEMIINPETPLWCNPKSLHNCPPYHTFRNGTRVHRTDHRSFPYEAYHVYCAPGNAEHLELPVGTCDAYSNPQAQEILQLLPHPVWGEYGYPTRLGDGWVGDPRTWDLDDPGTIPARRIWTSVDVGTEIYKEDEAIAEWDLSDFDVLIT

SEQ ID NO: 78810 - protein, 452 aa, Arabidopsis thaliana
  peptide (1)..(452): Ceres Seq. ID no. 12645468
  misc_feature (1)..(452): Homolog of NCBI NO: 16612271 NR Description: At2g47010/F14M4.16 [Arabidopsis thaliana]
  misc_feature (1)..(452): Homolog of NCBI NO: 7459476 NR Description: hypothetical protein At2g47010 [imported] -
  misc_feature (1)..(415): Homolog of NCBI NO: 18407231 NR Description: expressed protein; protein id: At2g47010.1, by cDNA: gi_16612270 [Arabidopsis thaliana]
  misc_feature (1)..(451): Homolog of NCBI NO: 30685122 NR Description: expressed protein [Arabidopsis thaliana]
  misc_feature (1)..(451): Homolog of NCBI NO: 25335639 NR Description: F20D23.27 protein - Arabidopsis thaliana
  misc_feature (399)..(451): Homolog of NCBI NO: 22328547 NR Description: hypothetical protein; protein id: At4g09965.1
MKRDGLRVAFEAWNFCNEVGFEAPHMGSPRAADCFDLSSKCIKAYTEDQSNKTTSGSSLVHKVSDSDNELGIGKPKPGIISESALHNPDLYAVEKELYLGSLCQVSDKPNPWSFWMVMLKNGNYDTKSALCPKNGKKIPPFNQPGLFPCFGSGCMNQPTLNHGKTELQRDGQTMKGWFNGTYEQGADFGNGLDGISYYEVVWEKRVGVGGWVFKHKLKTSAKYPWLMLYLRADATKGFSGGYHYDTRGMLKTLPESPNFKVRLTLNVKQGGGAKSQFYLLDIGSCWKNNGKPCDGDVTTDVTRYSEMIINPETPLWCNPKSLHNCPPYHTFRNGTRVHRTDHRSFPYEAYHVYCAPGNAEHLELPVGTCDAYSNPQAQEILQLLPHPVWGEYGYPTRLGDGWVGDPRTWDLDDPGTIPARRIWTSVDVGTEIYKEDEAIAEWDLSDFDVLIT

SEQ ID NO: 78811 - protein, 427 aa, Arabidopsis thaliana
  peptide (1)..(427): Ceres Seq. ID no. 12645469
  misc_feature (1)..(427): Homolog of NCBI NO: 16612271 NR Description: At2g47010/F14M4.16 [Arabidopsis thaliana]
  misc_feature (1)..(427): Homolog of NCBI NO: 7459476 NR Description: hypothetical protein At2g47010 [imported] -
  misc_feature (1)..(390): Homolog of NCBI NO: 18407231 NR Description: expressed protein; protein id: At2g47010.1, by cDNA: gi_16612270 [Arabidopsis thaliana]
  misc_feature (1)..(426): Homolog of NCBI NO: 30685122 NR Description: expressed protein [Arabidopsis thaliana]
  misc_feature (1)..(426): Homolog of NCBI NO: 25335639 NR Description: F20D23.27 protein - Arabidopsis thaliana
  misc_feature (374)..(426): Homolog of NCBI NO: 22328547 NR Description: hypothetical protein; protein id: At4g09965.1
MGSPRAADCFDLSSKCIKAYTEDQSNKTTSGSSLVHKVSDSDNELGIGKPKPGIISESALHNPDLYAVEKELYLGSLCQVSDKPNPWSFWMVMLKNGNYDTKSALCPKNGKKIPPFNQPGLFPCFGSGCMNQPTLNHGKTELQRDGQTMKGWFNGTYEQGADFGNGLDGISYYEVVWEKRVGVGGWVFKHKLKTSAKYPWLMLYLRADATKGFSGGYHYDTRGMLKTLPESPNFKVRLTLNVKQGGGAKSQFYLLDIGSCWKNNGKPCDGDVTTDVTRYSEMIINPETPLWCNPKSLHNCPPYHTFRNGTRVHRTDHRSFPYEAYHVYCAPGNAEHLELPVGTCDAYSNPQAQEILQLLPHPVWGEYGYPTRLGDGWVGDPRTWDLDDPGTIPARRIWTSVDVGTEIYKEDEAIAEWDLSDFDVLIT

SEQ ID NO: 78812 - DNA, 2006 bp, Arabidopsis thaliana
  misc_feature (1)..(2006): Ceres Seq. ID no. 12645474
  misc_feature: MA Experiment ID: 108569 Result: Down-regulated in Transcription
  misc_feature: MA Experiment 108569 PARAMETER Experiment Name: At_0.001%_MeJA__cDNA_P Parameter: Timepoint (hr) Value: 6
  misc_feature: MA Experiment 108569 PARAMETER Experiment Name: At_0.001%_MeJA__cDNA_P Parameter: Tissue Value: Aerial
  misc_feature: MA Experiment 108569 PARAMETER Experiment Name: At_0.001%_MeJA__cDNA_P Parameter: Treatment Value: 0.001% MeJA vs. No Treatment
  misc_feature: MA Experiment ID: 108577 Result: Up-regulated in Transcription
  misc_feature: MA Experiment 108577 PARAMETER Experiment Name: At_42deg_Heat_cDNA_P Parameter: Temperature (deg C) Value: 42 vs. 22
  misc_feature: MA Experiment 108577 PARAMETER Experiment Name: At_42deg_Heat_cDNA_P Parameter: Timepoint (hr) Value: 6
  misc_feature: MA Experiment 108577 PARAMETER Experiment Name: At_42deg_Heat_cDNA_P Parameter: Tissue Value: Aerial
  misc_feature: MA Experiment ID: 20000111 Result: Up-regulated in Transcription
  misc_feature: MA Experiment 20000111 PARAMETER Experiment Name: At_42deg_Heat_cDNA_P Parameter: Temperature (deg C) Value: 42 vs. 22
  misc_feature: MA Experiment 20000111 PARAMETER Experiment Name: At_42deg_Heat_cDNA_P Parameter: Timepoint (hr) Value: 6
  misc_feature: MA Experiment 20000111 PARAMETER Experiment Name: At_42deg_Heat_cDNA_P Parameter: Tissue Value: Aerial
  misc_feature: MA Experiment ID: 20000112 Result: Up-regulated in Transcription
  misc_feature: MA Experiment 20000112 PARAMETER Experiment Name: At_42deg_Heat_cDNA_P Parameter: Temperature (deg C) Value: 42 vs. 22
  misc_feature: MA Experiment 20000112 PARAMETER Experiment Name: At_42deg_Heat_cDNA_P Parameter: Timepoint (hr) Value: 2
  misc_feature: MA Experiment 20000112 PARAMETER Experiment Name: At_42deg_Heat_cDNA_P Parameter: Tissue Value: Aerial
  misc_feature: MA Experiment ID: 20000184 Result: Down-regulated in Transcription
  misc_feature: MA Experiment 20000184 PARAMETER Experiment Name: At_Shoots__P Parameter: Age (day) Value: 7
  misc_feature: MA Experiment 20000184 PARAMETER Experiment Name: At_Shoots__P Parameter: Tissue Value: Shoots vs. Whole Plant
  misc_feature: MA Experiment ID: 20000234 Result: Up-regulated in Transcription
  misc_feature: MA Experiment 20000234 PARAMETER Experiment Name: At_Siliques_P Parameter: Age (day) Value: 21
  misc_feature: MA Experiment 20000234 PARAMETER Experiment Name: At_Siliques_P Parameter: Organism Value: A. thaliana
  misc_feature: MA Experiment 20000234 PARAMETER Experiment Name: At_Siliques_P Parameter: Plant Line Value: WS
  misc_feature: MA Experiment 20000234 PARAMETER Experiment Name: At_Siliques_P Parameter: Tissue Value: Less Than 5mm Siliques vs. Whole Plant
  misc_feature: MA Experiment ID: 20000235 Result: Up-regulated in Transcription
  misc_feature: MA Experiment 20000235 PARAMETER Experiment Name: At_Siliques_P Parameter: Age (day) Value: 21
  misc_feature: MA Experiment 20000235 PARAMETER Experiment Name: At_Siliques_P Parameter: Organism Value: A. thaliana
  misc_feature: MA Experiment 20000235 PARAMETER Experiment Name: At_Siliques_P Parameter: Plant Line Value: WS
  misc_feature: MA Experiment 20000235 PARAMETER Experiment Name: At_Siliques_P Parameter: Tissue Value: 5-10mm Siliques vs. Whole Plant
  misc_feature: MA Experiment ID: 20000265 Result: Up-regulated in Transcription
  misc_feature: MA Experiment 20000265 PARAMETER Experiment Name: At_Open_Flower_P Parameter: Age (day) Value: 21
  misc_feature: MA Experiment 20000265 PARAMETER Experiment Name: At_Open_Flower_P Parameter: Plant Line Value: WS
  misc_feature: MA Experiment 20000265 PARAMETER Experiment Name: At_Open_Flower_P Parameter: Tissue Value: Closed Flower vs. Whole Plant
  misc_feature: MA Experiment ID: 20000286 Result: Up-regulated in Transcription
  misc_feature: MA Experiment 20000286 PARAMETER Experiment Name: At_Open_Flower_P Parameter: Age (day) Value: 21
  misc_feature: MA Experiment 20000286 PARAMETER Experiment Name: At_Open_Flower_P Parameter: Plant Line Value: WS
  misc_feature: MA Experiment 20000286 PARAMETER Experiment Name: At_Open_Flower_P Parameter: Tissue Value: Half Open vs. Whole Plant
  misc_feature: MA Experiment ID: 20000794 Result: Up-regulated in Transcription
  misc_feature: MA Experiment 20000794 PARAMETER Experiment Name: At_Petals_P Parameter: Age (day) Value: 23-25 days
  misc_feature: MA Experiment 20000794 PARAMETER Experiment Name: At_Petals_P Parameter: Plant Line Value: WS
  misc_feature: MA Experiment 20000794 PARAMETER Experiment Name: At_Petals_P Parameter: Tissue Value: Petals vs. Whole plant
  misc_feature: MA Experiment ID: 20001773 Result: Up-regulated in Transcription
  misc_feature: MA Experiment 20001773 PARAMETER Experiment Name: At_Far-red-enriched-adult_P Parameter: Age (day) Value: 30
  misc_feature: MA Experiment 20001773 PARAMETER Experiment Name: At_Far-red-enriched-adult_P Parameter: Light Value: Far-red enriched vs. White
  misc_feature: MA Experiment 20001773 PARAMETER Experiment Name: At_Far-red-enriched-adult_P Parameter: Organism Value: A. thaliana
  misc_feature: MA Experiment 20001773 PARAMETER Experiment Name: At_Far-red-enriched-adult_P Parameter: Plant Line Value: Columbia
  misc_feature: MA Experiment 20001773 PARAMETER Experiment Name: At_Far-red-enriched-adult_P Parameter: Timepoint (hr) Value: 48
  misc_feature: MA Experiment 20001773 PARAMETER Experiment Name: At_Far-red-enriched-adult_P Parameter: Tissue Value: Aerial
  misc_feature: MA Experiment ID: 20001910 Result: Up-regulated in Transcription
  misc_feature: MA Experiment 20001910 PARAMETER Experiment Name: At_Drought_Reproduction_P Parameter: Age (day) Value: 37
  misc_feature: MA Experiment 20001910 PARAMETER Experiment Name: At_Drought_Reproduction_P Parameter: Organism Value: A. thaliana
  misc_feature: MA Experiment 20001910 PARAMETER Experiment Name: At_Drought_Reproduction_P Parameter: Plant Line Value: WS
  misc_feature: MA Experiment 20001910 PARAMETER Experiment Name: At_Drought_Reproduction_P Parameter: Timepoint (day) Value: 7
  misc_feature: MA Experiment 20001910 PARAMETER Experiment Name: At_Drought_Reproduction_P Parameter: Tissue Value: Flowers
  misc_feature: MA Experiment 20001910 PARAMETER Experiment Name: At_Drought_Reproduction_P Parameter: Treatment Value: Drought vs. No Drought
actggcctaagtcattcaacaatttggctttaatctaataaagcctctccctctccgattaaccttaataaatccggagggatcggagagaaaaaagaaccaaaaaaaaaaaaaaacagaaaaaaaaaaatgattggaaaagttgtggtctcggtggcctccatcctcttaatagtcggagttgccataggagtcgttgccttcataaacaaaaatggcgatgctaatctgtctccccaaatgaaagcggttcaaggaatttgccagtcgacatccgacaaagcctcatgtgtcaaaactctcgagccggtcaagagcgaggacccaaacaagctgatcaaggctttcatgctcgctacaaaagacgaattaaccaaatcgtctaacttcacgggtcaaaccgaagtaaacatgggctcgagcatctcgccaaacaacaaagccgttcttgattactgcaagagagttttcatgtacgctcttgaggatctcgctaccattattgaagaaatgggtgaagatcttagccagatcgggagcaaaatcgaccagctcaaacaatggttaatcggtgtttacaattaccaaactgattgtcttgacgatatcgaagaagatgatttaagaaaggcgattggtgagggcattgcaaactccaagattctcactaccaacgctattgacatcttccacactgtcgttagcgccatggccaagattaacaacaaggttgacgacttgaagaacatgacaggcggaatccccactcccggagcccctcctgttgttgatgaatctcccgtggccgacccagatggtcctgctcgtcgtcttcttgaagacattgacgagaccggaatcccaacatgggtttcaggtgctgacaggaagctcatggctaaggctggacgtggccgtagaggcggccgcggaggcggtgctagggtcagaacgaactttgtggtggctaaggatggaagcggacagtttaagacggttcaacaagccgttgatgcttgtcctgagaataaccgaggccgatgcatcatctacatcaaggccggtctctacagagagcaagtaatcatccctaagaagaagaacaacatcttcatgtttggagatggtgcaagaaagaccgtcatttcttacaacagaagtgttgctctcagccgtggaaccaccacatccctcagtgccacagttcaggttgaatcggaaggattcatggcgaaatggatgggattcaagaacaccgccggtccaatgggacaccaagccgcggctatccgagtgaacggagaccgtgccgtgatcttcaactgcagattcgacggttatcaagacacattgtacgttaacaacggtcgtcagttctacagaaactgtgtggtctcgggaacagtagacttcatcttcggcaaatccgcaaccgtgatccaaaacacactaattgttgtccgtaaaggaagcaagggacaatacaacacggtcacagccgatggaaacgaattgggcttagggatgaaaattggtatcgtcctccaaaactgccgcatcgtgcccgacaggaaactaacgccagagagacttacggtggcgacatacttgggaaggccgtggaagaaattctcgaccaccgtgataatgagcaccgagatgggagatttgattagaccagaagggtggaagatttgggatggggaaagtttccacaagtcatgtaggtacgttgagtacaacaaccgtggaccaggagcattcgctaacagaagagttaactgggctaaggttgccaggtctgcagctgaggtcaatggcttcacagctgctaactggttaggtcctattaactggattcaagaagccaatgttcctgtcacaattggattataatttataaagcgtatatgaaaattattttagtttttaagtatatgaaaattggtgtatgaaattggtttatgaaaactttttaagaaagtctataatgtttttcctctgtt

SEQ ID NO: 78813 - protein, 588 aa, Arabidopsis thaliana; identical to SEQ ID NO: 25178
  peptide (1)..(588): Ceres Seq. ID no. 12645475
  misc_feature (276)..(574): Pfam Name: Pectinesterase Pfam Description: Pectinesterase
  misc_feature (1)..(588): Homolog of NCBI NO: 15226482 NR Description: pectinesterase family; protein id: At2g47030.1, by cDNA: 40043., supported by cDNA: gi_15450764 [Arabidopsis >gi|7447387|pir||T02184 probable pectinesterase At2g47030
  misc_feature (1)..(588): Homolog of NCBI NO: 25313439 NR Description: pectinesterase (EC 3.1.1.11) precursor,
  misc_feature (1)..(588): Homolog of NCBI NO: 25313437 NR Description: pectinesterase (EC 3.1.1.11) [imported] - thaliana >gi|6093122|emb|CAB58974.1| pectin methylesterase
  misc_feature (1)..(588): Homolog of NCBI NO: 15226490 NR Description: pectinesterase family; protein id: At2g47040.1, by cDNA: gi_20147200 [Arabidopsis thaliana]
  misc_feature (1)..(470): Homolog of NCBI NO: 23197964 NR Description: putative pectinesterase [Arabidopsis thaliana]
  misc_feature (2)..(588): Homolog of NCBI NO: 15228697 NR Description: pollen-specific pectin esterase, putative; id: At3g62170.1, supported by cDNA: 112346., supported by cDNA:
  misc_feature (2)..(588): Homolog of NCBI NO: 1172538 NR Description: Probable pectinesterase precursor (Pectin
  misc_feature (13)..(588): Homolog of NCBI NO: 6093741 NR Description: Pectinesterase (Pectin methylesterase) (PE)
  misc_feature (233)..(588): Homolog of NCBI NO: 7447384 NR Description: pectin methylesterase-like protein - maize
  misc_feature (110)..(198): Homolog of NCBI NO: 7447384 NR Description: pectin methylesterase-like protein - maize

SEQ ID NO: 78814 - protein, 551 aa, Arabidopsis thaliana; identical to SEQ ID NO: 25179
  peptide (1)..(551): Ceres Seq. ID no. 12645476
  misc_feature (239)..(537): Pfam Name: Pectinesterase Pfam Description: Pectinesterase
  misc_feature (1)..(551): Homolog of NCBI NO: 15226482 NR Description: pectinesterase family; protein id: At2g47030.1, by cDNA: 40043., supported by cDNA: gi_15450764 [Arabidopsis >gi|7447387|pir||T02184 probable pectinesterase At2g47030
  misc_feature (1)..(551): Homolog of NCBI NO: 25313439 NR Description: pectinesterase (EC 3.1.1.11) precursor,
  misc_feature (1)..(551): Homolog of NCBI NO: 25313437 NR Description: pectinesterase (EC 3.1.1.11) [imported] - thaliana >gi|6093122|emb|CAB58974.1| pectin methylesterase
  misc_feature (1)..(551): Homolog of NCBI NO: 15226490 NR Description: pectinesterase family; protein id: At2g47040.1, by cDNA: gi_20147200 [Arabidopsis thaliana]
  misc_feature (1)..(433): Homolog of NCBI NO: 23197964 NR Description: putative pectinesterase [Arabidopsis thaliana]
  misc_feature (1)..(551): Homolog of NCBI NO: 15228697 NR Description: pollen-specific pectin esterase, putative; id: At3g62170.1, supported by cDNA: 112346., supported by cDNA:
  misc_feature (1)..(551): Homolog of NCBI NO: 1172538 NR Description: Probable pectinesterase precursor (Pectin
  misc_feature (1)..(551): Homolog of NCBI NO: 6093741 NR Description: Pectinesterase (Pectin methylesterase) (PE)
  misc_feature (196)..(551): Homolog of NCBI NO: 7447384 NR Description: pectin methylesterase-like protein - maize
  misc_feature (73)..(161): Homolog of NCBI NO: 7447384 NR Description: pectin methylesterase-like protein - maize

SEQ ID NO: 78815 - protein, 515 aa, Arabidopsis thaliana; identical to SEQ ID NO: 25180
  peptide (1)..(515): Ceres Seq. ID no. 12645477
  misc_feature (203)..(501): Pfam Name: Pectinesterase Pfam Description: Pectinesterase
  misc_feature (1)..(515): Homolog of NCBI NO: 15226482 NR Description: pectinesterase family; protein id: At2g47030.1, by cDNA: 40043., supported by cDNA: gi_15450764 [Arabidopsis >gi|7447387|pir||T02184 probable pectinesterase At2g47030
  misc_feature (1)..(515): Homolog of NCBI NO: 25313439 NR Description: pectinesterase (EC 3.1.1.11) precursor,
  misc_feature (1)..(515): Homolog of NCBI NO: 25313437 NR Description: pectinesterase (EC 3.1.1.11) [imported] - thaliana >gi|6093122|emb|CAB58974.1| pectin methylesterase
  misc_feature (1)..(515): Homolog of NCBI NO: 15226490 NR Description: pectinesterase family; protein id: At2g47040.1, by cDNA: gi_20147200 [Arabidopsis thaliana]
  misc_feature (1)..(397): Homolog of NCBI NO: 23197964 NR Description: putative pectinesterase [Arabidopsis thaliana]
  misc_feature (1)..(515): Homolog of NCBI NO: 15228697 NR Description: pollen-specific pectin esterase, putative; id: At3g62170.1, supported by cDNA: 112346., supported by cDNA:
  misc_feature (1)..(515): Homolog of NCBI NO: 1172538 NR Description: Probable pectinesterase precursor (Pectin
  misc_feature (1)..(515): Homolog of NCBI NO: 6093741 NR Description: Pectinesterase (Pectin methylesterase) (PE)
  misc_feature (160)..(515): Homolog of NCBI NO: 7447384 NR Description: pectin methylesterase-like protein - maize
  misc_feature (37)..(125): Homolog of NCBI NO: 7447384 NR Description: pectin methylesterase-like protein - maize

SEQ ID NO: 78816 - DNA, 1698 bp, Arabidopsis thaliana
  misc_feature (1)..(1698): Ceres Seq. ID no. 12645478
  misc_feature: MA Experiment ID: 20000184 Result: Down-regulated in Transcription
  misc_feature: MA Experiment 20000184 PARAMETER Experiment Name: At_Shoots__P Parameter: Age (day) Value: 7
  misc_feature: MA Experiment 20000184 PARAMETER Experiment Name: At_Shoots__P Parameter: Tissue Value: Shoots vs. Whole Plant
  misc_feature: MA Experiment ID: 20000234 Result: Up-regulated in Transcription
  misc_feature: MA Experiment 20000234 PARAMETER Experiment Name: At_Siliques_P Parameter: Age (day) Value: 21
  misc_feature: MA Experiment 20000234 PARAMETER Experiment Name: At_Siliques_P Parameter: Organism Value: A. thaliana
  misc_feature: MA Experiment 20000234 PARAMETER Experiment Name: At_Siliques_P Parameter: Plant Line Value: WS
  misc_feature: MA Experiment 20000234 PARAMETER Experiment Name: At_Siliques_P Parameter: Tissue Value: Less Than 5mm Siliques vs. Whole Plant
  misc_feature: MA Experiment ID: 20000264 Result: Up-regulated in Transcription
  misc_feature: MA Experiment 20000264 PARAMETER Experiment Name: At_Open_Flower_P Parameter: Age (day) Value: 21
  misc_feature: MA Experiment 20000264 PARAMETER Experiment Name: At_Open_Flower_P Parameter: Plant Line Value: WS
  misc_feature: MA Experiment 20000264 PARAMETER Experiment Name: At_Open_Flower_P Parameter: Tissue Value: Open Flower vs. Whole Plant
  misc_feature: MA Experiment ID: 20000265 Result: Up-regulated in Transcription
  misc_feature: MA Experiment 20000265 PARAMETER Experiment Name: At_Open_Flower_P Parameter: Age (day) Value: 21
  misc_feature: MA Experiment 20000265 PARAMETER Experiment Name: At_Open_Flower_P Parameter: Plant Line Value: WS
  misc_feature: MA Experiment 20000265 PARAMETER Experiment Name: At_Open_Flower_P Parameter: Tissue Value: Closed Flower vs. Whole Plant
  misc_feature: MA Experiment ID: 20000286 Result: Up-regulated in Transcription
  misc_feature: MA Experiment 20000286 PARAMETER Experiment Name: At_Open_Flower_P Parameter: Age (day) Value: 21
  misc_feature: MA Experiment 20000286 PARAMETER Experiment Name: At_Open_Flower_P Parameter: Plant Line Value: WS
  misc_feature: MA Experiment 20000286 PARAMETER Experiment Name: At_Open_Flower_P Parameter: Tissue Value: Half Open vs. Whole Plant
  misc_feature: MA Experiment ID: 20000794 Result: Up-regulated in Transcription
  misc_feature: MA Experiment 20000794 PARAMETER Experiment Name: At_Petals_P Parameter: Age (day) Value: 23-25 days
  misc_feature: MA Experiment 20000794 PARAMETER Experiment Name: At_Petals_P Parameter: Plant Line Value: WS
  misc_feature: MA Experiment 20000794 PARAMETER Experiment Name: At_Petals_P Parameter: Tissue Value: Petals vs. Whole plant
  misc_feature: MA Experiment ID: 20001761 Result: Down-regulated in Transcription
  misc_feature: MA Experiment 20001761 PARAMETER Experiment Name: At_50mM_NH4NO3_L-to-H_P Parameter: Timepoint (hr) Value: 4
  misc_feature: MA Experiment 20001761 PARAMETER Experiment Name: At_50mM_NH4NO3_L-to-H_P Parameter: Tissue Value: Siliques
  misc_feature: MA Experiment 20001761 PARAMETER Experiment Name: At_50mM_NH4NO3_L-to-H_P Parameter: Treatment Value: 50mM NH4NO3 vs 100mM Mannitol
  misc_feature: MA Experiment ID: 20001768 Result: Up-regulated in Transcription
  misc_feature: MA Experiment 20001768 PARAMETER Experiment Name: At_Far-red-enriched-adult_P Parameter: Age (day) Value: 28
  misc_feature: MA Experiment 20001768 PARAMETER Experiment Name: At_Far-red-enriched-adult_P Parameter: Light Value: Far-red enriched vs. White
  misc_feature: MA Experiment 20001768 PARAMETER Experiment Name: At_Far-red-enriched-adult_P Parameter: Organism Value: A. thaliana
  misc_feature: MA Experiment 20001768 PARAMETER Experiment Name: At_Far-red-enriched-adult_P Parameter: Plant Line Value: Columbia
  misc_feature: MA Experiment 20001768 PARAMETER Experiment Name: At_Far-red-enriched-adult_P Parameter: Timepoint (hr) Value: 1
  misc_feature: MA Experiment 20001768 PARAMETER Experiment Name: At_Far-red-enriched-adult_P Parameter: Tissue Value: Aerial
  misc_feature: MA Experiment ID: 20001774 Result: Down-regulated in Transcription
  misc_feature: MA Experiment 20001774 PARAMETER Experiment Name: At_Far-red-enriched-adult_P Parameter: Age (day) Value: 31
  misc_feature: MA Experiment 20001774 PARAMETER Experiment Name: At_Far-red-enriched-adult_P Parameter: Light Value: Far-red enriched vs. White
  misc_feature: MA Experiment 20001774 PARAMETER Experiment Name: At_Far-red-enriched-adult_P Parameter: Organism Value: A. thaliana
  misc_feature: MA Experiment 20001774 PARAMETER Experiment Name: At_Far-red-enriched-adult_P Parameter: Plant Line Value: Columbia
  misc_feature: MA Experiment 20001774 PARAMETER Experiment Name: At_Far-red-enriched-adult_P Parameter: Timepoint (hr) Value: 72
  misc_feature: MA Experiment 20001774 PARAMETER Experiment Name: At_Far-red-enriched-adult_P Parameter: Tissue Value: Aerial
  misc_feature: MA Experiment ID: 20001905 Result: Up-regulated in Transcription
  misc_feature: MA Experiment 20001905 PARAMETER Experiment Name: At_Drought_Reproduction_P Parameter: Age (day) Value: 40
  misc_feature: MA Experiment 20001905 PARAMETER Experiment Name: At_Drought_Reproduction_P Parameter: Organism Value: A. thaliana
  misc_feature: MA Experiment 20001905 PARAMETER Experiment Name: At_Drought_Reproduction_P Parameter: Plant Line Value: WS
  misc_feature: MA Experiment 20001905 PARAMETER Experiment Name: At_Drought_Reproduction_P Parameter: Timepoint (day) Value: 10
  misc_feature: MA Experiment 20001905 PARAMETER Experiment Name: At_Drought_Reproduction_P Parameter: Tissue Value: Rosettes
  misc_feature: MA Experiment 20001905 PARAMETER Experiment Name: At_Drought_Reproduction_P Parameter: Treatment Value: Drought vs. No Drought
  misc_feature: MA Experiment ID: 20001910 Result: Up-regulated in Transcription
  misc_feature: MA Experiment 20001910 PARAMETER Experiment Name: At_Drought_Reproduction_P Parameter: Age (day) Value: 37
  misc_feature: MA Experiment 20001910 PARAMETER Experiment Name: At_Drought_Reproduction_P Parameter: Organism Value: A. thaliana
  misc_feature: MA Experiment 20001910 PARAMETER Experiment Name: At_Drought_Reproduction_P Parameter: Plant Line Value: WS
  misc_feature: MA Experiment 20001910 PARAMETER Experiment Name: At_Drought_Reproduction_P Parameter: Timepoint (day) Value: 7
  misc_feature: MA Experiment 20001910 PARAMETER Experiment Name: At_Drought_Reproduction_P Parameter: Tissue Value: Flowers
  misc_feature: MA Experiment 20001910 PARAMETER Experiment Name: At_Drought_Reproduction_P Parameter: Treatment Value: Drought vs. No Drought
atgattggaaaagttgtggtctcggtggcctccatcctcttaatagttggagttgccataggagtcgttgcctacataaacaaaaatggtgatgctaatctgtctccccaaatgaaagcggtccgaggaatttgcgaggcgacttccgacaaagcctcatgtgtcaaaactctcgagccggtcaagagcgatgacccaaacaagctgatcaaggctttcatgctcgctaccagagatgctataacccaatcatcaaacttcacgggtaaaaccgaaggaaacttgggttcgggcatctcgccaaacaacaaagccgttcttgattactgcaagaaagttttcatgtacgcgcttgaggatctcagcaccattgttgaggaaatgggtgaagatcttaaccagatcgggagcaaaatcgaccagcttaaacaatggttaaccggtgtttacaattaccaaactgattgtcttgacgatatcgaagaagatgatttaagaaagactattggagagggcattgcaagctccaagattctcactagcaacgctattgacatcttccacactgtcgttagcgccatggccaagcttaacttgaaggtcgaggacttcaagaacatgacagatggtcctgctcgccgtcttcttgaagacattgacgagaccggaatcccaacatgggtttcaggtgctgacaggaagctcatgactaaggctggacgtggcagtaatgacggtggtgctaggatcagagcaacctttgtggtggctaaggacggaagtggacagtttaagactgttcaacaagccgttaatgcttgtcctgagaaaaacccaggccgttgcatcatccacatcaaggctggtatctacagagagcaagtgatcatccctaagaagaagaacaacatcttcatgttcggagatggtgcaagaaagaccgtcatttcttacaacagaagtgttaaactcagccctggaaccaccacttcccttagtggcacagtccaggttgagtccgaaggattcatggcaaaatggatcggattcaagaacaccgccggtccaatgggacaccaagctgtggctatcagagtgaacggagaccgtgccgtgatcttcaactgcaggttcgacggttaccaagacaccttgtacgtcaacaatggtcgtcagttctacagaaacattgtcgtgtcaggaacagtcgacttcatcttcggcaaatccgcaaccgtgatccaaaactcactcattgttgtccgtaaaggaaacaagggacaattcaacacggtcacagccgatggaaacgaaaagggtctagcgatgaaaatcggtatcgtcctccaaaactgtcgcatcgttcccgacaagaaactagcggcagagagattaatcgtggagtcatacttgggaaggccatggaagaaattctctaccaccgtgattatcaactccgagataggagatgtgattagaccagaaggttggaagatttgggatggggaaagtttccacaagtcatgtaggtacgttgagtacaacaaccgtggaccaggagctatcactaaccgaagagttaactgggttaagatcgccaggtctgcagctgaggtcaatgacttcactgttgctaactggttaggtcctattaactggattcaagaagccaatgttcccgtcacgcttggattataa

SEQ ID NO: 78817 - protein, 565 aa, Arabidopsis thaliana
  peptide (1)..(565): Ceres Seq. ID no. 12645479
  misc_feature (253)..(551): Pfam Name: Pectinesterase Pfam Description: Pectinesterase
  misc_feature (209)..(565): Homolog of NCBI NO: 15226490 NR Description: pectinesterase family; protein id: At2g47040.1, by cDNA: gi_20147200 [Arabidopsis thaliana]
  misc_feature (1)..(210): Homolog of NCBI NO: 15226490 NR Description: pectinesterase family; protein id: At2g47040.1, by cDNA: gi_20147200 [Arabidopsis thaliana]
  misc_feature (209)..(565): Homolog of NCBI NO: 25313437 NR Description: pectinesterase (EC 3.1.1.11) [imported] - thaliana >gi|6093122|emb|CAB58974.1| pectin methylesterase
  misc_feature (1)..(210): Homolog of NCBI NO: 25313437 NR Description: pectinesterase (EC 3.1.1.11) [imported] - thaliana >gi|6093122|emb|CAB58974.1| pectin methylesterase
  misc_feature (209)..(565): Homolog of NCBI NO: 15226482 NR Description: pectinesterase family; protein id: At2g47030.1, by cDNA: 40043., supported by cDNA: gi_15450764 [Arabidopsis >gi|7447387|pir||T02184 probable pectinesterase At2g47030
  misc_feature (1)..(236): Homolog of NCBI NO: 15226482 NR Description: pectinesterase family; protein id: At2g47030.1, by cDNA: 40043., supported by cDNA: gi_15450764 [Arabidopsis >gi|7447387|pir||T02184 probable pectinesterase At2g47030
  misc_feature (209)..(565): Homolog of NCBI NO: 25313439 NR Description: pectinesterase (EC 3.1.1.11) precursor,
  misc_feature (1)..(236): Homolog of NCBI NO: 25313439 NR Description: pectinesterase (EC 3.1.1.11) precursor,
  misc_feature (5)..(565): Homolog of NCBI NO: 15228697 NR Description: pollen-specific pectin esterase, putative; id: At3g62170.1, supported by cDNA: 112346., supported by cDNA:
  misc_feature (6)..(565): Homolog of NCBI NO: 1172538 NR Description: Probable pectinesterase precursor (Pectin
MIGKVVVSVASILLIVGVAIGVVAYINKNGDANLSPQMKAVRGICEATSDKASCVKTLEPVKSDDPNKLIKAFMLATRDAITQSSNFTGKTEGNLGSGISPNNKAVLDYCKKVFMYALEDLSTIVEEMGEDLNQIGSKIDQLKQWLTGVYNYQTDCLDDIEEDDLRKTIGEGIASSKILTSNAIDIFHTVVSAMAKLNLKVEDFKNMTDGPARRLLEDIDETGIPTWVSGADRKLMTKAGRGSNDGGARIRATFVVAKDGSGQFKTVQQAVNACPEKNPGRCIIHIKAGIYREQVIIPKKKNNIFMFGDGARKTVISYNRSVKLSPGTTTSLSGTVQVESEGFMAKWIGFKNTAGPMGHQAVAIRVNGDRAVIFNCRFDGYQDTLYVNNGRQFYRNIVVSGTVDFIFGKSATVIQNSLIVVRKGNKGQFNTVTADGNEKGLAMKIGIVLQNCRIVPDKKLAAERLIVESYLGRPWKKFSTTVIINSEIGDVIRPEGWKIWDGESFHKSCRYVEYNNRGPGAITNRRVNWVKIARSAAEVNDFTVANWLGPINWIQEANVPVTLGL

SEQ ID NO: 78818 - protein, 528 aa, Arabidopsis thaliana
  peptide (1)..(528): Ceres Seq. ID no. 12645480
  misc_feature (216)..(514): Pfam Name: Pectinesterase Pfam Description: Pectinesterase
  misc_feature (172)..(528): Homolog of NCBI NO: 15226490 NR Description: pectinesterase family; protein id: At2g47040.1, by cDNA: gi_20147200 [Arabidopsis thaliana]
  misc_feature (1)..(173): Homolog of NCBI NO: 15226490 NR Description: pectinesterase family; protein id: At2g47040.1, by cDNA: gi_20147200 [Arabidopsis thaliana]
  misc_feature (172)..(528): Homolog of NCBI NO: 25313437 NR Description: pectinesterase (EC 3.1.1.11) [imported] - thaliana >gi|6093122|emb|CAB58974.1| pectin methylesterase
  misc_feature (1)..(173): Homolog of NCBI NO: 25313437 NR Description: pectinesterase (EC 3.1.1.11) [imported] - thaliana >gi|6093122|emb|CAB58974.1| pectin methylesterase
  misc_feature (172)..(528): Homolog of NCBI NO: 15226482 NR Description: pectinesterase family; protein id: At2g47030.1, by cDNA: 40043., supported by cDNA: gi_15450764 [Arabidopsis >gi|7447387|pir||T02184 probable pectinesterase At2g47030
  misc_feature (1)..(199): Homolog of NCBI NO: 15226482 NR Description: pectinesterase family; protein id: At2g47030.1, by cDNA: 40043., supported by cDNA: gi_15450764 [Arabidopsis >gi|7447387|pir||T02184 probable pectinesterase At2g47030
  misc_feature (172)..(528): Homolog of NCBI NO: 25313439 NR Description: pectinesterase (EC 3.1.1.11) precursor,
  misc_feature (1)..(199): Homolog of NCBI NO: 25313439 NR Description: pectinesterase (EC 3.1.1.11) precursor,
  misc_feature (1)..(528): Homolog of NCBI NO: 15228697 NR Description: pollen-specific pectin esterase, putative; id: At3g62170.1, supported by cDNA: 112346., supported by cDNA:
  misc_feature (1)..(528): Homolog of NCBI NO: 1172538 NR Description: Probable pectinesterase precursor (Pectin
MKAVRGICEATSDKASCVKTLEPVKSDDPNKLIKAFMLATRDAITQSSNFTGKTEGNLGSGISPNNKAVLDYCKKVFMYALEDLSTIVEEMGEDLNQIGSKIDQLKQWLTGVYNYQTDCLDDIEEDDLRKTIGEGIASSKILTSNAIDIFHTVVSAMAKLNLKVEDFKNMTDGPARRLLEDIDETGIPTWVSGADRKLMTKAGRGSNDGGARIRATFVVAKDGSGQFKTVQQAVNACPEKNPGRCIIHIKAGIYREQVIIPKKKNNIFMFGDGARKTVISYNRSVKLSPGTTTSLSGTVQVESEGFMAKWIGFKNTAGPMGHQAVAIRVNGDRAVIFNCRFDGYQDTLYVNNGRQFYRNIVVSGTVDFIFGKSATVIQNSLIVVRKGNKGQFNTVTADGNEKGLAMKIGIVLQNCRIVPDKKLAAERLIVESYLGRPWKKFSTTVIINSEIGDVIRPEGWKIWDGESFHKSCRYVEYNNRGPGAITNRRVNWVKIARSAAEVNDFTVANWLGPINWIQEANVPVTLGL

SEQ ID NO: 78819 - protein, 492 aa, Arabidopsis thaliana
  peptide (1)..(492): Ceres Seq. ID no. 12645481
  misc_feature (180)..(478): Pfam Name: Pectinesterase Pfam Description: Pectinesterase
  misc_feature (136)..(492): Homolog of NCBI NO: 15226490 NR Description: pectinesterase family; protein id: At2g47040.1, by cDNA: gi_20147200 [Arabidopsis thaliana]
  misc_feature (1)..(137): Homolog of NCBI NO: 15226490 NR Description: pectinesterase family; protein id: At2g47040.1, by cDNA: gi_20147200 [Arabidopsis thaliana]
  misc_feature (136)..(492): Homolog of NCBI NO: 25313437 NR Description: pectinesterase (EC 3.1.1.11) [imported] - thaliana >gi|6093122|emb|CAB58974.1| pectin methylesterase
  misc_feature (1)..(137): Homolog of NCBI NO: 25313437 NR Description: pectinesterase (EC 3.1.1.11) [imported] - thaliana >gi|6093122|emb|CAB58974.1| pectin methylesterase
  misc_feature (136)..(492): Homolog of NCBI NO: 15226482 NR Description: pectinesterase family; protein id: At2g47030.1, by cDNA: 40043., supported by cDNA: gi_15450764 [Arabidopsis >gi|7447387|pir||T02184 probable pectinesterase At2g47030
  misc_feature (1)..(163): Homolog of NCBI NO: 15226482 NR Description: pectinesterase family; protein id: At2g47030.1, by cDNA: 40043., supported by cDNA: gi_15450764 [Arabidopsis >gi|7447387|pir||T02184 probable pectinesterase At2g47030
  misc_feature (136)..(492): Homolog of NCBI NO: 25313439 NR Description: pectinesterase (EC 3.1.1.11) precursor,
  misc_feature (1)..(163): Homolog of NCBI NO: 25313439 NR Description: pectinesterase (EC 3.1.1.11) precursor,
  misc_feature (1)..(492): Homolog of NCBI NO: 15228697 NR Description: pollen-specific pectin esterase, putative; id: At3g62170.1, supported by cDNA: 112346., supported by cDNA:
  misc_feature (1)..(492): Homolog of NCBI NO: 1172538 NR Description: Probable pectinesterase precursor (Pectin
MLATRDAITQSSNFTGKTEGNLGSGISPNNKAVLDYCKKVFMYALEDLSTIVEEMGEDLNQIGSKIDQLKQWLTGVYNYQTDCLDDIEEDDLRKTIGEGIASSKILTSNAIDIFHTVVSAMAKLNLKVEDFKNMTDGPARRLLEDIDETGIPTWVSGADRKLMTKAGRGSNDGGARIRATFVVAKDGSGQFKTVQQAVNACPEKNPGRCIIHIKAGIYREQVIIPKKKNNIFMFGDGARKTVISYNRSVKLSPGTTTSLSGTVQVESEGFMAKWIGFKNTAGPMGHQAVAIRVNGDRAVIFNCRFDGYQDTLYVNNGRQFYRNIVVSGTVDFIFGKSATVIQNSLIVVRKGNKGQFNTVTADGNEKGLAMKIGIVLQNCRIVPDKKLAAERLIVESYLGRPWKKFSTTVIINSEIGDVIRPEGWKIWDGESFHKSCRYVEYNNRGPGAITNRRVNWVKIARSAAEVNDFTVANWLGPINWIQEANVPVTLGL

SEQ ID NO: 78820 - DNA, 780 bp, Arabidopsis thaliana
  misc_feature (1)..(780): Ceres Seq. ID no. 12645486
  misc_feature: MA Experiment ID: 20001910 Result: Up-regulated in Transcription
  misc_feature: MA Experiment 20001910 PARAMETER Experiment Name: At_Drought_Reproduction_P Parameter: Age (day) Value: 37
  misc_feature: MA Experiment 20001910 PARAMETER Experiment Name: At_Drought_Reproduction_P Parameter: Organism Value: A. thaliana
  misc_feature: MA Experiment 20001910 PARAMETER Experiment Name: At_Drought_Reproduction_P Parameter: Plant Line Value: WS
  misc_feature: MA Experiment 20001910 PARAMETER Experiment Name: At_Drought_Reproduction_P Parameter: Timepoint (day) Value: 7
  misc_feature: MA Experiment 20001910 PARAMETER Experiment Name: At_Drought_Reproduction_P Parameter: Tissue Value: Flowers
  misc_feature: MA Experiment 20001910 PARAMETER Experiment Name: At_Drought_Reproduction_P Parameter: Treatment Value: Drought vs. No Drought
atgtcgggactcagtagattggaaggcaagatcgtaattataacaggcggagccagcgggattggagccgacgccgctaggctgttcacggaccacggagctaaggtggttatagttgacgtacaagaagaactaggccaaaacgtcgcagttttgatcgggaaagacaaagctagtttttaccgttgcgatgtgacaaatgagacggaagtcgaggacgcagttaagttcaccgtcgaaaaacacggaaagctagacgttctgtttagcaacgccggagtcttggaaccactggaaagcttcctcgactttgacctcgaacggtttgaccgcataatggctgttaacgttcgcggtgcagctgcgtttatcaaacacgcggcacgagccatggtggagaaaggcacgcgtggctccatcgtttgtacgacgagcgtctcggcggagatcggtggggggcatcatggttacacggcgtctaaacacgggcttgtcggcctgattagatcggcctgtggtgatttggggaagtatgggattagagtcaatggagtcgcaccgtacgcggtggcaacgccaatgactagccacgacgaggtaacgggaaagcagttggaggattattttgacgccaagggaattctcaaggggatggtgcttaaagctagccacgttgcacaagtggctctgttcttggcttctgatgattcggcttatataagtggtcagaatttggcggtggatggtggttatactgtcgttaagccaagccgtgattaa

SEQ ID NO: 78821 - protein, 259 aa, Arabidopsis thaliana
  peptide (1)..(259): Ceres Seq. ID no. 12645487
  misc_feature (1)..(259): Homolog of NCBI NO: 15226500 NR Description: (NM_130280) putative alcohol dehydrogenase; id: At2g47120.1 [Arabidopsis thaliana] >gi|7431089|pir||T02176
  misc_feature (1)..(256): Homolog of NCBI NO: 15226503 NR Description: (NM_130281) putative alcohol dehydrogenase; id: At2g47130.1 [Arabidopsis thaliana] >gi|7431088|pir||T02175
  misc_feature (1)..(255): Homolog of NCBI NO: 15228656 NR Description: short-chain alcohol dehydrogenase, putative;
  misc_feature (1)..(255): Homolog of NCBI NO: 9293918 NR Description: alcohol dehydrogenase-like protein [Arabidopsis
  misc_feature (14)..(255): Homolog of NCBI NO: 22331405 NR Description: short-chain alcohol dehydrogenase, putative;
  misc_feature (1)..(256): Homolog of NCBI NO: 18407273 NR Description: putative alcohol dehydrogenase; protein id: supported by cDNA: gi_13878112, supported by cDNA: gi_17104782 thaliana] >gi|13878113|gb|AAK44134.1|AF370319_1 putative alcohol
  misc_feature (5)..(256): Homolog of NCBI NO: 7431087 NR Description: probable alcohol dehydrogenase [imported] -
  misc_feature (1)..(255): Homolog of NCBI NO: 15983819 NR Description: 3-beta-hydroxysteroiddehydrogenase [Digitalis
  misc_feature (1)..(254): Homolog of NCBI NO: 7981382 NR Description: putative alcohol dehydrogenase [Lycopersicon
  misc_feature (5)..(254): Homolog of NCBI NO: 40714675 NR Description: putative hydroxysteroiddehydrogenase [Oryza
MSGLSRLEGKIVIITGGASGIGADAARLFTDHGAKVVIVDVQEELGQNVAVLIGKDKASFYRCDVTNETEVEDAVKFTVEKHGKLDVLFSNAGVLEPLESFLDFDLERFDRIMAVNVRGAAAFIKHAARAMVEKGTRGSIVCTTSVSAEIGGGHHGYTASKHGLVGLIRSACGDLGKYGIRVNGVAPYAVATPMTSHDEVTGKQLEDYFDAKGILKGMVLKASHVAQVALFLASDDSAYISGQNLAVDGGYTVVKPSRD

SEQ ID NO: 78822 - protein, 147 aa, Arabidopsis thaliana
  peptide (1)..(147): Ceres Seq. ID no. 12645488
  misc_feature (1)..(147): Homolog of NCBI NO: 15226500 NR Description: (NM_130280) putative alcohol dehydrogenase; id: At2g47120.1 [Arabidopsis thaliana] >gi|7431089|pir||T02176
  misc_feature (1)..(144): Homolog of NCBI NO: 15226503 NR Description: (NM_130281) putative alcohol dehydrogenase; id: At2g47130.1 [Arabidopsis thaliana] >gi|7431088|pir||T02175
  misc_feature (1)..(143): Homolog of NCBI NO: 15228656 NR Description: short-chain alcohol dehydrogenase, putative;
  misc_feature (1)..(143): Homolog of NCBI NO: 9293918 NR Description: alcohol dehydrogenase-like protein [Arabidopsis
  misc_feature (1)..(143): Homolog of NCBI NO: 22331405 NR Description: short-chain alcohol dehydrogenase, putative;
  misc_feature (1)..(144): Homolog of NCBI NO: 18407273 NR Description: putative alcohol dehydrogenase; protein id: supported by cDNA: gi_13878112, supported by cDNA: gi_17104782 thaliana] >gi|13878113|gb|AAK44134.1|AF370319_1 putative alcohol
  misc_feature (1)..(144): Homolog of NCBI NO: 7431087 NR Description: probable alcohol dehydrogenase [imported] -
  misc_feature (1)..(143): Homolog of NCBI NO: 15983819 NR Description: 3-beta-hydroxysteroiddehydrogenase [Digitalis
  misc_feature (1)..(142): Homolog of NCBI NO: 7981382 NR Description: putative alcohol dehydrogenase [Lycopersicon
  misc_feature (1)..(142): Homolog of NCBI NO: 40714675 NR Description: putative hydroxysteroiddehydrogenase [Oryza
MAVNVRGAAAFIKHAARAMVEKGTRGSIVCTTSVSAEIGGGHHGYTASKHGLVGLIRSACGDLGKYGIRVNGVAPYAVATPMTSHDEVTGKQLEDYFDAKGILKGMVLKASHVAQVALFLASDDSAYISGQNLAVDGGYTVVKPSRD

SEQ ID NO: 78823 - protein, 129 aa, Arabidopsis thaliana
  peptide (1)..(129): Ceres Seq. ID no. 12645489
  misc_feature (1)..(129): Homolog of NCBI NO: 15226500 NR Description: (NM_130280) putative alcohol dehydrogenase; id: At2g47120.1 [Arabidopsis thaliana] >gi|7431089|pir||T02176
  misc_feature (1)..(126): Homolog of NCBI NO: 15226503 NR Description: (NM_130281) putative alcohol dehydrogenase; id: At2g47130.1 [Arabidopsis thaliana] >gi|7431088|pir||T02175
  misc_feature (1)..(125): Homolog of NCBI NO: 15228656 NR Description: short-chain alcohol dehydrogenase, putative;
  misc_feature (1)..(125): Homolog of NCBI NO: 9293918 NR Description: alcohol dehydrogenase-like protein [Arabidopsis
  misc_feature (1)..(125): Homolog of NCBI NO: 22331405 NR Description: short-chain alcohol dehydrogenase, putative;
  misc_feature (1)..(126): Homolog of NCBI NO: 18407273 NR Description: putative alcohol dehydrogenase; protein id: supported by cDNA: gi_13878112, supported by cDNA: gi_17104782 thaliana] >gi|13878113|gb|AAK44134.1|AF370319_1 putative alcohol
  misc_feature (1)..(126): Homolog of NCBI NO: 7431087 NR Description: probable alcohol dehydrogenase [imported] -
  misc_feature (1)..(125): Homolog of NCBI NO: 15983819 NR Description: 3-beta-hydroxysteroiddehydrogenase [Digitalis
  misc_feature (1)..(124): Homolog of NCBI NO: 7981382 NR Description: putative alcohol dehydrogenase [Lycopersicon
  misc_feature (1)..(124): Homolog of NCBI NO: 40714675 NR Description: putative hydroxysteroiddehydrogenase [Oryza
MVEKGTRGSIVCTTSVSAEIGGGHHGYTASKHGLVGLIRSACGDLGKYGIRVNGVAPYAVATPMTSHDEVTGKQLEDYFDAKGILKGMVLKASHVAQVALFLASDDSAYISGQNLAVDGGYTVVKPSRD

SEQ ID NO: 78824 - DNA, 1592 bp, Arabidopsis thaliana
  misc_feature (1)..(1592): Ceres Seq. ID no. 12645549
  misc_feature: MA Experiment ID: 20000179 Result: Down-regulated in Transcription
  misc_feature: MA Experiment 20000179 PARAMETER Experiment Name: At_Germinating_Seeds_P Parameter: Age (hr) Value: 6 vs. 0
  misc_feature: MA Experiment 20000179 PARAMETER Experiment Name: At_Germinating_Seeds_P Parameter: Tissue Value: Germinating Seeds
  misc_feature: MA Experiment ID: 20000213 Result: Up-regulated in Transcription
  misc_feature: MA Experiment 20000213 PARAMETER Experiment Name: At_4deg_Cold_P Parameter: Timepoint (hr) Value: 2
  misc_feature: MA Experiment ID: 20000214 Result: Up-regulated in Transcription
  misc_feature: MA Experiment 20000214 PARAMETER Experiment Name: At_4deg_Cold_P Parameter: Timepoint (hr) Value: 6
  misc_feature: MA Experiment ID: 20000234 Result: Up-regulated in Transcription
  misc_feature: MA Experiment 20000234 PARAMETER Experiment Name: At_Siliques_P Parameter: Age (day) Value: 21
  misc_feature: MA Experiment 20000234 PARAMETER Experiment Name: At_Siliques_P Parameter: Organism Value: A. thaliana
  misc_feature: MA Experiment 20000234 PARAMETER Experiment Name: At_Siliques_P Parameter: Plant Line Value: WS
  misc_feature: MA Experiment 20000234 PARAMETER Experiment Name: At_Siliques_P Parameter: Tissue Value: Less Than 5mm Siliques vs. Whole Plant
  misc_feature: MA Experiment ID: 20000267 Result: Up-regulated in Transcription
  misc_feature: MA Experiment 20000267 PARAMETER Experiment Name: At_Drought_P Parameter: Age (day) Value: 7
  misc_feature: MA Experiment 20000267 PARAMETER Experiment Name: At_Drought_P Parameter: Organism Value: A. thaliana
  misc_feature: MA Experiment 20000267 PARAMETER Experiment Name: At_Drought_P Parameter: Plant Line Value: WS
  misc_feature: MA Experiment 20000267 PARAMETER Experiment Name: At_Drought_P Parameter: Timepoint (hr) Value: 6
  misc_feature: MA Experiment 20000267 PARAMETER Experiment Name: At_Drought_P Parameter: Tissue Value: Whole Plant
  misc_feature: MA Experiment 20000267 PARAMETER Experiment Name: At_Drought_P Parameter: Treatment Value: Drought vs. No Drought
  misc_feature: MA Experiment ID: 20000436 Result: Up-regulated in Transcription
  misc_feature: MA Experiment 20000436 PARAMETER Experiment Name: At_Drought_P Parameter: Age (day) Value: 7
  misc_feature: MA Experiment 20000436 PARAMETER Experiment Name: At_Drought_P Parameter: Organism Value: A. thaliana
  misc_feature: MA Experiment 20000436 PARAMETER Experiment Name: At_Drought_P Parameter: Plant Line Value: WS
  misc_feature: MA Experiment 20000436 PARAMETER Experiment Name: At_Drought_P Parameter: Timepoint (hr) Value: 12
  misc_feature: MA Experiment 20000436 PARAMETER Experiment Name: At_Drought_P Parameter: Tissue Value: Whole Plant
  misc_feature: MA Experiment 20000436 PARAMETER Experiment Name: At_Drought_P Parameter: Treatment Value: Drought vs. No Drought
  misc_feature: MA Experiment ID: 20000437 Result: Up-regulated in Transcription
  misc_feature: MA Experiment 20000437 PARAMETER Experiment Name: At_Drought_P Parameter: Age (day) Value: 8
  misc_feature: MA Experiment 20000437 PARAMETER Experiment Name: At_Drought_P Parameter: Organism Value: A. thaliana
  misc_feature: MA Experiment 20000437 PARAMETER Experiment Name: At_Drought_P Parameter: Plant Line Value: WS
  misc_feature: MA Experiment 20000437 PARAMETER Experiment Name: At_Drought_P Parameter: Timepoint (hr) Value: 24
  misc_feature: MA Experiment 20000437 PARAMETER Experiment Name: At_Drought_P Parameter: Tissue Value: Whole Plant
  misc_feature: MA Experiment 20000437 PARAMETER Experiment Name: At_Drought_P Parameter: Treatment Value: Drought vs. No Drought
  misc_feature: MA Experiment ID: 20000495 Result: Up-regulated in Transcription
  misc_feature: MA Experiment 20000495 PARAMETER Experiment Name: At_Guard_Cells_P Parameter: Harvest Date Value: 8/2/2002
  misc_feature: MA Experiment 20000495 PARAMETER Experiment Name: At_Guard_Cells_P Parameter: Organism Value: A. thaliana
  misc_feature: MA Experiment 20000495 PARAMETER Experiment Name: At_Guard_Cells_P Parameter: Tissue Value: Guard Cells vs. Leaves
  misc_feature: MA Experiment ID: 20000573 Result: Up-regulated in Transcription
  misc_feature: MA Experiment 20000573 PARAMETER Experiment Name: At_100uM_ABA_Mutants__P Parameter: Organism Value: A. thaliana
  misc_feature: MA Experiment 20000573 PARAMETER Experiment Name: At_100uM_ABA_Mutants__P Parameter: Plant Line Value: CS22 vs. Ler wt
  misc_feature: MA Experiment 20000573 PARAMETER Experiment Name: At_100uM_ABA_Mutants__P Parameter: Timepoint (hr) Value: N/A
  misc_feature: MA Experiment 20000573 PARAMETER Experiment Name: At_100uM_ABA_Mutants__P Parameter: Tissue Value: Whole Plant
  misc_feature: MA Experiment 20000573 PARAMETER Experiment Name: At_100uM_ABA_Mutants__P Parameter: Treatment Value: None
  misc_feature: MA Experiment ID: 20000574 Result: Up-regulated in Transcription
  misc_feature: MA Experiment 20000574 PARAMETER Experiment Name: At_100uM_ABA_Mutants__P Parameter: Organism Value: A. thaliana
  misc_feature: MA Experiment 20000574 PARAMETER Experiment Name: At_100uM_ABA_Mutants__P Parameter: Plant Line Value: CS23 vs. Ler wt
  misc_feature: MA Experiment 20000574 PARAMETER Experiment Name: At_100uM_ABA_Mutants__P Parameter: Timepoint (hr) Value: N/A
  misc_feature: MA Experiment 20000574 PARAMETER Experiment Name: At_100uM_ABA_Mutants__P Parameter: Tissue Value: Whole Plant
  misc_feature: MA Experiment 20000574 PARAMETER Experiment Name: At_100uM_ABA_Mutants__P Parameter: Treatment Value: None
  misc_feature: MA Experiment ID: 20000794 Result: Down-regulated in Transcription
  misc_feature: MA Experiment 20000794 PARAMETER Experiment Name: At_Petals_P Parameter: Age (day) Value: 23-25 days
  misc_feature: MA Experiment 20000794 PARAMETER Experiment Name: At_Petals_P Parameter: Plant Line Value: WS
  misc_feature: MA Experiment 20000794 PARAMETER Experiment Name: At_Petals_P Parameter: Tissue Value: Petals vs. Whole plant
  misc_feature: MA Experiment ID: 20001450 Result: Down-regulated in Transcription
  misc_feature: MA Experiment 20001450 PARAMETER Experiment Name: At_Far-red-induction_P Parameter: Age (day) Value: 7
  misc_feature: MA Experiment 20001450 PARAMETER Experiment Name: At_Far-red-induction_P Parameter: Light Value: Far-red vs. White
  misc_feature: MA Experiment 20001450 PARAMETER Experiment Name: At_Far-red-induction_P Parameter: Organism Value: A. thaliana
  misc_feature: MA Experiment 20001450 PARAMETER Experiment Name: At_Far-red-induction_P Parameter: Plant Line Value: Columbia
  misc_feature: MA Experiment 20001450 PARAMETER Experiment Name: At_Far-red-induction_P Parameter: Timepoint (hr) Value: 8
  misc_feature: MA Experiment 20001450 PARAMETER Experiment Name: At_Far-red-induction_P Parameter: Tissue Value: Whole Plant
  misc_feature: MA Experiment ID: 20001451 Result: Down-regulated in Transcription
  misc_feature: MA Experiment 20001451 PARAMETER Experiment Name: At_Far-red-induction_P Parameter: Age (day) Value: 7
  misc_feature: MA Experiment 20001451 PARAMETER Experiment Name: At_Far-red-induction_P Parameter: Light Value: Far-red vs. White
  misc_feature: MA Experiment 20001451 PARAMETER Experiment Name: At_Far-red-induction_P Parameter: Organism Value: A. thaliana
  misc_feature: MA Experiment 20001451 PARAMETER Experiment Name: At_Far-red-induction_P Parameter: Plant Line Value: Columbia
  misc_feature: MA Experiment 20001451 PARAMETER Experiment Name: At_Far-red-induction_P Parameter: Timepoint (hr) Value: 24
  misc_feature: MA Experiment 20001451 PARAMETER Experiment Name: At_Far-red-induction_P Parameter: Tissue Value: Whole Plant
  misc_feature: MA Experiment ID: 20001555 Result: Down-regulated in Transcription
  misc_feature: MA Experiment 20001555 PARAMETER Experiment Name: At_Drought_Soil_Dry_P Parameter: Age (day) Value: 24
  misc_feature: MA Experiment 20001555 PARAMETER Experiment Name: At_Drought_Soil_Dry_P Parameter: Organism Value: A. thaliana
  misc_feature: MA Experiment 20001555 PARAMETER Experiment Name: At_Drought_Soil_Dry_P Parameter: Plant Line Value: WS
  misc_feature: MA Experiment 20001555 PARAMETER Experiment Name: At_Drought_Soil_Dry_P Parameter: Post Timepoint (hr) Value: None
  misc_feature: MA Experiment 20001555 PARAMETER Experiment Name: At_Drought_Soil_Dry_P Parameter: Post-Treatment Value: None
  misc_feature: MA Experiment 20001555 PARAMETER Experiment Name: At_Drought_Soil_Dry_P Parameter: Timepoint (day) Value: 10
  misc_feature: MA Experiment 20001555 PARAMETER Experiment Name: At_Drought_Soil_Dry_P Parameter: Treatment Value: Drought vs. No Drought
  misc_feature: MA Experiment ID: 20001557 Result: Up-regulated in Transcription
  misc_feature: MA Experiment 20001557 PARAMETER Experiment Name: At_Drought_Soil_Dry_P Parameter: Age (day) Value: 27
  misc_feature: MA Experiment 20001557 PARAMETER Experiment Name: At_Drought_Soil_Dry_P Parameter: Organism Value: A. thaliana
  misc_feature: MA Experiment 20001557 PARAMETER Experiment Name: At_Drought_Soil_Dry_P Parameter: Plant Line Value: WS
  misc_feature: MA Experiment 20001557 PARAMETER Experiment Name: At_Drought_Soil_Dry_P Parameter: Post Timepoint (hr) Value: 3
  misc_feature: MA Experiment 20001557 PARAMETER Experiment Name: At_Drought_Soil_Dry_P Parameter: Post-Treatment Value: Re-Water vs. No Drought
  misc_feature: MA Experiment 20001557 PARAMETER Experiment Name: At_Drought_Soil_Dry_P Parameter: Timepoint (day) Value: 13
  misc_feature: MA Experiment 20001557 PARAMETER Experiment Name: At_Drought_Soil_Dry_P Parameter: Treatment Value: Drought vs. No Drought
  misc_feature: MA Experiment ID: 20001905 Result: Up-regulated in Transcription
  misc_feature: MA Experiment 20001905 PARAMETER Experiment Name: At_Drought_Reproduction_P Parameter: Age (day) Value: 40
  misc_feature: MA Experiment 20001905 PARAMETER Experiment Name: At_Drought_Reproduction_P Parameter: Organism Value: A. thaliana
  misc_feature: MA Experiment 20001905 PARAMETER Experiment Name: At_Drought_Reproduction_P Parameter: Plant Line Value: WS
  misc_feature: MA Experiment 20001905 PARAMETER Experiment Name: At_Drought_Reproduction_P Parameter: Timepoint (day) Value: 10
  misc_feature: MA Experiment 20001905 PARAMETER Experiment Name: At_Drought_Reproduction_P Parameter: Tissue Value: Rosettes
  misc_feature: MA Experiment 20001905 PARAMETER Experiment Name: At_Drought_Reproduction_P Parameter: Treatment Value: Drought vs. No Drought
gaatacaaaaactgaaacctttctctatttatctctctatacacaacaatggcggtcttcgttttatctctactcatactctcttccttctcagccattccattcacttatgcagattctggaatgatcggagttaactacggccgtatagcagacaatcttccggcaccggagaaagtagttgagctactgaaaacacaaggaatcaaccgcatcaagctttacgacaccgagacaactgtactaaccgcactcgcgaactccggaatcaaagtcgttgtctctctccccaacgaaaacctcgcttccgccgccgcagatcagagctacaccgacacttgggttcaggacaacataaagaagtacattccagcgacggatatcgaagcaatcgccgttgggaacgaagtgttcgtcgatccgaggaacacgacgacgtatctcgttccagctatgaagaatgttcaaagctctctcgtcaagttcaatctcgacaaatccattaagatctcgtcgccgattgctttaagcgcgttggcgagttcgtatccaccgtcggctggttcgtttaaaccggagttaatcgaaccggttattaaaccgatgcttgatctcctccgcaaaacgtcgtcgcatcttatggtgaatgcttatcctttctttgcttacgcagctaacgccgataagatctcgttggattacgcgttgtttaaggagaacgccgggaatgttgattccggtaacggtttgaagtataacagtctcttagacgctcagatcgacgccgttttcgccgcaatgtccgccgttggatttaacgacgttaagcttgtggtgacagagacaggctggccttctgccggagacgagaacgagattggtgctggttcggctaacgcggcggcgtataacggcgggttagttaaaagagtgttgacgggaaacggaacgccgttaaaaccgaaggagccactaaacgtttatctgttcgctctgtttaacgagaatcagaaaacgggtccgacttctgagagaaactacgggttgttttacccaaacgagaacaaagtgtatgacgtttcgctcaacggtaagtcaacgccggtcaacgataacaaagagaaggttgttccggtgaaaccgtcgctcgtgggacagacgtggtgtgtggcgaatggtaaaacgacgaaggagaagcttcaggaaggtctcgactacgcttgtggcgaaggaggtgctgattgccgtccgattcaaccgggtgccacgtgttataatcctgaatcgttagaagctcacgcttcctacgcgttcaacagttactatcagaagaacgcacgtggagttggcacgtgtaattttggtggtgcagcgtacgtggtctcgcaacctcctaagtatgggaaatgcgagtttccaacagggcattgaaatggatatagagaagaagaggatcgtgcggatttatttacgttatttattttgatacattgttcttttgtcattcgagtatatgatttgcgtatatttatttttattattgtatatttggttggtttcatcggataaatagtcagattttctttccccct

SEQ ID NO: 78825 - protein, 460 aa, Arabidopsis thaliana
  peptide (1)..(460): Ceres Seq. ID no. 12645550
  misc_feature (27)..(346): Pfam Name: Glycosyl hydrolases family 17 Pfam Description: Glycosyl hydrolases family 17
  misc_feature (1)..(460): Homolog of NCBI NO: 18423719 NR Description: glycosyl hydrolase family 17; protein id: supported by cDNA: 7119., supported by cDNA: gi_18700154
  misc_feature (1)..(460): Homolog of NCBI NO: 18700155 NR Description: AT5g55180/MCO15_13 [Arabidopsis thaliana]
  misc_feature (1)..(460): Homolog of NCBI NO: 21594590 NR Description: beta-1,3-glucanase-like protein [Arabidopsis
  misc_feature (1)..(451): Homolog of NCBI NO: 9758115 NR Description: beta-1,3-glucanase-like protein [Arabidopsis
  misc_feature (1)..(450): Homolog of NCBI NO: 15236882 NR Description: glycosyl hydrolase family 17; protein id:
  misc_feature (1)..(460): Homolog of NCBI NO: 11071974 NR Description: elicitor inducible beta-1,3-glucanase Nt-SubE76
  misc_feature (5)..(460): Homolog of NCBI NO: 30678225 NR Description: glycosyl hydrolase family 17 [Arabidopsis
  misc_feature (5)..(451): Homolog of NCBI NO: 25316444 NR Description: probable beta-1,3-glucanase [imported] -
  misc_feature (1)..(346): Homolog of NCBI NO: 27529826 NR Description: beta-1,3-glucanase-like protein [Nicotiana
  misc_feature (6)..(350): Homolog of NCBI NO: 11279331 NR Description: beta-1,3-glucanase (EC 3.2.1.-) precursor
MAVFVLSLLILSSFSAIPFTYADSGMIGVNYGRIADNLPAPEKVVELLKTQGINRIKLYDTETTVLTALANSGIKVVVSLPNENLASAAADQSYTDTWVQDNIKKYIPATDIEAIAVGNEVFVDPRNTTTYLVPAMKNVQSSLVKFNLDKSIKISSPIALSALASSYPPSAGSFKPELIEPVIKPMLDLLRKTSSHLMVNAYPFFAYAANADKISLDYALFKENAGNVDSGNGLKYNSLLDAQIDAVFAAMSAVGFNDVKLVVTETGWPSAGDENEIGAGSANAAAYNGGLVKRVLTGNGTPLKPKEPLNVYLFALFNENQKTGPTSERNYGLFYPNENKVYDVSLNGKSTPVNDNKEKVVPVKPSLVGQTWCVANGKTTKEKLQEGLDYACGEGGADCRPIQPGATCYNPESLEAHASYAFNSYYQKNARGVGTCNFGGAAYVVSQPPKYGKCEFPTGH

SEQ ID NO: 78826 - protein, 435 aa, Arabidopsis thaliana
  peptide (1)..(435): Ceres Seq. ID no. 12645551
  misc_feature (2)..(321): Pfam Name: Glycosyl hydrolases family 17 Pfam Description: Glycosyl hydrolases family 17
  misc_feature (1)..(435): Homolog of NCBI NO: 18423719 NR Description: glycosyl hydrolase family 17; protein id: supported by cDNA: 7119., supported by cDNA: gi_18700154
  misc_feature (1)..(435): Homolog of NCBI NO: 18700155 NR Description: AT5g55180/MCO15_13 [Arabidopsis thaliana]
  misc_feature (1)..(435): Homolog of NCBI NO: 21594590 NR Description: beta-1,3-glucanase-like protein [Arabidopsis
  misc_feature (1)..(426): Homolog of NCBI NO: 9758115 NR Description: beta-1,3-glucanase-like protein [Arabidopsis
  misc_feature (1)..(425): Homolog of NCBI NO: 15236882 NR Description: glycosyl hydrolase family 17; protein id:
  misc_feature (1)..(435): Homolog of NCBI NO: 11071974 NR Description: elicitor inducible beta-1,3-glucanase Nt-SubE76
  misc_feature (1)..(435): Homolog of NCBI NO: 30678225 NR Description: glycosyl hydrolase family 17 [Arabidopsis
  misc_feature (1)..(426): Homolog of NCBI NO: 25316444 NR Description: probable beta-1,3-glucanase [imported] -
  misc_feature (1)..(321): Homolog of NCBI NO: 27529826 NR Description: beta-1,3-glucanase-like protein [Nicotiana
  misc_feature (1)..(325): Homolog of NCBI NO: 11279331 NR Description: beta-1,3-glucanase (EC 3.2.1.-) precursor
MIGVNYGRIADNLPAPEKVVELLKTQGINRIKLYDTETTVLTALANSGIKVVVSLPNENLASAAADQSYTDTWVQDNIKKYIPATDIEAIAVGNEVFVDPRNTTTYLVPAMKNVQSSLVKFNLDKSIKISSPIALSALASSYPPSAGSFKPELIEPVIKPMLDLLRKTSSHLMVNAYPFFAYAANADKISLDYALFKENAGNVDSGNGLKYNSLLDAQIDAVFAAMSAVGFNDVKLVVTETGWPSAGDENEIGAGSANAAAYNGGLVKRVLTGNGTPLKPKEPLNVYLFALFNENQKTGPTSERNYGLFYPNENKVYDVSLNGKSTPVNDNKEKVVPVKPSLVGQTWCVANGKTTKEKLQEGLDYACGEGGADCRPIQPGATCYNPESLEAHASYAFNSYYQKNARGVGTCNFGGAAYVVSQPPKYGKCEFPTGH

SEQ ID NO: 78827 - protein, 325 aa, Arabidopsis thaliana; identical to SEQ ID NO: 27713
  peptide (1)..(325): Ceres Seq. ID no. 12645552
  misc_feature (1)..(211): Pfam Name: Glycosyl hydrolases family 17 Pfam Description: Glycosyl hydrolases family 17
  misc_feature (1)..(325): Homolog of NCBI NO: 18423719 NR Description: glycosyl hydrolase family 17; protein id: supported by cDNA: 7119., supported by cDNA: gi_18700154
  misc_feature (1)..(325): Homolog of NCBI NO: 18700155 NR Description: AT5g55180/MCO15_13 [Arabidopsis thaliana]
  misc_feature (1)..(325): Homolog of NCBI NO: 21594590 NR Description: beta-1,3-glucanase-like protein [Arabidopsis
  misc_feature (1)..(316): Homolog of NCBI NO: 9758115 NR Description: beta-1,3-glucanase-like protein [Arabidopsis
  misc_feature (1)..(315): Homolog of NCBI NO: 15236882 NR Description: glycosyl hydrolase family 17; protein id:
  misc_feature (1)..(325): Homolog of NCBI NO: 11071974 NR Description: elicitor inducible beta-1,3-glucanase Nt-SubE76
  misc_feature (1)..(325): Homolog of NCBI NO: 30678225 NR Description: glycosyl hydrolase family 17 [Arabidopsis
  misc_feature (1)..(316): Homolog of NCBI NO: 25316444 NR Description: probable beta-1,3-glucanase [imported] -
  misc_feature (1)..(211): Homolog of NCBI NO: 27529826 NR Description: beta-1,3-glucanase-like protein [Nicotiana
  misc_feature (1)..(215): Homolog of NCBI NO: 11279331 NR Description: beta-1,3-glucanase (EC 3.2.1.-) precursor

SEQ ID NO: 78828 - DNA, 2307 bp, Arabidopsis thaliana
  misc_feature (1)..(2307): Ceres Seq. ID no. 12645616
  misc_feature: MA Experiment ID: 20000180 Result: Up-regulated in Transcription
  misc_feature: MA Experiment 20000180 PARAMETER Experiment Name: At_Germinating_Seeds_P Parameter: Age (hr) Value: 24 vs. 0
  misc_feature: MA Experiment 20000180 PARAMETER Experiment Name: At_Germinating_Seeds_P Parameter: Tissue Value: Germinating Seeds
  misc_feature: MA Experiment ID: 20000495 Result: Down-regulated in Transcription
  misc_feature: MA Experiment 20000495 PARAMETER Experiment Name: At_Guard_Cells_P Parameter: Harvest Date Value: 8/2/2002
  misc_feature: MA Experiment 20000495 PARAMETER Experiment Name: At_Guard_Cells_P Parameter: Organism Value: A. thaliana
  misc_feature: MA Experiment 20000495 PARAMETER Experiment Name: At_Guard_Cells_P Parameter: Tissue Value: Guard Cells vs. Leaves
  misc_feature: MA Experiment ID: 20001451 Result: Up-regulated in Transcription
  misc_feature: MA Experiment 20001451 PARAMETER Experiment Name: At_Far-red-induction_P Parameter: Age (day) Value: 7
  misc_feature: MA Experiment 20001451 PARAMETER Experiment Name: At_Far-red-induction_P Parameter: Light Value: Far-red vs. White
  misc_feature: MA Experiment 20001451 PARAMETER Experiment Name: At_Far-red-induction_P Parameter: Organism Value: A. thaliana
  misc_feature: MA Experiment 20001451 PARAMETER Experiment Name: At_Far-red-induction_P Parameter: Plant Line Value: Columbia
  misc_feature: MA Experiment 20001451 PARAMETER Experiment Name: At_Far-red-induction_P Parameter: Timepoint (hr) Value: 24
  misc_feature: MA Experiment 20001451 PARAMETER Experiment Name: At_Far-red-induction_P Parameter: Tissue Value: Whole Plant
atggactcttttttcaaaaactcatatctggacccaaaggctgtgcgtgcccagcttcctaagagggctgatcttgcggctccttctgaaccgatgaccgttgcgttagctattagtgggagcattaaaagcaagaatgtaattaagtgggcgctcaacaagtttggttctgacaaaaatgtcactttcaagctgattcacatccatccaaagattactactctacctacagcttcggggaacatagtctctatatccgaggaactagaggaagtagcggctgcttatagacaaaaagtgatgcaggagacaaaagaaactcttcttaaacctttcaagaaaatgtgcgagcggaaaaagctaaagatcgatgaaactcgttttgaatcttctttgacaaaggttgcagtagaacttcaagtgcttgaatcaaatagtgttgcagtggcgataaccaaagaggttaatcagcatttgatcagcaatcttatcattggacgctcatctcaagctgcctcctcgaggaattatgatattacagcgtcgatatcagcatctgtgtcaaacttgtgcacagtctatgttgtctcaaacggaggagtccatattcttgcaaaagacacgtcagacacggagaggaatgacacttcaatagaatctggttttgagagaacttcctccagctgttcttctggttcaggagctaactcagaggaagcaagcaagagaagtagccctgaaacatcacgtagtgtttcttggaatcctcagtttagagattttgacgagagaaaagacgctatgagttccatgtctagcaactttgaatacggaaatgttgttactccccttggacactatttcacagacaaccaggacacgcttaatgaaatttcgaagttgagagctgagcttagacacgctcatgaaatgtatgcagtggctcaagttgaaacgttggatgcttctcgtaagctaaacgagcttaagtttgaagagctaacgcttctggagcacgaaacgaaggggatagcaaaaaaggaaacagagaagtttgagcagaagagaagggaagagagagaagctgcacaaagaagagaagctgagatgaaagcaacccatgaagccaaagagaaggagaagcttgaagaaagttcccttgtggctcctaagctgcaataccaagagttcacgtgggaagaaattattaacgcaacttcatcattctctgaagatttaaagatcggaatgggagcttacggggatgtttacaaatgcaatctgcatcatacaatcgccgctgtcaaagttttgcattctgctgaaagtagtctatccaagcaattcgatcaagagctcgaaatcttgagcaagatcaggcacccgcacttggttcttcttctaggagcatgtcctgatcatggcgctctagtgtatgagtacatggaaaacggtagcttggaagatagactgttccaagtcaacgatagtcaaccaatcccgtggttcgtgcggttaagaatcgcttgggaagtcgcatcagcgcttgttttcctccacaaatcaaaaccgacaccaatcatccaccgcgatcttaagcctgctaacatcttgcttaatcacaactttgtcagcaaagtaggagatgttggtctttccacaatgatccaagctgccgacccattgtcaaccaaattcacaatgtacaagcagacaagccccgtgggaacgttatgctatatcgatcccgaatatcaacgaaccggaaggatatctccaaaatcagacgtgtatgctttcggaatgatcattctgcagcttctcactggtcaacaggctatggcactgacatatacagtagaaacagccatggagaacaacaacgacgatgagttaatacagattcttgatgaaaaagcaggtaactggccaatcgaagaaactaggcaattagctgctttagcactccagtgtacagagctccgttctaaagacaggcctgatttggaagatcagattcttccagtattggaaagcttgaagaaagtagctgataaagcaagaaactcgctttccgctgcgccaagtcaacctccaagccatttcttctgtccattacttaaggatgtgatgaaggagccatgtattgcggctgatgggtacacttatgaccggagagccatagaggagtggatggagaaccaccggacgtctccggttactaattcgccgttacaaaacgtgaaccttttgcccaatcacactctttacgcagccatcgtcgaatggagaaatagaaatcagtga

SEQ ID NO: 78829 - protein, 768 aa, Arabidopsis thaliana
  peptide (1)..(768): Ceres Seq. ID no. 12645617
  misc_feature (32)..(197): Pfam Name: Universal stress protein family Pfam Description: Universal stress protein family
  misc_feature (205)..(765): Homolog of NCBI NO: 15234952 NR Description: putative Ser Thr protein kinase; protein id:
  misc_feature (130)..(238): Homolog of NCBI NO: 15234952 NR Description: putative Ser Thr protein kinase; protein id:
  misc_feature (20)..(109): Homolog of NCBI NO: 15234952 NR Description: putative Ser Thr protein kinase; protein id:
  misc_feature (297)..(768): Homolog of NCBI NO: 15240280 NR Description: putative protein; protein id: At5g61550.1
  misc_feature (11)..(255): Homolog of NCBI NO: 15240280 NR Description: putative protein; protein id: At5g61550.1
  misc_feature (32)..(766): Homolog of NCBI NO: 9758471 NR Description: contains similarity to receptor-like protein
  misc_feature (210)..(766): Homolog of NCBI NO: 30697549 NR Description: protein kinase family [Arabidopsis thaliana]
  misc_feature (327)..(767): Homolog of NCBI NO: 29367517 NR Description: putative serine/threonine protein kinase [Oryza
  misc_feature (290)..(764): Homolog of NCBI NO: 37536860 NR Description: putative protein kinase [Oryza sativa (japonica group)] >gi|13569983|gb|AAK31267.1| putative protein kinase sativa] >gi|31433514|gb|AAP55019.1| putative protein kinase
  misc_feature (257)..(766): Homolog of NCBI NO: 15224775 NR Description: putative protein kinase; protein id: At2g19410.1 thaliana] >gi|7486244|pir||T01289 probable protein kinase
MDSFFKNSYLDPKAVRAQLPKRADLAAPSEPMTVALAISGSIKSKNVIKWALNKFGSDKNVTFKLIHIHPKITTLPTASGNIVSISEELEEVAAAYRQKVMQETKETLLKPFKKMCERKKLKIDETRFESSLTKVAVELQVLESNSVAVAITKEVNQHLISNLIIGRSSQAASSRNYDITASISASVSNLCTVYVVSNGGVHILAKDTSDTERNDTSIESGFERTSSSCSSGSGANSEEASKRSSPETSRSVSWNPQFRDFDERKDAMSSMSSNFEYGNVVTPLGHYFTDNQDTLNEISKLRAELRHAHEMYAVAQVETLDASRKLNELKFEELTLLEHETKGIAKKETEKFEQKRREEREAAQRREAEMKATHEAKEKEKLEESSLVAPKLQYQEFTWEEIINATSSFSEDLKIGMGAYGDVYKCNLHHTIAAVKVLHSAESSLSKQFDQELEILSKIRHPHLVLLLGACPDHGALVYEYMENGSLEDRLFQVNDSQPIPWFVRLRIAWEVASALVFLHKSKPTPIIHRDLKPANILLNHNFVSKVGDVGLSTMIQAADPLSTKFTMYKQTSPVGTLCYIDPEYQRTGRISPKSDVYAFGMIILQLLTGQQAMALTYTVETAMENNNDDELIQILDEKAGNWPIEETRQLAALALQCTELRSKDRPDLEDQILPVLESLKKVADKARNSLSAAPSQPPSHFFCPLLKDVMKEPCIAADGYTYDRRAIEEWMENHRTSPVTNSPLQNVNLLPNHTLYAAIVEWRNRNQ

SEQ ID NO: 78830 - protein, 737 aa, Arabidopsis thaliana
  peptide (1)..(737): Ceres Seq. ID no. 12645618
  misc_feature (1)..(166): Pfam Name: Universal stress protein family Pfam Description: Universal stress protein family
  misc_feature (174)..(734): Homolog of NCBI NO: 15234952 NR Description: putative Ser Thr protein kinase; protein id:
  misc_feature (99)..(207): Homolog of NCBI NO: 15234952 NR Description: putative Ser Thr protein kinase; protein id:
  misc_feature (1)..(78): Homolog of NCBI NO: 15234952 NR Description: putative Ser Thr protein kinase; protein id:
  misc_feature (266)..(737): Homolog of NCBI NO: 15240280 NR Description: putative protein; protein id: At5g61550.1
  misc_feature (1)..(224): Homolog of NCBI NO: 15240280 NR Description: putative protein; protein id: At5g61550.1
  misc_feature (1)..(735): Homolog of NCBI NO: 9758471 NR Description: contains similarity to receptor-like protein
  misc_feature (179)..(735): Homolog of NCBI NO: 30697549 NR Description: protein kinase family [Arabidopsis thaliana]
  misc_feature (296)..(736): Homolog of NCBI NO: 29367517 NR Description: putative serine/threonine protein kinase [Oryza
  misc_feature (259)..(733): Homolog of NCBI NO: 37536860 NR Description: putative protein kinase [Oryza sativa (japonica group)] >gi|13569983|gb|AAK31267.1| putative protein kinase sativa] >gi|31433514|gb|AAP55019.1| putative protein kinase
  misc_feature (226)..(735): Homolog of NCBI NO: 15224775 NR Description: putative protein kinase; protein id: At2g19410.1 thaliana] >gi|7486244|pir||T01289 probable protein kinase
MTVALAISGSIKSKNVIKWALNKFGSDKNVTFKLIHIHPKITTLPTASGNIVSISEELEEVAAAYRQKVMQETKETLLKPFKKMCERKKLKIDETRFESSLTKVAVELQVLESNSVAVAITKEVNQHLISNLIIGRSSQAASSRNYDITASISASVSNLCTVYVVSNGGVHILAKDTSDTERNDTSIESGFERTSSSCSSGSGANSEEASKRSSPETSRSVSWNPQFRDFDERKDAMSSMSSNFEYGNVVTPLGHYFTDNQDTLNEISKLRAELRHAHEMYAVAQVETLDASRKLNELKFEELTLLEHETKGIAKKETEKFEQKRREEREAAQRREAEMKATHEAKEKEKLEESSLVAPKLQYQEFTWEEIINATSSFSEDLKIGMGAYGDVYKCNLHHTIAAVKVLHSAESSLSKQFDQELEILSKIRHPHLVLLLGACPDHGALVYEYMENGSLEDRLFQVNDSQPIPWFVRLRIAWEVASALVFLHKSKPTPIIHRDLKPANILLNHNFVSKVGDVGLSTMIQAADPLSTKFTMYKQTSPVGTLCYIDPEYQRTGRISPKSDVYAFGMIILQLLTGQQAMALTYTVETAMENNNDDELIQILDEKAGNWPIEETRQLAALALQCTELRSKDRPDLEDQILPVLESLKKVADKARNSLSAAPSQPPSHFFCPLLKDVMKEPCIAADGYTYDRRAIEEWMENHRTSPVTNSPLQNVNLLPNHTLYAAIVEWRNRNQ

SEQ ID NO: 78831 - protein, 668 aa, Arabidopsis thaliana
  peptide (1)..(668): Ceres Seq. ID no. 12645619
  misc_feature (1)..(97): Pfam Name: Universal stress protein family Pfam Description: Universal stress protein family
  misc_feature (105)..(665): Homolog of NCBI NO: 15234952 NR Description: putative Ser Thr protein kinase; protein id:
  misc_feature (30)..(138): Homolog of NCBI NO: 15234952 NR Description: putative Ser Thr protein kinase; protein id:
  misc_feature (197)..(668): Homolog of NCBI NO: 15240280 NR Description: putative protein; protein id: At5g61550.1
  misc_feature (1)..(155): Homolog of NCBI NO: 15240280 NR Description: putative protein; protein id: At5g61550.1
  misc_feature (1)..(666): Homolog of NCBI NO: 9758471 NR Description: contains similarity to receptor-like protein
  misc_feature (110)..(666): Homolog of NCBI NO: 30697549 NR Description: protein kinase family [Arabidopsis thaliana]
  misc_feature (227)..(667): Homolog of NCBI NO: 29367517 NR Description: putative serine/threonine protein kinase [Oryza
  misc_feature (190)..(664): Homolog of NCBI NO: 37536860 NR Description: putative protein kinase [Oryza sativa (japonica group)] >gi|13569983|gb|AAK31267.1| putative protein kinase sativa] >gi|31433514|gb|AAP55019.1| putative protein kinase
  misc_feature (157)..(666): Homolog of NCBI NO: 15224775 NR Description: putative protein kinase; protein id: At2g19410.1 thaliana] >gi|7486244|pir||T01289 probable protein kinase
  misc_feature (183)..(668): Homolog of NCBI NO: 22327904 NR Description: similar to putative protein kinase; protein id:
MQETKETLLKPFKKMCERKKLKIDETRFESSLTKVAVELQVLESNSVAVAITKEVNQHLISNLIIGRSSQAASSRNYDITASISASVSNLCTVYVVSNGGVHILAKDTSDTERNDTSIESGFERTSSSCSSGSGANSEEASKRSSPETSRSVSWNPQFRDFDERKDAMSSMSSNFEYGNVVTPLGHYFTDNQDTLNEISKLRAELRHAHEMYAVAQVETLDASRKLNELKFEELTLLEHETKGIAKKETEKFEQKRREEREAAQRREAEMKATHEAKEKEKLEESSLVAPKLQYQEFTWEEIINATSSFSEDLKIGMGAYGDVYKCNLHHTIAAVKVLHSAESSLSKQFDQELEILSKIRHPHLVLLLGACPDHGALVYEYMENGSLEDRLFQVNDSQPIPWFVRLRIAWEVASALVFLHKSKPTPIIHRDLKPANILLNHNFVSKVGDVGLSTMIQAADPLSTKFTMYKQTSPVGTLCYIDPEYQRTGRISPKSDVYAFGMIILQLLTGQQAMALTYTVETAMENNNDDELIQILDEKAGNWPIEETRQLAALALQCTELRSKDRPDLEDQILPVLESLKKVADKARNSLSAAPSQPPSHFFCPLLKDVMKEPCIAADGYTYDRRAIEEWMENHRTSPVTNSPLQNVNLLPNHTLYAAIVEWRNRNQ

SEQ ID NO: 78832 - DNA, 985 bp, Arabidopsis thaliana
  misc_feature (1)..(985): Ceres Seq. ID no. 12645726
  misc_feature: MA Experiment ID: 108434 Result: Down-regulated in Transcription
  misc_feature: MA Experiment 108434 PARAMETER Experiment Name: At_Root_Tips_cDNA_P Parameter: Tissue Value: Root Tips
  misc_feature: MA Experiment ID: 108574 Result: Up-regulated in Transcription
  misc_feature: MA Experiment 108574 PARAMETER Experiment Name: At_Wounding__cDNA_P Parameter: Timepoint (hr) Value: 1
  misc_feature: MA Experiment 108574 PARAMETER Experiment Name: At_Wounding__cDNA_P Parameter: Tissue Value: Aerial
  misc_feature: MA Experiment 108574 PARAMETER Experiment Name: At_Wounding__cDNA_P Parameter: Treatment Value: Wounding vs. No Wounding
  misc_feature: MA Experiment ID: 108576 Result: Up-regulated in Transcription
  misc_feature: MA Experiment 108576 PARAMETER Experiment Name: At_42deg_Heat_cDNA_P Parameter: Temperature (deg C) Value: 42 vs. 22
  misc_feature: MA Experiment 108576 PARAMETER Experiment Name: At_42deg_Heat_cDNA_P Parameter: Timepoint (hr) Value: 1
  misc_feature: MA Experiment 108576 PARAMETER Experiment Name: At_42deg_Heat_cDNA_P Parameter: Tissue Value: Aerial
  misc_feature: MA Experiment ID: 108595 Result: Up-regulated in Transcription
  misc_feature: MA Experiment 108595 PARAMETER Experiment Name: At_Ler-pi_Ovule_cDNA_P Parameter: Plant Line Value: null
  misc_feature: MA Experiment ID: 20000111 Result: Up-regulated in Transcription
  misc_feature: MA Experiment 20000111 PARAMETER Experiment Name: At_42deg_Heat_cDNA_P Parameter: Temperature (deg C) Value: 42 vs. 22
  misc_feature: MA Experiment 20000111 PARAMETER Experiment Name: At_42deg_Heat_cDNA_P Parameter: Timepoint (hr) Value: 6
  misc_feature: MA Experiment 20000111 PARAMETER Experiment Name: At_42deg_Heat_cDNA_P Parameter: Tissue Value: Aerial
  misc_feature: MA Experiment ID: 20000234 Result: Down-regulated in Transcription
  misc_feature: MA Experiment 20000234 PARAMETER Experiment Name: At_Siliques_P Parameter: Age (day) Value: 21
  misc_feature: MA Experiment 20000234 PARAMETER Experiment Name: At_Siliques_P Parameter: Organism Value: A. thaliana
  misc_feature: MA Experiment 20000234 PARAMETER Experiment Name: At_Siliques_P Parameter: Plant Line Value: WS
  misc_feature: MA Experiment 20000234 PARAMETER Experiment Name: At_Siliques_P Parameter: Tissue Value: Less Than 5mm Siliques vs. Whole Plant
  misc_feature: MA Experiment ID: 20000235 Result: Down-regulated in Transcription
  misc_feature: MA Experiment 20000235 PARAMETER Experiment Name: At_Siliques_P Parameter: Age (day) Value: 21
  misc_feature: MA Experiment 20000235 PARAMETER Experiment Name: At_Siliques_P Parameter: Organism Value: A. thaliana
  misc_feature: MA Experiment 20000235 PARAMETER Experiment Name: At_Siliques_P Parameter: Plant Line Value: WS
  misc_feature: MA Experiment 20000235 PARAMETER Experiment Name: At_Siliques_P Parameter: Tissue Value: 5-10mm Siliques vs. Whole Plant
  misc_feature: MA Experiment ID: 20000264 Result: Down-regulated in Transcription
  misc_feature: MA Experiment 20000264 PARAMETER Experiment Name: At_Open_Flower_P Parameter: Age (day) Value: 21
  misc_feature: MA Experiment 20000264 PARAMETER Experiment Name: At_Open_Flower_P Parameter: Plant Line Value: WS
  misc_feature: MA Experiment 20000264 PARAMETER Experiment Name: At_Open_Flower_P Parameter: Tissue Value: Open Flower vs. Whole Plant
  misc_feature: MA Experiment ID: 20000265 Result: Down-regulated in Transcription
  misc_feature: MA Experiment 20000265 PARAMETER Experiment Name: At_Open_Flower_P Parameter: Age (day) Value: 21
  misc_feature: MA Experiment 20000265 PARAMETER Experiment Name: At_Open_Flower_P Parameter: Plant Line Value: WS
  misc_feature: MA Experiment 20000265 PARAMETER Experiment Name: At_Open_Flower_P Parameter: Tissue Value: Closed Flower vs. Whole Plant
  misc_feature: MA Experiment ID: 20000438 Result: Down-regulated in Transcription
  misc_feature: MA Experiment 20000438 PARAMETER Experiment Name: At_Shoots__P Parameter: Age (day) Value: 14
  misc_feature: MA Experiment 20000438 PARAMETER Experiment Name: At_Shoots__P Parameter: Tissue Value: Shoots vs. Whole Plant
  misc_feature: MA Experiment ID: 20000495 Result: Down-regulated in Transcription
  misc_feature: MA Experiment 20000495 PARAMETER Experiment Name: At_Guard_Cells_P Parameter: Harvest Date Value: 8/2/2002
  misc_feature: MA Experiment 20000495 PARAMETER Experiment Name: At_Guard_Cells_P Parameter: Organism Value: A. thaliana
  misc_feature: MA Experiment 20000495 PARAMETER Experiment Name: At_Guard_Cells_P Parameter: Tissue Value: Guard Cells vs. Leaves
agaacacaaacaaaaacacattgtaacattagtttaagcattaagcttctttatgtcgaataataataattctccgaccaccgtgaatcaagaaacgacgacgtctcgtgaagtctcaatcacattgcctactgatcaatctcctcaaacctcaccaggatcatcttcttctccttcaccgagaccttccggtggatcaccggcgagaagaacggcgactggattatccggcaagcactctattttcagggggattcgactacgtaacggaaaatgggtatcggagattagagagccacgtaaaacgacaagaatttggctcgggacttatccggtaccggagatggctgccgccgcttacgacgtggctgcgttagctttaaaaggacccgacgccgttttgaattttcctggtttagctttgacttacgtggctccggtttcaaactctgctgcggatataagagcggctgctagtagagcagcggagatgaagcaaccggatcagggtggggatgagaaggtattggaaccggttcaacccggcaaagaggaagaattagaagaagtgtcgtgtaactcgtgttcgttggagtttatggatgaggaagcgatgttgaatatgccgactttgttgacggagatggctgaagggatgttgatgagtccaccgagaatgatgatacatccgacgatggaagatgattcgccggagaatcatgaaggagataatctttggagttataaatgaatccattgaagctgctctcttttttattgttttccggtcgaatgagattttccccctttttttttttctttttgggtcgctgttatggaaagtcaaataggttattaatatgatatattaatatttttgaaacataatgagtttgaatttgaatttttccatttttatataaatatggtttatatgagggaaaaatagatacatatcgaagatataagaattgtttttctgctt

SEQ ID NO: 78833 - protein, 232 aa, Arabidopsis thaliana
  peptide (1)..(232): Ceres Seq. ID no. 12645727
  misc_feature (62)..(125): Pfam Name: AP2 domain Pfam Description: AP2 domain
  misc_feature (1)..(232): Homolog of NCBI NO: 15242262 NR Description: DRE binding protein; protein id: At5g52020.1, by cDNA: 251466. [Arabidopsis thaliana] contains similarity to AP2 domain transcription
  misc_feature (57)..(231): Homolog of NCBI NO: 15222031 NR Description: DRE binding protein; protein id: At1g12630.1
  misc_feature (39)..(231): Homolog of NCBI NO: 25404394 NR Description: hypothetical protein F16M19.1 [imported] - thaliana >gi|12323257|gb|AAG51609.1|AC010795_13 transcription
  misc_feature (39)..(221): Homolog of NCBI NO: 8493594 NR Description: Contains similarity to transcriptional activator from Arabidopsis thaliana gb|U77378 and contains an AP2 PF|00847
  misc_feature (54)..(231): Homolog of NCBI NO: 15227980 NR Description: DRE binding protein; protein id: At2g36450.1 thaliana] >gi|25408476|pir||H84780 probable AP2 domain
  misc_feature (27)..(231): Homolog of NCBI NO: 1899058 NR Description: transcriptional activator CBF1 [Arabidopsis >gi|4091982|gb|AAC99369.1| CRT/CRE binding factor 1 [Arabidopsis
  misc_feature (27)..(231): Homolog of NCBI NO: 18416562 NR Description: C-repeat/DRE binding factor 1 (CBF1) (DREB1B); id: At4g25490.1, supported by cDNA: gi_1899057, supported by gi_3738225 [Arabidopsis thaliana] >gi|7488377|pir||JE0298
  misc_feature (37)..(231): Homolog of NCBI NO: 40647095 NR Description: DREB-like protein 1 [Capsicum annuum]
  misc_feature (37)..(231): Homolog of NCBI NO: 12003382 NR Description: Avr9/Cf-9 rapidly elicited protein 111A
  misc_feature (29)..(231): Homolog of NCBI NO: 39983638 NR Description: CBF25 [Capsella bursa-pastoris]
MSNNNNSPTTVNQETTTSREVSITLPTDQSPQTSPGSSSSPSPRPSGGSPARRTATGLSGKHSIFRGIRLRNGKWVSEIREPRKTTRIWLGTYPVPEMAAAAYDVAALALKGPDAVLNFPGLALTYVAPVSNSAADIRAAASRAAEMKQPDQGGDEKVLEPVQPGKEEELEEVSCNSCSLEFMDEEAMLNMPTLLTEMAEGMLMSPPRMMIHPTMEDDSPENHEGDNLWSYK

SEQ ID NO: 78834 - protein, 135 aa, Arabidopsis thaliana
  peptide (1)..(135): Ceres Seq. ID no. 12645728
  misc_feature (1)..(135): Homolog of NCBI NO: 15242262 NR Description: DRE binding protein; protein id: At5g52020.1, by cDNA: 251466. [Arabidopsis thaliana] contains similarity to AP2 domain transcription
  misc_feature (1)..(134): Homolog of NCBI NO: 15222031 NR Description: DRE binding protein; protein id: At1g12630.1
  misc_feature (1)..(134): Homolog of NCBI NO: 25404394 NR Description: hypothetical protein F16M19.1 [imported] - thaliana >gi|12323257|gb|AAG51609.1|AC010795_13 transcription
  misc_feature (1)..(124): Homolog of NCBI NO: 8493594 NR Description: Contains similarity to transcriptional activator from Arabidopsis thaliana gb|U77378 and contains an AP2 PF|00847
  misc_feature (1)..(134): Homolog of NCBI NO: 15227980 NR Description: DRE binding protein; protein id: At2g36450.1 thaliana] >gi|25408476|pir||H84780 probable AP2 domain
  misc_feature (1)..(134): Homolog of NCBI NO: 1899058 NR Description: transcriptional activator CBF1 [Arabidopsis >gi|4091982|gb|AAC99369.1| CRT/CRE binding factor 1 [Arabidopsis
  misc_feature (1)..(134): Homolog of NCBI NO: 18416562 NR Description: C-repeat/DRE binding factor 1 (CBF1) (DREB1B); id: At4g25490.1, supported by cDNA: gi_1899057, supported by gi_3738225 [Arabidopsis thaliana] >gi|7488377|pir||JE0298
  misc_feature (1)..(134): Homolog of NCBI NO: 40647095 NR Description: DREB-like protein 1 [Capsicum annuum]
  misc_feature (1)..(134): Homolog of NCBI NO: 12003382 NR Description: Avr9/Cf-9 rapidly elicited protein 111A
  misc_feature (1)..(134): Homolog of NCBI NO: 39983638 NR Description: CBF25 [Capsella bursa-pastoris]
MAAAAYDVAALALKGPDAVLNFPGLALTYVAPVSNSAADIRAAASRAAEMKQPDQGGDEKVLEPVQPGKEEELEEVSCNSCSLEFMDEEAMLNMPTLLTEMAEGMLMSPPRMMIHPTMEDDSPENHEGDNLWSYK

SEQ ID NO: 78835 - DNA, 1923 bp, Arabidopsis thaliana
  misc_feature (1)..(1923): Ceres Seq. ID no. 12645774
  misc_feature: MA Experiment ID: 20000355 Result: Up-regulated in Transcription
  misc_feature: MA Experiment 20000355 PARAMETER Experiment Name: At_Siliques_Sub_P Parameter: Age (day) Value: 21
  misc_feature: MA Experiment 20000355 PARAMETER Experiment Name: At_Siliques_Sub_P Parameter: Organism Value: A. thaliana
  misc_feature: MA Experiment 20000355 PARAMETER Experiment Name: At_Siliques_Sub_P Parameter: Plant Line Value: WS
  misc_feature: MA Experiment 20000355 PARAMETER Experiment Name: At_Siliques_Sub_P Parameter: Tissue Value: Less Than 5mm Siliques vs. Whole Plant
  misc_feature: MA Experiment ID: 20000440 Result: Up-regulated in Transcription
  misc_feature: MA Experiment 20000440 PARAMETER Experiment Name: At_Closed-Flower__Sub_P Parameter: Tissue Value: Closed Flower vs. Whole Plant
atgggggtggctcaagcaatggaagccctaaccgagcgagcaagtttgatgaaagagtctttgcataagagccagaccatcaccgataacatggtcggaatcttaggttctttcgatcatcgtctctcggctcttgaaaccgcaatgcgtcccacacagagtctcaaggttgtggaatttgagatctatcttctgttgaaattgaaatgtgattctggatttggtgataaaatgataagaacacattctataaggagagctcatgagaatattgacaaggcattgaaagcagctgaggttatattggatcaatttgatatctctagaaaggcggaagctaaaatattgagaggaccacatgaggatcttgaaagctatctggaagcaattgatcaactaagaggcactatcaaattcttcagcaacaacaaaatgttcaaaagtgctagtggagttattagtcatgctcacggtttactttctaaagctctatcaaagctagaagatgagttcagacagatactgcaaaactacagtaagccaatggaacctgatcgccttttcgaatgtcttccgagtaatcttcgaccatcatcagaaggtgaaggtggtggtggaaagactcatgatccccatcacaagagcttagaaaacgctatttttactgtcccaactgtcattcctccaagggttctgcctctgcttcatgacttagctcaacaaatggttcaagctggtcatcagcaacaacttttcaaatcttacagggatactcgagctgcggtgttggaacagagtttgaggaaattaggagtggagaggcttagcaaagatgatgttcagagaatgcaatgggaggtgaaactgttattcgccgcggaaaagaaaatctgcgaccaaattcttgatggtgttgagtctctcagagatcaatgttttggtgaggtcactgtaaatagtgtagctgtgctgcttagtttcggggaggctattgctaaaagcaagagatcacctgaaaaactgtttgttctgttagatatgtatgaaataatgagagagcttcagcctgagattgagttgctctttggaagcaaaccatgtgctgagatgaaagaatccgcgctgaatctgacaaagcggttagctcagacagctcaagaaacttttgctgattttgaagaagcggttgaaaaggatgctacgaaaaccgcggttatggatggaaccgttcatccacttactagctacgttataaattatgtcaagttcttgttcgattaccaaacgacgttgaggctactttttcaagagtttgatagtaaagatcctgatagcgagcttggagctgtaacaacgaggatcatgcacgctttacagaataatctggatggtaaatcgaagcagtacaaagatgtagcattaactcaacttttcctaatgaacaatgttcactatatagtgagatctgttaggaggtcagaagcaaaagatttattaggtgatgattgggttcaaatacatcgaagaattgtacaacaacatgcaaatcagtacaagagagtttcttgggcaaagattttgcagtgtctcacggttcagtcgagtgggagcggtccgatagaaaactcaaatatatcaagagcatcagtaaaagacagattcaagactttcaattctcagtttgaagagcttcaccaaagacaatgccaatggacagttccggacagcgagttgcgtgaatctcttagacttgctgttgcggaagttcttttacctgctttcagatcgtttcttaaacgttttgggccgatgatagagagtggtaagaacccccagaagtatataaggtttagtcctgaagatcttgagagaatgcttaacgagttctttgaaggcaagacatggagtgagccaaagagataa

SEQ ID NO: 78836 - protein, 640 aa, Arabidopsis thaliana
  peptide (1)..(640): Ceres Seq. ID no. 12645775
  misc_feature (79)..(467): Pfam Name: Exo70 exocyst complex subunit Pfam Description: Exo70 exocyst complex subunit
  misc_feature (1)..(467): Homolog of NCBI NO: 15242972 NR Description: putative protein; protein id: At5g52340.1 thaliana] >gi|10177400|dbj|BAB10531.1|
  misc_feature (516)..(640): Homolog of NCBI NO: 15242972 NR Description: putative protein; protein id: At5g52340.1 thaliana] >gi|10177400|dbj|BAB10531.1|
  misc_feature (1)..(640): Homolog of NCBI NO: 22326587 NR Description: putative protein; protein id: At5g03540.1, by cDNA: gi_18176063 [Arabidopsis thaliana]
  misc_feature (170)..(487): Homolog of NCBI NO: 15242974 NR Description: putative protein; protein id: At5g52350.1 thaliana] >gi|10177401|dbj|BAB10532.1|
  misc_feature (526)..(640): Homolog of NCBI NO: 15242974 NR Description: putative protein; protein id: At5g52350.1 thaliana] >gi|10177401|dbj|BAB10532.1|
  misc_feature (287)..(634): Homolog of NCBI NO: 30682979 NR Description: exocyst subunit EXO70 family [Arabidopsis >gi|9294634|dbj|BAB02973.1| gb|AAD25781.1~gene_id:MAG2.5~strong
  misc_feature (203)..(325): Homolog of NCBI NO: 30682979 NR Description: exocyst subunit EXO70 family [Arabidopsis >gi|9294634|dbj|BAB02973.1| gb|AAD25781.1~gene_id:MAG2.5~strong
  misc_feature (95)..(218): Homolog of NCBI NO: 30682979 NR Description: exocyst subunit EXO70 family [Arabidopsis >gi|9294634|dbj|BAB02973.1| gb|AAD25781.1~gene_id:MAG2.5~strong
  misc_feature (287)..(634): Homolog of NCBI NO: 23270388 NR Description: unknown protein [Arabidopsis thaliana]
  misc_feature (203)..(325): Homolog of NCBI NO: 23270388 NR Description: unknown protein [Arabidopsis thaliana]
MGVAQAMEALTERASLMKESLHKSQTITDNMVGILGSFDHRLSALETAMRPTQSLKVVEFEIYLLLKLKCDSGFGDKMIRTHSIRRAHENIDKALKAAEVILDQFDISRKAEAKILRGPHEDLESYLEAIDQLRGTIKFFSNNKMFKSASGVISHAHGLLSKALSKLEDEFRQILQNYSKPMEPDRLFECLPSNLRPSSEGEGGGGKTHDPHHKSLENAIFTVPTVIPPRVLPLLHDLAQQMVQAGHQQQLFKSYRDTRAAVLEQSLRKLGVERLSKDDVQRMQWEVKLLFAAEKKICDQILDGVESLRDQCFGEVTVNSVAVLLSFGEAIAKSKRSPEKLFVLLDMYEIMRELQPEIELLFGSKPCAEMKESALNLTKRLAQTAQETFADFEEAVEKDATKTAVMDGTVHPLTSYVINYVKFLFDYQTTLRLLFQEFDSKDPDSELGAVTTRIMHALQNNLDGKSKQYKDVALTQLFLMNNVHYIVRSVRRSEAKDLLGDDWVQIHRRIVQQHANQYKRVSWAKILQCLTVQSSGSGPIENSNISRASVKDRFKTFNSQFEELHQRQCQWTVPDSELRESLRLAVAEVLLPAFRSFLKRFGPMIESGKNPQKYIRFSPEDLERMLNEFFEGKTWSEPKR

SEQ ID NO: 78837 - protein, 634 aa, Arabidopsis thaliana
  peptide (1)..(634): Ceres Seq. ID no. 12645776
  misc_feature (73)..(461): Pfam Name: Exo70 exocyst complex subunit Pfam Description: Exo70 exocyst complex subunit
  misc_feature (1)..(461): Homolog of NCBI NO: 15242972 NR Description: putative protein; protein id: At5g52340.1 thaliana] >gi|10177400|dbj|BAB10531.1|
  misc_feature (510)..(634): Homolog of NCBI NO: 15242972 NR Description: putative protein; protein id: At5g52340.1 thaliana] >gi|10177400|dbj|BAB10531.1|
  misc_feature (1)..(634): Homolog of NCBI NO: 22326587 NR Description: putative protein; protein id: At5g03540.1, by cDNA: gi_18176063 [Arabidopsis thaliana]
  misc_feature (164)..(481): Homolog of NCBI NO: 15242974 NR Description: putative protein; protein id: At5g52350.1 thaliana] >gi|10177401|dbj|BAB10532.1|
  misc_feature (520)..(634): Homolog of NCBI NO: 15242974 NR Description: putative protein; protein id: At5g52350.1 thaliana] >gi|10177401|dbj|BAB10532.1|
  misc_feature (281)..(628): Homolog of NCBI NO: 30682979 NR Description: exocyst subunit EXO70 family [Arabidopsis >gi|9294634|dbj|BAB02973.1| gb|AAD25781.1~gene_id:MAG2.5~strong
  misc_feature (197)..(319): Homolog of NCBI NO: 30682979 NR Description: exocyst subunit EXO70 family [Arabidopsis >gi|9294634|dbj|BAB02973.1| gb|AAD25781.1~gene_id:MAG2.5~strong
  misc_feature (89)..(212): Homolog of NCBI NO: 30682979 NR Description: exocyst subunit EXO70 family [Arabidopsis >gi|9294634|dbj|BAB02973.1| gb|AAD25781.1~gene_id:MAG2.5~strong
  misc_feature (281)..(628): Homolog of NCBI NO: 23270388 NR Description: unknown protein [Arabidopsis thaliana]
  misc_feature (197)..(319): Homolog of NCBI NO: 23270388 NR Description: unknown protein [Arabidopsis thaliana]
MEALTERASLMKESLHKSQTITDNMVGILGSFDHRLSALETAMRPTQSLKVVEFEIYLLLKLKCDSGFGDKMIRTHSIRRAHENIDKALKAAEVILDQFDISRKAEAKILRGPHEDLESYLEAIDQLRGTIKFFSNNKMFKSASGVISHAHGLLSKALSKLEDEFRQILQNYSKPMEPDRLFECLPSNLRPSSEGEGGGGKTHDPHHKSLENAIFTVPTVIPPRVLPLLHDLAQQMVQAGHQQQLFKSYRDTRAAVLEQSLRKLGVERLSKDDVQRMQWEVKLLFAAEKKICDQILDGVESLRDQCFGEVTVNSVAVLLSFGEAIAKSKRSPEKLFVLLDMYEIMRELQPEIELLFGSKPCAEMKESALNLTKRLAQTAQETFADFEEAVEKDATKTAVMDGTVHPLTSYVINYVKFLFDYQTTLRLLFQEFDSKDPDSELGAVTTRIMHALQNNLDGKSKQYKDVALTQLFLMNNVHYIVRSVRRSEAKDLLGDDWVQIHRRIVQQHANQYKRVSWAKILQCLTVQSSGSGPIENSNISRASVKDRFKTFNSQFEELHQRQCQWTVPDSELRESLRLAVAEVLLPAFRSFLKRFGPMIESGKNPQKYIRFSPEDLERMLNEFFEGKTWSEPKR

SEQ ID NO: 78838 - protein, 624 aa, Arabidopsis thaliana
  peptide (1)..(624): Ceres Seq. ID no. 12645777
  misc_feature (63)..(451): Pfam Name: Exo70 exocyst complex subunit Pfam Description: Exo70 exocyst complex subunit
  misc_feature (1)..(451): Homolog of NCBI NO: 15242972 NR Description: putative protein; protein id: At5g52340.1 thaliana] >gi|10177400|dbj|BAB10531.1|
  misc_feature (500)..(624): Homolog of NCBI NO: 15242972 NR Description: putative protein; protein id: At5g52340.1 thaliana] >gi|10177400|dbj|BAB10531.1|
  misc_feature (1)..(624): Homolog of NCBI NO: 22326587 NR Description: putative protein; protein id: At5g03540.1, by cDNA: gi_18176063 [Arabidopsis thaliana]
  misc_feature (154)..(471): Homolog of NCBI NO: 15242974 NR Description: putative protein; protein id: At5g52350.1 thaliana] >gi|10177401|dbj|BAB10532.1|
  misc_feature (510)..(624): Homolog of NCBI NO: 15242974 NR Description: putative protein; protein id: At5g52350.1 thaliana] >gi|10177401|dbj|BAB10532.1|
  misc_feature (271)..(618): Homolog of NCBI NO: 30682979 NR Description: exocyst subunit EXO70 family [Arabidopsis >gi|9294634|dbj|BAB02973.1| gb|AAD25781.1~gene_id:MAG2.5~strong
  misc_feature (187)..(309): Homolog of NCBI NO: 30682979 NR Description: exocyst subunit EXO70 family [Arabidopsis >gi|9294634|dbj|BAB02973.1| gb|AAD25781.1~gene_id:MAG2.5~strong
  misc_feature (79)..(202): Homolog of NCBI NO: 30682979 NR Description: exocyst subunit EXO70 family [Arabidopsis >gi|9294634|dbj|BAB02973.1| gb|AAD25781.1~gene_id:MAG2.5~strong
  misc_feature (271)..(618): Homolog of NCBI NO: 23270388 NR Description: unknown protein [Arabidopsis thaliana]
  misc_feature (187)..(309): Homolog of NCBI NO: 23270388 NR Description: unknown protein [Arabidopsis thaliana]
MKESLHKSQTITDNMVGILGSFDHRLSALETAMRPTQSLKVVEFEIYLLLKLKCDSGFGDKMIRTHSIRRAHENIDKALKAAEVILDQFDISRKAEAKILRGPHEDLESYLEAIDQLRGTIKFFSNNKMFKSASGVISHAHGLLSKALSKLEDEFRQILQNYSKPMEPDRLFECLPSNLRPSSEGEGGGGKTHDPHHKSLENAIFTVPTVIPPRVLPLLHDLAQQMVQAGHQQQLFKSYRDTRAAVLEQSLRKLGVERLSKDDVQRMQWEVKLLFAAEKKICDQILDGVESLRDQCFGEVTVNSVAVLLSFGEAIAKSKRSPEKLFVLLDMYEIMRELQPEIELLFGSKPCAEMKESALNLTKRLAQTAQETFADFEEAVEKDATKTAVMDGTVHPLTSYVINYVKFLFDYQTTLRLLFQEFDSKDPDSELGAVTTRIMHALQNNLDGKSKQYKDVALTQLFLMNNVHYIVRSVRRSEAKDLLGDDWVQIHRRIVQQHANQYKRVSWAKILQCLTVQSSGSGPIENSNISRASVKDRFKTFNSQFEELHQRQCQWTVPDSELRESLRLAVAEVLLPAFRSFLKRFGPMIESGKNPQKYIRFSPEDLERMLNEFFEGKTWSEPKR

SEQ ID NO: 78839 - DNA, 1224 bp, Arabidopsis thaliana
  misc_feature (1)..(1224): Ceres Seq. ID no. 12646268
  misc_feature: MA Experiment ID: 20000348 Result: Up-regulated in Transcription
  misc_feature: MA Experiment 20000348 PARAMETER Experiment Name: At_100uM_ABA_Sub_P Parameter: Age (day) Value: 14
  misc_feature: MA Experiment 20000348 PARAMETER Experiment Name: At_100uM_ABA_Sub_P Parameter: Organism Value: A. thaliana
  misc_feature: MA Experiment 20000348 PARAMETER Experiment Name: At_100uM_ABA_Sub_P Parameter: Plant Line Value: WS
  misc_feature: MA Experiment 20000348 PARAMETER Experiment Name: At_100uM_ABA_Sub_P Parameter: Timepoint (hr) Value: 1
  misc_feature: MA Experiment 20000348 PARAMETER Experiment Name: At_100uM_ABA_Sub_P Parameter: Tissue Value: Aerial
  misc_feature: MA Experiment 20000348 PARAMETER Experiment Name: At_100uM_ABA_Sub_P Parameter: Treatment Value: 100uM ABA vs. No Treatment
  misc_feature: MA Experiment ID: 20000349 Result: Up-regulated in Transcription
  misc_feature: MA Experiment 20000349 PARAMETER Experiment Name: At_100uM_ABA_Sub_P Parameter: Age (day) Value: 14
  misc_feature: MA Experiment 20000349 PARAMETER Experiment Name: At_100uM_ABA_Sub_P Parameter: Organism Value: A. thaliana
  misc_feature: MA Experiment 20000349 PARAMETER Experiment Name: At_100uM_ABA_Sub_P Parameter: Plant Line Value: WS
  misc_feature: MA Experiment 20000349 PARAMETER Experiment Name: At_100uM_ABA_Sub_P Parameter: Timepoint (hr) Value: 6
  misc_feature: MA Experiment 20000349 PARAMETER Experiment Name: At_100uM_ABA_Sub_P Parameter: Tissue Value: Aerial
  misc_feature: MA Experiment 20000349 PARAMETER Experiment Name: At_100uM_ABA_Sub_P Parameter: Treatment Value: 100uM ABA vs. No Treatment
  misc_feature: MA Experiment ID: 20000352 Result: Up-regulated in Transcription
  misc_feature: MA Experiment 20000352 PARAMETER Experiment Name: At_Drought_Sub_P Parameter: Age (day) Value: 7
  misc_feature: MA Experiment 20000352 PARAMETER Experiment Name: At_Drought_Sub_P Parameter: Organism Value: A. thaliana
  misc_feature: MA Experiment 20000352 PARAMETER Experiment Name: At_Drought_Sub_P Parameter: Plant Line Value: WS
  misc_feature: MA Experiment 20000352 PARAMETER Experiment Name: At_Drought_Sub_P Parameter: Timepoint (hr) Value: 6
  misc_feature: MA Experiment 20000352 PARAMETER Experiment Name: At_Drought_Sub_P Parameter: Tissue Value: Whole Plant
  misc_feature: MA Experiment 20000352 PARAMETER Experiment Name: At_Drought_Sub_P Parameter: Treatment Value: Drought vs. No Drought
  misc_feature: MA Experiment ID: 20000355 Result: Up-regulated in Transcription
  misc_feature: MA Experiment 20000355 PARAMETER Experiment Name: At_Siliques_Sub_P Parameter: Age (day) Value: 21
  misc_feature: MA Experiment 20000355 PARAMETER Experiment Name: At_Siliques_Sub_P Parameter: Organism Value: A. thaliana
  misc_feature: MA Experiment 20000355 PARAMETER Experiment Name: At_Siliques_Sub_P Parameter: Plant Line Value: WS
  misc_feature: MA Experiment 20000355 PARAMETER Experiment Name: At_Siliques_Sub_P Parameter: Tissue Value: Less Than 5mm Siliques vs. Whole Plant
  misc_feature: MA Experiment ID: 20000440 Result: Up-regulated in Transcription
  misc_feature: MA Experiment 20000440 PARAMETER Experiment Name: At_Closed-Flower__Sub_P Parameter: Tissue Value: Closed Flower vs. Whole Plant
atgctgaatttaggcagagctagaaccgggaggcaaaacagatctatgtcttttgaaggattggattttgcagacccaaagaagaacaacaattacatggggaagattgttttggtcatgacacttacagcaatgtgcattctcttgctcaaccaatccccaaccttcaataccccaagcgtgttttctcgaagtgaaccaggagttacacatgttctagtcactggtggtgcagggtatatcgggtcacatgcagctttacgccttctaaaagattcataccgtgtcaccattgtggacaatctatctcgagggaacctcggtgcagtcaagatcttgcaacaactgtttccggaacctggaaagcttcaattcatttatgctgatcttggagatgcaaatgctgttaacaaaatattttctgaaaacgcatttgacgctgtgatgcattttgctgctgttgcttattattatcacaatatcacatcgaacacattggtagttttagagacaatggctgctcatggtgtgaagactttgatatattcaagcacatgtgctacttatggagagcctgagaaaatgccaataacagaggaaactccacaggttccaatcaatccatatggaaaggctaaaaagatggcagaagatatcatcttggatttctccaagaattctattatggcagttatgatcctaagatatttcaatgtgattgggtctgatcctgagggtagactaggtgaagctccaagacctgaactcagtgagcatggacggatctctggtgcttgctttgatgctgcacgaggcatcattcccgggctgcagattaaaggaacagactacaagactgttgatgggacttgtgtacgtgattacattgatgtcaccgacttggttgatgctcatgttaaagctcttgaaaaggcgaaaccccgcaaagttggtatcttcaatgttggtaccgggaaaggtagctcggtgaaggagtttgtggaagcgtgcaaaaaggcgaccggcgttgatataaaagtcgattacttggaaagacgggcaggagattacgcagaggtttacagcgatccaagaaaaatcaaagaagagctgaattggacagctaagcacaccaatcttcaagaaagtttaaagatggcatggagatggcaaaagcttcatcgcagtggctatggatcttcttccttggtttctgcatactga

SEQ ID NO: 78840 - protein, 407 aa, Arabidopsis thaliana
  peptide (1)..(407): Ceres Seq. ID no. 12646269
  misc_feature (72)..(395): Pfam Name: NAD dependent epimerase/dehydratase family Pfam Description: NAD dependent epimerase/dehydratase family
  misc_feature (33)..(407): Homolog of NCBI NO: 7437275 NR Description: probable UDPglucose 4-epimerase (EC 5.1.3.2)
  misc_feature (1)..(407): Homolog of NCBI NO: 22329866 NR Description: UDP-galactose 4-epimerase-like protein; protein At1g30620.1, supported by cDNA: gi_13272474, supported by cDNA: [Arabidopsis thaliana] >gi|25292360|pir||E86431 T5I8.7 Strong
  misc_feature (1)..(407): Homolog of NCBI NO: 24417398 NR Description: unknown [Arabidopsis thaliana]
  misc_feature (33)..(401): Homolog of NCBI NO: 15237098 NR Description: UDP-glucose 4-epimerase - like protein; protein
  misc_feature (1)..(399): Homolog of NCBI NO: 25553524 NR Description: UDP-galactose 4-epimerase-like protein [Oryza
  misc_feature (21)..(399): Homolog of NCBI NO: 27260937 NR Description: OJ1417_E01.21 [Oryza sativa (japonica
  misc_feature (13)..(400): Homolog of NCBI NO: 15241503 NR Description: putative protein; protein id: At5g44480.1
  misc_feature (20)..(401): Homolog of NCBI NO: 27529690 NR Description: UDP-galactose 4-epimerase-like protein [Oryza
  misc_feature (21)..(401): Homolog of NCBI NO: 26106016 NR Description: UDP-galactose 4-epimerase-like protein [Oryza
  misc_feature (172)..(407): Homolog of NCBI NO: 30686224 NR Description: NAD-dependent epimerase/dehydratase family thaliana] >gi|17979272|gb|AAL49952.1| At2g34850/F19I3.8 thaliana] >gi|20147163|gb|AAM10298.1| At2g34850/F19I3.8
MLNLGRARTGRQNRSMSFEGLDFADPKKNNNYMGKIVLVMTLTAMCILLLNQSPTFNTPSVFSRSEPGVTHVLVTGGAGYIGSHAALRLLKDSYRVTIVDNLSRGNLGAVKILQQLFPEPGKLQFIYADLGDANAVNKIFSENAFDAVMHFAAVAYYYHNITSNTLVVLETMAAHGVKTLIYSSTCATYGEPEKMPITEETPQVPINPYGKAKKMAEDIILDFSKNSIMAVMILRYFNVIGSDPEGRLGEAPRPELSEHGRISGACFDAARGIIPGLQIKGTDYKTVDGTCVRDYIDVTDLVDAHVKALEKAKPRKVGIFNVGTGKGSSVKEFVEACKKATGVDIKVDYLERRAGDYAEVYSDPRKIKEELNWTAKHTNLQESLKMAWRWQKLHRSGYGSSSLVSAY

SEQ ID NO: 78841 - protein, 392 aa, Arabidopsis thaliana
  peptide (1)..(392): Ceres Seq. ID no. 12646270
  misc_feature (57)..(380): Pfam Name: NAD dependent epimerase/dehydratase family Pfam Description: NAD dependent epimerase/dehydratase family
  misc_feature (18)..(392): Homolog of NCBI NO: 7437275 NR Description: probable UDPglucose 4-epimerase (EC 5.1.3.2)
  misc_feature (1)..(392): Homolog of NCBI NO: 22329866 NR Description: UDP-galactose 4-epimerase-like protein; protein At1g30620.1, supported by cDNA: gi_13272474, supported by cDNA: [Arabidopsis thaliana] >gi|25292360|pir||E86431 T5I8.7 Strong
  misc_feature (1)..(392): Homolog of NCBI NO: 24417398 NR Description: unknown [Arabidopsis thaliana]
  misc_feature (18)..(386): Homolog of NCBI NO: 15237098 NR Description: UDP-glucose 4-epimerase - like protein; protein
  misc_feature (1)..(384): Homolog of NCBI NO: 25553524 NR Description: UDP-galactose 4-epimerase-like protein [Oryza
  misc_feature (6)..(384): Homolog of NCBI NO: 27260937 NR Description: OJ1417_E01.21 [Oryza sativa (japonica
  misc_feature (1)..(385): Homolog of NCBI NO: 15241503 NR Description: putative protein; protein id: At5g44480.1
  misc_feature (5)..(386): Homolog of NCBI NO: 27529690 NR Description: UDP-galactose 4-epimerase-like protein [Oryza
  misc_feature (6)..(386): Homolog of NCBI NO: 26106016 NR Description: UDP-galactose 4-epimerase-like protein [Oryza
  misc_feature (157)..(392): Homolog of NCBI NO: 30686224 NR Description: NAD-dependent epimerase/dehydratase family thaliana] >gi|17979272|gb|AAL49952.1| At2g34850/F19I3.8 thaliana] >gi|20147163|gb|AAM10298.1| At2g34850/F19I3.8
MSFEGLDFADPKKNNNYMGKIVLVMTLTAMCILLLNQSPTFNTPSVFSRSEPGVTHVLVTGGAGYIGSHAALRLLKDSYRVTIVDNLSRGNLGAVKILQQLFPEPGKLQFIYADLGDANAVNKIFSENAFDAVMHFAAVAYYYHNITSNTLVVLETMAAHGVKTLIYSSTCATYGEPEKMPITEETPQVPINPYGKAKKMAEDIILDFSKNSIMAVMILRYFNVIGSDPEGRLGEAPRPELSEHGRISGACFDAARGIIPGLQIKGTDYKTVDGTCVRDYIDVTDLVDAHVKALEKAKPRKVGIFNVGTGKGSSVKEFVEACKKATGVDIKVDYLERRAGDYAEVYSDPRKIKEELNWTAKHTNLQESLKMAWRWQKLHRSGYGSSSLVSAY

SEQ ID NO: 78842 - protein, 375 aa, Arabidopsis thaliana
  peptide (1)..(375): Ceres Seq. ID no. 12646271
  misc_feature (40)..(363): Pfam Name: NAD dependent epimerase/dehydratase family Pfam Description: NAD dependent epimerase/dehydratase family
  misc_feature (1)..(375): Homolog of NCBI NO: 7437275 NR Description: probable UDPglucose 4-epimerase (EC 5.1.3.2)
  misc_feature (1)..(375): Homolog of NCBI NO: 22329866 NR Description: UDP-galactose 4-epimerase-like protein; protein At1g30620.1, supported by cDNA: gi_13272474, supported by cDNA: [Arabidopsis thaliana] >gi|25292360|pir||E86431 T5I8.7 Strong
  misc_feature (1)..(375): Homolog of NCBI NO: 24417398 NR Description: unknown [Arabidopsis thaliana]
  misc_feature (1)..(369): Homolog of NCBI NO: 15237098 NR Description: UDP-glucose 4-epimerase - like protein; protein
  misc_feature (1)..(367): Homolog of NCBI NO: 25553524 NR Description: UDP-galactose 4-epimerase-like protein [Oryza
  misc_feature (1)..(367): Homolog of NCBI NO: 27260937 NR Description: OJ1417_E01.21 [Oryza sativa (japonica
  misc_feature (1)..(368): Homolog of NCBI NO: 15241503 NR Description: putative protein; protein id: At5g44480.1
  misc_feature (1)..(369): Homolog of NCBI NO: 27529690 NR Description: UDP-galactose 4-epimerase-like protein [Oryza
  misc_feature (1)..(369): Homolog of NCBI NO: 26106016 NR Description: UDP-galactose 4-epimerase-like protein [Oryza
  misc_feature (140)..(375): Homolog of NCBI NO: 30686224 NR Description: NAD-dependent epimerase/dehydratase family thaliana] >gi|17979272|gb|AAL49952.1| At2g34850/F19I3.8 thaliana] >gi|20147163|gb|AAM10298.1| At2g34850/F19I3.8
MGKIVLVMTLTAMCILLLNQSPTFNTPSVFSRSEPGVTHVLVTGGAGYIGSHAALRLLKDSYRVTIVDNLSRGNLGAVKILQQLFPEPGKLQFIYADLGDANAVNKIFSENAFDAVMHFAAVAYYYHNITSNTLVVLETMAAHGVKTLIYSSTCATYGEPEKMPITEETPQVPINPYGKAKKMAEDIILDFSKNSIMAVMILRYFNVIGSDPEGRLGEAPRPELSEHGRISGACFDAARGIIPGLQIKGTDYKTVDGTCVRDYIDVTDLVDAHVKALEKAKPRKVGIFNVGTGKGSSVKEFVEACKKATGVDIKVDYLERRAGDYAEVYSDPRKIKEELNWTAKHTNLQESLKMAWRWQKLHRSGYGSSSLVSAY

SEQ ID NO: 78843 - DNA, 1329 bp, Arabidopsis thaliana
  misc_feature (1)..(1329): Ceres Seq. ID no. 12646291
  misc_feature: MA Experiment ID: 108434 Result: Up-regulated in Transcription
  misc_feature: MA Experiment 108434 PARAMETER Experiment Name: At_Root_Tips_cDNA_P Parameter: Tissue Value: Root Tips
  misc_feature: MA Experiment ID: 108435 Result: Up-regulated in Transcription
  misc_feature: MA Experiment 108435 PARAMETER Experiment Name: At_stm_Mutants_cDNA_P Parameter: Plant Line Value: wt Landsburg vs stm
  misc_feature: MA Experiment 108435 PARAMETER Experiment Name: At_stm_Mutants_cDNA_P Parameter: Tissue Value: Shoot Apical Meristem Region
  misc_feature: MA Experiment ID: 108461 Result: Down-regulated in Transcription
  misc_feature: MA Experiment 108461 PARAMETER Experiment Name: At_Germinating_Seeds_cDNA_P Parameter: Age (day) Value: 1 vs. 0
  misc_feature: MA Experiment 108461 PARAMETER Experiment Name: At_Germinating_Seeds_cDNA_P Parameter: Tissue Value: Germinating Seeds
  misc_feature: MA Experiment ID: 108462 Result: Down-regulated in Transcription
  misc_feature: MA Experiment 108462 PARAMETER Experiment Name: At_Germinating_Seeds_cDNA_P Parameter: Age (day) Value: 2 vs. 0
  misc_feature: MA Experiment 108462 PARAMETER Experiment Name: At_Germinating_Seeds_cDNA_P Parameter: Tissue Value: Germinating Seeds
  misc_feature: MA Experiment ID: 108463 Result: Down-regulated in Transcription
  misc_feature: MA Experiment 108463 PARAMETER Experiment Name: At_Germinating_Seeds_cDNA_P Parameter: Age (day) Value: 3 vs. 0
  misc_feature: MA Experiment 108463 PARAMETER Experiment Name: At_Germinating_Seeds_cDNA_P Parameter: Tissue Value: Germinating Seeds
  misc_feature: MA Experiment ID: 108464 Result: Down-regulated in Transcription
  misc_feature: MA Experiment 108464 PARAMETER Experiment Name: At_Germinating_Seeds_cDNA_P Parameter: Age (day) Value: 4 vs. 0
  misc_feature: MA Experiment 108464 PARAMETER Experiment Name: At_Germinating_Seeds_cDNA_P Parameter: Tissue Value: Germinating Seeds
  misc_feature: MA Experiment ID: 108572 Result: Down-regulated in Transcription
  misc_feature: MA Experiment 108572 PARAMETER Experiment Name: At_Drought_cDNA_P Parameter: Timepoint (hr) Value: 1
  misc_feature: MA Experiment 108572 PARAMETER Experiment Name: At_Drought_cDNA_P Parameter: Tissue Value: Aerial
  misc_feature: MA Experiment 108572 PARAMETER Experiment Name: At_Drought_cDNA_P Parameter: Treatment Value: Drought vs. No Drought
  misc_feature: MA Experiment ID: 108573 Result: Down-regulated in Transcription
  misc_feature: MA Experiment 108573 PARAMETER Experiment Name: At_Drought_cDNA_P Parameter: Timepoint (hr) Value: 6
  misc_feature: MA Experiment 108573 PARAMETER Experiment Name: At_Drought_cDNA_P Parameter: Tissue Value: Aerial
  misc_feature: MA Experiment 108573 PARAMETER Experiment Name: At_Drought_cDNA_P Parameter: Treatment Value: Drought vs. No Drought
  misc_feature: MA Experiment ID: 108579 Result: Up-regulated in Transcription
  misc_feature: MA Experiment 108579 PARAMETER Experiment Name: At_4deg_Cold_cDNA_P Parameter: Temperature (deg C) Value: 4 vs. 22
  misc_feature: MA Experiment 108579 PARAMETER Experiment Name: At_4deg_Cold_cDNA_P Parameter: Timepoint (hr) Value: 6
  misc_feature: MA Experiment 108579 PARAMETER Experiment Name: At_4deg_Cold_cDNA_P Parameter: Tissue Value: Aerial
  misc_feature: MA Experiment ID: 20000089 Result: Up-regulated in Transcription
  misc_feature: MA Experiment ID: 20000090 Result: Up-regulated in Transcription
  misc_feature: MA Experiment ID: 20000224 Result: Up-regulated in Transcription
atggaaggcgaagagaagaatgattatagaaacgaggaagaagatttcaatacaccacaacaactacaaaagaagcaaaggaaagggaaaaaaatagcaacggaaacagaggatgaaaacgaagaagacaagagagttactctcaaagtcacgcaagtcgccgagagacccgatagaatctctccgatcgtcgcctatttctctacaggatacgatccttgtaaagtagatccaaaaacaggcaagagagttcatgaaactcccaaggttactgtttacaagcataaggatgattctaagaagaggattcaggttgttgtaagtcctccaggcgcaagagttgagttcgtcggaactaattacacaggcgagcaagctgctatgcagacgaatacttatagagttggtgtttttaatagagaggctaaaactttgaggattcttcctgttgctcacaataagataatcagattggagcctagagttaaagctcaagaaacaaatgaggaagaagcttcaggaagtgctgtcgtcaaagaacttgaagaactaaaaacaggagaacgcgatcgttataatacaaaaaaagctgttactcgggataagaagaagcgtgccttatatatgggagatgatgctgcgactcagaaggtccttgatgggaaactaagtgagttaggtgttaacacagctgctcttgaaggcaccagttctactgttgcacgcaacattcctccttacaataccgctgcaacgactgcaaatgaagcttatcccttagaaaagatcattgaaaagggggattggagttttcttgaagatatttactggcttctgcaacaggaaactgaagcagcaactgaggcttaccctgtatttgtccgcaacagattgtacagattgcgagatatcaaggacgatatgaaaaagcagacggtttgtggtgctgcaacgcttctcacccatctggttaagttcaaggacagaaactcaatgaatggttacgattccgctaaagaccacaagatgccagacatcttccgtcaaaaattcaacagcatgttcaaggattctgaatcagataggatacctgttgacaagatcaaccttctgataagctacgttcttgtgctatcccttcacgtggataatttcatgaccgatccagaagacatagcaaaagatctgaggataagcacagttgagctgaggaaacattttctacagcttggctgcaaattcctgaagcagaattctactacggttgctaccttaccgacccctctcaatttcccggaggttaaccggaggcgcagggcacgaaagtga

SEQ ID NO: 78844 - protein, 442 aa, Arabidopsis thaliana; identical to SEQ ID NO: 77499
  peptide (1)..(442): Ceres Seq. ID no. 12646292
  misc_feature (1)..(442): Homolog of NCBI NO: 15231416 NR Description: unknown protein; protein id: At3g13940.1, by cDNA: gi_13430583 [Arabidopsis thaliana] gene_id:MDC16.6~similar to unknown protein~sp|O14086 [Arabidopsis
  misc_feature (28)..(440): Homolog of NCBI NO: 19115294 NR Description: probable DNA-directed RNA polymerase I 49 kd

SEQ ID NO: 78845 - protein, 315 aa, Arabidopsis thaliana; identical to SEQ ID NO: 77500
  peptide (1)..(315): Ceres Seq. ID no. 12646293
  misc_feature (1)..(315): Homolog of NCBI NO: 15231416 NR Description: unknown protein; protein id: At3g13940.1, by cDNA: gi_13430583 [Arabidopsis thaliana] gene_id:MDC16.6~similar to unknown protein~sp|O14086 [Arabidopsis
  misc_feature (1)..(313): Homolog of NCBI NO: 19115294 NR Description: probable DNA-directed RNA polymerase I 49 kd

SEQ ID NO: 78846 - protein, 234 aa, Arabidopsis thaliana; identical to SEQ ID NO: 77501
  peptide (1)..(234): Ceres Seq. ID no. 12646294
  misc_feature (1)..(234): Homolog of NCBI NO: 15231416 NR Description: unknown protein; protein id: At3g13940.1, by cDNA: gi_13430583 [Arabidopsis thaliana] gene_id:MDC16.6~similar to unknown protein~sp|O14086 [Arabidopsis
  misc_feature (1)..(232): Homolog of NCBI NO: 19115294 NR Description: probable DNA-directed RNA polymerase I 49 kd

SEQ ID NO: 78847 - DNA, 1092 bp, Arabidopsis thaliana
  misc_feature (1)..(1092): Ceres Seq. ID no. 12646330
  misc_feature: MA Experiment ID: 108577 Result: Down-regulated in Transcription
  misc_feature: MA Experiment 108577 PARAMETER Experiment Name: At_42deg_Heat_cDNA_P Parameter: Temperature (deg C) Value: 42 vs. 22
  misc_feature: MA Experiment 108577 PARAMETER Experiment Name: At_42deg_Heat_cDNA_P Parameter: Timepoint (hr) Value: 6
  misc_feature: MA Experiment 108577 PARAMETER Experiment Name: At_42deg_Heat_cDNA_P Parameter: Tissue Value: Aerial
  misc_feature: MA Experiment ID: 20000069 Result: Up-regulated in Transcription
  misc_feature: MA Experiment 20000069 PARAMETER Experiment Name: At_100uM_ABA_Mutants_cDNA_P Parameter: Plant Line Value: CS23
  misc_feature: MA Experiment 20000069 PARAMETER Experiment Name: At_100uM_ABA_Mutants_cDNA_P Parameter: Timepoint (hr) Value: 6
  misc_feature: MA Experiment 20000069 PARAMETER Experiment Name: At_100uM_ABA_Mutants_cDNA_P Parameter: Tissue Value: Aerial
  misc_feature: MA Experiment 20000069 PARAMETER Experiment Name: At_100uM_ABA_Mutants_cDNA_P Parameter: Treatment Value: 100uM ABA vs. No Treatment
  misc_feature: MA Experiment ID: 20000070 Result: Up-regulated in Transcription
  misc_feature: MA Experiment 20000070 PARAMETER Experiment Name: At_100uM_ABA_Mutants_cDNA_P Parameter: Plant Line Value: CS24
  misc_feature: MA Experiment 20000070 PARAMETER Experiment Name: At_100uM_ABA_Mutants_cDNA_P Parameter: Timepoint (hr) Value: 6
  misc_feature: MA Experiment 20000070 PARAMETER Experiment Name: At_100uM_ABA_Mutants_cDNA_P Parameter: Tissue Value: Aerial
  misc_feature: MA Experiment 20000070 PARAMETER Experiment Name: At_100uM_ABA_Mutants_cDNA_P Parameter: Treatment Value: 100uM ABA vs. No Treatment
  misc_feature: MA Experiment ID: 20000071 Result: Up-regulated in Transcription
  misc_feature: MA Experiment 20000071 PARAMETER Experiment Name: At_100uM_ABA_Mutants_cDNA_P Parameter: Plant Line Value: CS8104
  misc_feature: MA Experiment 20000071 PARAMETER Experiment Name: At_100uM_ABA_Mutants_cDNA_P Parameter: Timepoint (hr) Value: 6
  misc_feature: MA Experiment 20000071 PARAMETER Experiment Name: At_100uM_ABA_Mutants_cDNA_P Parameter: Tissue Value: Aerial
  misc_feature: MA Experiment 20000071 PARAMETER Experiment Name: At_100uM_ABA_Mutants_cDNA_P Parameter: Treatment Value: 100uM ABA vs. No Treatment
  misc_feature: MA Experiment ID: 20000089 Result: Up-regulated in Transcription
  misc_feature: MA Experiment ID: 20000111 Result: Down-regulated in Transcription
  misc_feature: MA Experiment 20000111 PARAMETER Experiment Name: At_42deg_Heat_cDNA_P Parameter: Temperature (deg C) Value: 42 vs. 22
  misc_feature: MA Experiment 20000111 PARAMETER Experiment Name: At_42deg_Heat_cDNA_P Parameter: Timepoint (hr) Value: 6
  misc_feature: MA Experiment 20000111 PARAMETER Experiment Name: At_42deg_Heat_cDNA_P Parameter: Tissue Value: Aerial
  misc_feature: MA Experiment ID: 20000113 Result: Down-regulated in Transcription
  misc_feature: MA Experiment 20000113 PARAMETER Experiment Name: At_42deg_Heat_cDNA_P Parameter: Temperature (deg C) Value: 42 vs. 22
  misc_feature: MA Experiment 20000113 PARAMETER Experiment Name: At_42deg_Heat_cDNA_P Parameter: Timepoint (hr) Value: 8
  misc_feature: MA Experiment 20000113 PARAMETER Experiment Name: At_42deg_Heat_cDNA_P Parameter: Tissue Value: Aerial
  misc_feature: MA Experiment ID: 20000117 Result: Up-regulated in Transcription
  misc_feature: MA Experiment 20000117 PARAMETER Experiment Name: At_100uM_ABA_Mutants_cDNA_P Parameter: Plant Line Value: Columbia
  misc_feature: MA Experiment 20000117 PARAMETER Experiment Name: At_100uM_ABA_Mutants_cDNA_P Parameter: Timepoint (hr) Value: 6
  misc_feature: MA Experiment 20000117 PARAMETER Experiment Name: At_100uM_ABA_Mutants_cDNA_P Parameter: Tissue Value: Aerial
  misc_feature: MA Experiment 20000117 PARAMETER Experiment Name: At_100uM_ABA_Mutants_cDNA_P Parameter: Treatment Value: 100uM ABA vs. No Treatment
atggatcaaatcgttaacgtggatgagtttcaagagctggccaaacaggccctccctaagatgtactatgatttctacaatggaggagcagaggatcaacacactctcaatgaaaatgtccaagctttccgtagaatcatgtttaggcctagggttcttgttgatgtgagcaacatagatatgtctacaagtatgttgggttacccaatctcagctcccatcatgattgctccaacagcaatgcataagttggctcatcctaaaggagaaatcgccacagcgaaagctgcagctgcgtgtaacactatcatgatagtatcattcatgtctacttgcactattgaggaggttgcttccagttgtaacgctgttcggtttcttcaaatatatgtgtacaagagacgtgatgtaacagctcagattgtgaaaagagctgaaaaagctggattcaaggctatagttctaactgttgatgttcccagacttggtagaagggaagcagatataaagaacaaaatgatatccccacagctgaagaattttgaaggcttagtttcaaccgaagtccgacctaatgaaggttcaggggttgaagcctttgcctctagtgcatttgatgcttcgttaagctggaaggatatcgaatggttaagatctattacaaagttgccaattctggtcaaagggttactcacacgtgaagacgctcttaaggctgttgaagccggtgtagatggaatagtggtatccaaccacggggctcgccagctcgactattccccggctacgataactgttttagaagaggttgttcatgctgtgaaaggtaggattccggttttgcttgatggaggagtaagacgaggaacagatgttttcaaagcgctggcgctcggagcacaagctgttcttatagggaggcctatagtctatgggcttgcagctaagggtgaagatggagtgaaaaaagtgattgatatgctgaaaaatgagtttgagattactatggccctttctggctgtccaaccattgatgacgtaaccagaaaccatgttaggacagagaatgagagaattaaatctatgctctga

SEQ ID NO: 78848 - protein, 363 aa, Arabidopsis thaliana; identical to SEQ ID NO: 41959
  peptide (1)..(363): Ceres Seq. ID no. 12646331
  misc_feature (14)..(354): Pfam Name: FMN-dependent dehydrogenase Pfam Description: FMN-dependent dehydrogenase
  misc_feature (1)..(363): Homolog of NCBI NO: 15231789 NR Description: glycolate oxidase, putative; protein id: supported by cDNA: 125291. [Arabidopsis thaliana] glycolate oxidase [Arabidopsis thaliana]
  misc_feature (1)..(363): Homolog of NCBI NO: 21537253 NR Description: glycolate oxidase, putative [Arabidopsis thaliana]
  misc_feature (1)..(363): Homolog of NCBI NO: 15231792 NR Description: glycolate oxidase, putative; protein id:
  misc_feature (1)..(363): Homolog of NCBI NO: 9294640 NR Description: glycolate oxidase [Arabidopsis thaliana]
  misc_feature (1)..(363): Homolog of NCBI NO: 21618144 NR Description: glycolate oxidase, putative [Arabidopsis thaliana]
  misc_feature (5)..(363): Homolog of NCBI NO: 33146942 NR Description: putative (S)-2-hydroxy-acid oxidase [Oryza sativa
  misc_feature (3)..(355): Homolog of NCBI NO: 15231850 NR Description: glycolate oxidase, putative; protein id: supported by cDNA: gi_15450740, supported by cDNA: gi_16226422, by cDNA: gi_16226771, supported by cDNA: gi_16604393, supported
  misc_feature (3)..(355): Homolog of NCBI NO: 999542 NR Description: Chain A, Glycolate Oxidase (E.C.1.1.3.15) Mutant Tyr 24 Replaced By Phe (Y24f) >gi|999543|pdb|1GYL|B Chain B,
  misc_feature (3)..(355): Homolog of NCBI NO: 16226772 NR Description: AT3g14420/MOA2_2 [Arabidopsis thaliana]
  misc_feature (1)..(362): Homolog of NCBI NO: 34395056 NR Description: putative glycolate oxidase [Oryza sativa

SEQ ID NO: 78849 - protein, 343 aa, Arabidopsis thaliana; identical to SEQ ID NO: 41960
  peptide (1)..(343): Ceres Seq. ID no. 12646332
  misc_feature (1)..(334): Pfam Name: FMN-dependent dehydrogenase Pfam Description: FMN-dependent dehydrogenase
  misc_feature (1)..(343): Homolog of NCBI NO: 15231789 NR Description: glycolate oxidase, putative; protein id: supported by cDNA: 125291. [Arabidopsis thaliana] glycolate oxidase [Arabidopsis thaliana]
  misc_feature (1)..(343): Homolog of NCBI NO: 21537253 NR Description: glycolate oxidase, putative [Arabidopsis thaliana]
  misc_feature (1)..(343): Homolog of NCBI NO: 15231792 NR Description: glycolate oxidase, putative; protein id:
  misc_feature (1)..(343): Homolog of NCBI NO: 9294640 NR Description: glycolate oxidase [Arabidopsis thaliana]
  misc_feature (1)..(343): Homolog of NCBI NO: 21618144 NR Description: glycolate oxidase, putative [Arabidopsis thaliana]
  misc_feature (1)..(343): Homolog of NCBI NO: 33146942 NR Description: putative (S)-2-hydroxy-acid oxidase [Oryza sativa
  misc_feature (1)..(335): Homolog of NCBI NO: 15231850 NR Description: glycolate oxidase, putative; protein id: supported by cDNA: gi_15450740, supported by cDNA: gi_16226422, by cDNA: gi_16226771, supported by cDNA: gi_16604393, supported
  misc_feature (1)..(335): Homolog of NCBI NO: 999542 NR Description: Chain A, Glycolate Oxidase (E.C.1.1.3.15) Mutant Tyr 24 Replaced By Phe (Y24f) >gi|999543|pdb|1GYL|B Chain B,
  misc_feature (1)..(335): Homolog of NCBI NO: 16226772 NR Description: AT3g14420/MOA2_2 [Arabidopsis thaliana]
  misc_feature (1)..(342): Homolog of NCBI NO: 34395056 NR Description: putative glycolate oxidase [Oryza sativa

SEQ ID NO: 78850 - protein, 317 aa, Arabidopsis thaliana; identical to SEQ ID NO: 41961
  peptide (1)..(317): Ceres Seq. ID no. 12646333
  misc_feature (1)..(308): Pfam Name: FMN-dependent dehydrogenase Pfam Description: FMN-dependent dehydrogenase
  misc_feature (1)..(317): Homolog of NCBI NO: 15231789 NR Description: glycolate oxidase, putative; protein id: supported by cDNA: 125291. [Arabidopsis thaliana] glycolate oxidase [Arabidopsis thaliana]
  misc_feature (1)..(317): Homolog of NCBI NO: 21537253 NR Description: glycolate oxidase, putative [Arabidopsis thaliana]
  misc_feature (1)..(317): Homolog of NCBI NO: 15231792 NR Description: glycolate oxidase, putative; protein id:
  misc_feature (1)..(317): Homolog of NCBI NO: 9294640 NR Description: glycolate oxidase [Arabidopsis thaliana]
  misc_feature (1)..(317): Homolog of NCBI NO: 21618144 NR Description: glycolate oxidase, putative [Arabidopsis thaliana]
  misc_feature (1)..(317): Homolog of NCBI NO: 33146942 NR Description: putative (S)-2-hydroxy-acid oxidase [Oryza sativa
  misc_feature (1)..(309): Homolog of NCBI NO: 15231850 NR Description: glycolate oxidase, putative; protein id: supported by cDNA: gi_15450740, supported by cDNA: gi_16226422, by cDNA: gi_16226771, supported by cDNA: gi_16604393, supported
  misc_feature (1)..(309): Homolog of NCBI NO: 999542 NR Description: Chain A, Glycolate Oxidase (E.C.1.1.3.15) Mutant Tyr 24 Replaced By Phe (Y24f) >gi|999543|pdb|1GYL|B Chain B,
  misc_feature (1)..(309): Homolog of NCBI NO: 16226772 NR Description: AT3g14420/MOA2_2 [Arabidopsis thaliana]
  misc_feature (1)..(316): Homolog of NCBI NO: 34395056 NR Description: putative glycolate oxidase [Oryza sativa

SEQ ID NO: 78851 - DNA, 1152 bp, Arabidopsis thaliana
  misc_feature (1)..(1152): Ceres Seq. ID no. 12646348
  misc_feature: MA Experiment ID: 20001911 Result: Up-regulated in Transcription
  misc_feature: MA Experiment 20001911 PARAMETER Experiment Name: At_Drought_Reproduction_P Parameter: Age (day) Value: 40
  misc_feature: MA Experiment 20001911 PARAMETER Experiment Name: At_Drought_Reproduction_P Parameter: Organism Value: A. thaliana
  misc_feature: MA Experiment 20001911 PARAMETER Experiment Name: At_Drought_Reproduction_P Parameter: Plant Line Value: WS
  misc_feature: MA Experiment 20001911 PARAMETER Experiment Name: At_Drought_Reproduction_P Parameter: Timepoint (day) Value: 10
  misc_feature: MA Experiment 20001911 PARAMETER Experiment Name: At_Drought_Reproduction_P Parameter: Tissue Value: Flowers
  misc_feature: MA Experiment 20001911 PARAMETER Experiment Name: At_Drought_Reproduction_P Parameter: Treatment Value: Drought vs. No Drought
atggaggacgatgaagacatccgatctcagggttccgattcacctgatccgtcttcctccccgccggcgggacgaatcacggttacggtggcttcggcaggtccgccttcttattctctgactcctccgggtaattcgtcgcagaaggatccggatgcgttggctctggcgctgcttccgattcaggccagcggtggagggaataacagcagtgggagaccaaccggcggcggcgggagggaggattgttggagcgaagcagctacggctgtgttgattgatgcgtggggtgagagatacttggagcttagcagagggaatctgaagcagaagcactggaaagaggtggctgagattgtgagcagcagagaggattacggtaaaattcccaaaactgatatacagtgtaagaataggatcgatacggtgaagaagaagtataaacaagagaaggtgagaatcgctaacggcggtggccgtagcagatgggtgttcttcgacaagcttgaccgtctgattggatcaacggcgaagatcccgacggcaacttctggagtcagcggtcctgtcggaggattgcataagattcctatgggtattccaatgggaagtcgttcgaatctgtaccatcagcaagctaagcaaggtaggacactgccacagcaacagcagcaagggatgatggtgaaaaggtgtagtgagtcgaaacgctggcgtttcaggaagaggaacgcttctgattcagactcggaatctgaagcagcaatgtcagatgattccggtgacagtttaccacctcctcctctgtcgaagaggatgaagacggaggagaagaagaagcaagatggtgatggagtggggaacaaatggagggagctgactcgggcaatcatgagattcggtgaagcttatgagcaaacagagaatgcgaaactgcaacaggtggttgagatggagaaagagaggatgaagttcttgaaggagcttgagttgcagagaatgcagttctttgtgaagactcaattggagatatcacaacttaagcagcaacatgggaggagaatgggaaacaccagtaatgatcatcatcacagccgcaagaacaacatcaatgcgattgtcaacaacaacaacgatttgggtaataactag

SEQ ID NO: 78852 - protein, 383 aa, Arabidopsis thaliana
  peptide (1)..(383): Ceres Seq. ID no. 12646349
  misc_feature (1)..(214): Homolog of NCBI NO: 15231799 NR Description: hypothetical protein; protein id: At3g14180.1, by cDNA: gi_18176239, supported by cDNA: gi_21281262 [Arabidopsis
  misc_feature (166)..(383): Homolog of NCBI NO: 15231799 NR Description: hypothetical protein; protein id: At3g14180.1, by cDNA: gi_18176239, supported by cDNA: gi_21281262 [Arabidopsis
  misc_feature (1)..(371): Homolog of NCBI NO: 18404771 NR Description: expressed protein; protein id: At1g54060.1, by cDNA: 117519., supported by cDNA: gi_13430825, supported by gi_15810588 [Arabidopsis thaliana] >gi|25405687|pir||C96581
  misc_feature (3)..(359): Homolog of NCBI NO: 38344545 NR Description: OSJNBa0027P08.13 [Oryza sativa (japonica
  misc_feature (247)..(354): Homolog of NCBI NO: 6016685 NR Description: hypothetical protein [Arabidopsis thaliana]
  misc_feature (247)..(354): Homolog of NCBI NO: 18399118 NR Description: expressed protein; protein id: At3g11100.1, by cDNA: 126401., supported by cDNA: gi_17381250 [Arabidopsis >gi|17381251|gb|AAL36044.1| AT3g11100/F11B9_105 [Arabidopsis
  misc_feature (247)..(354): Homolog of NCBI NO: 12321891 NR Description: hypothetical protein; 14486-13072 [Arabidopsis
  misc_feature (79)..(178): Homolog of NCBI NO: 6016685 NR Description: hypothetical protein [Arabidopsis thaliana]
  misc_feature (79)..(178): Homolog of NCBI NO: 18399118 NR Description: expressed protein; protein id: At3g11100.1, by cDNA: 126401., supported by cDNA: gi_17381250 [Arabidopsis >gi|17381251|gb|AAL36044.1| AT3g11100/F11B9_105 [Arabidopsis
  misc_feature (79)..(178): Homolog of NCBI NO: 12321891 NR Description: hypothetical protein; 14486-13072 [Arabidopsis
MEDDEDIRSQGSDSPDPSSSPPAGRITVTVASAGPPSYSLTPPGNSSQKDPDALALALLPIQASGGGNNSSGRPTGGGGREDCWSEAATAVLIDAWGERYLELSRGNLKQKHWKEVAEIVSSREDYGKIPKTDIQCKNRIDTVKKKYKQEKVRIANGGGRSRWVFFDKLDRLIGSTAKIPTATSGVSGPVGGLHKIPMGIPMGSRSNLYHQQAKQGRTLPQQQQQGMMVKRCSESKRWRFRKRNASDSDSESEAAMSDDSGDSLPPPPLSKRMKTEEKKKQDGDGVGNKWRELTRAIMRFGEAYEQTENAKLQQVVEMEKERMKFLKELELQRMQFFVKTQLEISQLKQQHGRRMGNTSNDHHHSRKNNINAIVNNNNDLGNN

SEQ ID NO: 78853 - DNA, 1122 bp, Arabidopsis thaliana
  misc_feature (1)..(1122): Ceres Seq. ID no. 12646354
  misc_feature: MA Experiment ID: 20000314 Result: Up-regulated in Transcription
  misc_feature: MA Experiment 20000314 PARAMETER Experiment Name: At_14day_Shoots-Roots_Sub_P Parameter: Age (day) Value: 14
  misc_feature: MA Experiment 20000314 PARAMETER Experiment Name: At_14day_Shoots-Roots_Sub_P Parameter: Organism Value: A. thaliana
  misc_feature: MA Experiment 20000314 PARAMETER Experiment Name: At_14day_Shoots-Roots_Sub_P Parameter: Plant Line Value: WS
  misc_feature: MA Experiment 20000314 PARAMETER Experiment Name: At_14day_Shoots-Roots_Sub_P Parameter: Tissue Value: Roots vs. Whole Plant
atggcaagtcctagatttaattccatcatcatcatcttattcatctgcactataagcttatcgatcgtctcgatttcttgcaaagaagatcttaaaacgaaccaagccgccttgtttgcgtttggagattctctgtttgaagccggaaacaataattacttcgactctatctcaagtttccgatcaaatttctggccgtatggtaaaacaacgttcaagtttccaacgggacgggtctctgatggacgaataatgatagattttattgctgaatacgcatggttaccgttgatcccgccaaatctacaacctggttacagtaacagtcaactaacctatggacttaatttcgctactacagccgccggagttttcgccggaacttttcccggatcgtcgaaagatttgggaacacagttaaacaacttcaagaacgtggagaaaacgttgaggtctaatttaggagatgcagaggcgaggagagtaatctcgaaagctgtttatctttttcacataggagcaaatgactatcaatacccattctttgcaaatacctcaacttttagtaacactaccaaagaaagattcatcgatttcgtcatcggtaacacaacgactgtaatcgaggagttgtataaattaggagcaaggaaattcggattcttgagcttgggtccatttggttgtacaccaagcgcattgataataaacagtacaaagataggatcttgtttcgagccagtcacagagctgatcaatctccataaccaagaatttccaaaagtcttgaggcgtctagagcgccggttatccggattcaaatacgctcttcatgactttcacacttctctatcccaaagaatcaacaatccttctcgttacggttttaaggaaggggagatggcatgttgcgggagtgggccgttgaggggaatcaatacatgtggattccgaaatggaccatcgcaaggttacaagctatgcgaaaacgctgatgattacgtcttctttgatccttctcatttgacggaaacggctcatcaacagatcgctgagctgatttggagcggaccacctaatgtcactgcaccttacaatcttaaaacattgttcagactctag

SEQ ID NO: 78854 - protein, 373 aa, Arabidopsis thaliana
  peptide (1)..(373): Ceres Seq. ID no. 12646355
  misc_feature (38)..(354): Pfam Name: GDSL-like Lipase/Acylhydrolase Pfam Description: GDSL-like Lipase/Acylhydrolase
  misc_feature (1)..(373): Homolog of NCBI NO: 15231809 NR Description: unknown protein; protein id: At3g14225.1
  misc_feature (84)..(373): Homolog of NCBI NO: 25405682 NR Description: hypothetical protein F15I1.7 [imported] - thaliana >gi|4587540|gb|AAD25771.1|AC006577_7 Belongs to the
  misc_feature (9)..(89): Homolog of NCBI NO: 25405682 NR Description: hypothetical protein F15I1.7 [imported] - thaliana >gi|4587540|gb|AAD25771.1|AC006577_7 Belongs to the
  misc_feature (9)..(373): Homolog of NCBI NO: 15221018 NR Description: lipase, putative; protein id: At1g53990.1
  misc_feature (1)..(373): Homolog of NCBI NO: 21358785 NR Description: lipase SIL1 [Brassica rapa subsp. pekinensis]
  misc_feature (8)..(373): Homolog of NCBI NO: 25336255 NR Description: hypothetical protein F15I1.2 [imported] - thaliana >gi|4587535|gb|AAD25766.1|AC006577_2 Belongs to the
  misc_feature (7)..(373): Homolog of NCBI NO: 15237530 NR Description: GDSL-motif lipase/hydrolase-like protein; protein
  misc_feature (8)..(360): Homolog of NCBI NO: 15220995 NR Description: lipase, putative; protein id: At1g53940.1
  misc_feature (12)..(373): Homolog of NCBI NO: 25336254 NR Description: hypothetical protein T18A20.15 [imported] -
  misc_feature (12)..(373): Homolog of NCBI NO: 30695607 NR Description: GDSL-motif lipase/hydrolase protein [Arabidopsis
MASPRFNSIIIILFICTISLSIVSISCKEDLKTNQAALFAFGDSLFEAGNNNYFDSISSFRSNFWPYGKTTFKFPTGRVSDGRIMIDFIAEYAWLPLIPPNLQPGYSNSQLTYGLNFATTAAGVFAGTFPGSSKDLGTQLNNFKNVEKTLRSNLGDAEARRVISKAVYLFHIGANDYQYPFFANTSTFSNTTKERFIDFVIGNTTTVIEELYKLGARKFGFLSLGPFGCTPSALIINSTKIGSCFEPVTELINLHNQEFPKVLRRLERRLSGFKYALHDFHTSLSQRINNPSRYGFKEGEMACCGSGPLRGINTCGFRNGPSQGYKLCENADDYVFFDPSHLTETAHQQIAELIWSGPPNVTAPYNLKTLFRL

SEQ ID NO: 78855 - protein, 289 aa, Arabidopsis thaliana
  peptide (1)..(289): Ceres Seq. ID no. 12646356
  misc_feature (1)..(270): Pfam Name: GDSL-like Lipase/Acylhydrolase Pfam Description: GDSL-like Lipase/Acylhydrolase
  misc_feature (1)..(289): Homolog of NCBI NO: 15231809 NR Description: unknown protein; protein id: At3g14225.1
  misc_feature (1)..(289): Homolog of NCBI NO: 25405682 NR Description: hypothetical protein F15I1.7 [imported] - thaliana >gi|4587540|gb|AAD25771.1|AC006577_7 Belongs to the
  misc_feature (1)..(289): Homolog of NCBI NO: 15221018 NR Description: lipase, putative; protein id: At1g53990.1
  misc_feature (1)..(289): Homolog of NCBI NO: 21358785 NR Description: lipase SIL1 [Brassica rapa subsp. pekinensis]
  misc_feature (1)..(289): Homolog of NCBI NO: 25336255 NR Description: hypothetical protein F15I1.2 [imported] - thaliana >gi|4587535|gb|AAD25766.1|AC006577_2 Belongs to the
  misc_feature (1)..(289): Homolog of NCBI NO: 15237530 NR Description: GDSL-motif lipase/hydrolase-like protein; protein
  misc_feature (1)..(276): Homolog of NCBI NO: 15220995 NR Description: lipase, putative; protein id: At1g53940.1
  misc_feature (1)..(289): Homolog of NCBI NO: 25336254 NR Description: hypothetical protein T18A20.15 [imported] -
  misc_feature (1)..(289): Homolog of NCBI NO: 30695607 NR Description: GDSL-motif lipase/hydrolase protein [Arabidopsis
  misc_feature (1)..(286): Homolog of NCBI NO: 15223959 NR Description: putative proline-rich APG protein; protein id:
MIDFIAEYAWLPLIPPNLQPGYSNSQLTYGLNFATTAAGVFAGTFPGSSKDLGTQLNNFKNVEKTLRSNLGDAEARRVISKAVYLFHIGANDYQYPFFANTSTFSNTTKERFIDFVIGNTTTVIEELYKLGARKFGFLSLGPFGCTPSALIINSTKIGSCFEPVTELINLHNQEFPKVLRRLERRLSGFKYALHDFHTSLSQRINNPSRYGFKEGEMACCGSGPLRGINTCGFRNGPSQGYKLCENADDYVFFDPSHLTETAHQQIAELIWSGPPNVTAPYNLKTLFRL

SEQ ID NO: 78856 - DNA, 2645 bp, Arabidopsis thaliana
  misc_feature (1)..(2645): Ceres Seq. ID no. 12646359
  misc_feature: MA Experiment ID: 108463 Result: Down-regulated in Transcription
  misc_feature: MA Experiment 108463 PARAMETER Experiment Name: At_Germinating_Seeds_cDNA_P Parameter: Age (day) Value: 3 vs. 0
  misc_feature: MA Experiment 108463 PARAMETER Experiment Name: At_Germinating_Seeds_cDNA_P Parameter: Tissue Value: Germinating Seeds
  misc_feature: MA Experiment ID: 108464 Result: Down-regulated in Transcription
  misc_feature: MA Experiment 108464 PARAMETER Experiment Name: At_Germinating_Seeds_cDNA_P Parameter: Age (day) Value: 4 vs. 0
  misc_feature: MA Experiment 108464 PARAMETER Experiment Name: At_Germinating_Seeds_cDNA_P Parameter: Tissue Value: Germinating Seeds
  misc_feature: MA Experiment ID: 108573 Result: Up-regulated in Transcription
  misc_feature: MA Experiment 108573 PARAMETER Experiment Name: At_Drought_cDNA_P Parameter: Timepoint (hr) Value: 6
  misc_feature: MA Experiment 108573 PARAMETER Experiment Name: At_Drought_cDNA_P Parameter: Tissue Value: Aerial
  misc_feature: MA Experiment 108573 PARAMETER Experiment Name: At_Drought_cDNA_P Parameter: Treatment Value: Drought vs. No Drought
  misc_feature: MA Experiment ID: 108577 Result: Down-regulated in Transcription
  misc_feature: MA Experiment 108577 PARAMETER Experiment Name: At_42deg_Heat_cDNA_P Parameter: Temperature (deg C) Value: 42 vs. 22
  misc_feature: MA Experiment 108577 PARAMETER Experiment Name: At_42deg_Heat_cDNA_P Parameter: Timepoint (hr) Value: 6
  misc_feature: MA Experiment 108577 PARAMETER Experiment Name: At_42deg_Heat_cDNA_P Parameter: Tissue Value: Aerial
  misc_feature: MA Experiment ID: 108585 Result: Up-regulated in Transcription
  misc_feature: MA Experiment 108585 PARAMETER Experiment Name: At_5mM_NaNP_cDNA_P Parameter: Timepoint (hr) Value: 6
  misc_feature: MA Experiment 108585 PARAMETER Experiment Name: At_5mM_NaNP_cDNA_P Parameter: Tissue Value: Aerial
  misc_feature: MA Experiment 108585 PARAMETER Experiment Name: At_5mM_NaNP_cDNA_P Parameter: Treatment Value: null
  misc_feature: MA Experiment ID: 20000184 Result: Up-regulated in Transcription
  misc_feature: MA Experiment 20000184 PARAMETER Experiment Name: At_Shoots__P Parameter: Age (day) Value: 7
  misc_feature: MA Experiment 20000184 PARAMETER Experiment Name: At_Shoots__P Parameter: Tissue Value: Shoots vs. Whole Plant
  misc_feature: MA Experiment ID: 20000234 Result: Up-regulated in Transcription
  misc_feature: MA Experiment 20000234 PARAMETER Experiment Name: At_Siliques_P Parameter: Age (day) Value: 21
  misc_feature: MA Experiment 20000234 PARAMETER Experiment Name: At_Siliques_P Parameter: Organism Value: A. thaliana
  misc_feature: MA Experiment 20000234 PARAMETER Experiment Name: At_Siliques_P Parameter: Plant Line Value: WS
  misc_feature: MA Experiment 20000234 PARAMETER Experiment Name: At_Siliques_P Parameter: Tissue Value: Less Than 5mm Siliques vs. Whole Plant
  misc_feature: MA Experiment ID: 20000437 Result: Down-regulated in Transcription
  misc_feature: MA Experiment 20000437 PARAMETER Experiment Name: At_Drought_P Parameter: Age (day) Value: 8
  misc_feature: MA Experiment 20000437 PARAMETER Experiment Name: At_Drought_P Parameter: Organism Value: A. thaliana
  misc_feature: MA Experiment 20000437 PARAMETER Experiment Name: At_Drought_P Parameter: Plant Line Value: WS
  misc_feature: MA Experiment 20000437 PARAMETER Experiment Name: At_Drought_P Parameter: Timepoint (hr) Value: 24
  misc_feature: MA Experiment 20000437 PARAMETER Experiment Name: At_Drought_P Parameter: Tissue Value: Whole Plant
  misc_feature: MA Experiment 20000437 PARAMETER Experiment Name: At_Drought_P Parameter: Treatment Value: Drought vs. No Drought
  misc_feature: MA Experiment ID: 20000495 Result: Up-regulated in Transcription
  misc_feature: MA Experiment 20000495 PARAMETER Experiment Name: At_Guard_Cells_P Parameter: Harvest Date Value: 8/2/2002
  misc_feature: MA Experiment 20000495 PARAMETER Experiment Name: At_Guard_Cells_P Parameter: Organism Value: A. thaliana
  misc_feature: MA Experiment 20000495 PARAMETER Experiment Name: At_Guard_Cells_P Parameter: Tissue Value: Guard Cells vs. Leaves
  misc_feature: MA Experiment ID: 20001451 Result: Up-regulated in Transcription
  misc_feature: MA Experiment 20001451 PARAMETER Experiment Name: At_Far-red-induction_P Parameter: Age (day) Value: 7
  misc_feature: MA Experiment 20001451 PARAMETER Experiment Name: At_Far-red-induction_P Parameter: Light Value: Far-red vs. White
  misc_feature: MA Experiment 20001451 PARAMETER Experiment Name: At_Far-red-induction_P Parameter: Organism Value: A. thaliana
  misc_feature: MA Experiment 20001451 PARAMETER Experiment Name: At_Far-red-induction_P Parameter: Plant Line Value: Columbia
  misc_feature: MA Experiment 20001451 PARAMETER Experiment Name: At_Far-red-induction_P Parameter: Timepoint (hr) Value: 24
  misc_feature: MA Experiment 20001451 PARAMETER Experiment Name: At_Far-red-induction_P Parameter: Tissue Value: Whole Plant
  misc_feature: MA Experiment ID: 20001558 Result: Up-regulated in Transcription
  misc_feature: MA Experiment 20001558 PARAMETER Experiment Name: At_Drought_Soil_Dry_P Parameter: Age (day) Value: 27
  misc_feature: MA Experiment 20001558 PARAMETER Experiment Name: At_Drought_Soil_Dry_P Parameter: Organism Value: A. thaliana
  misc_feature: MA Experiment 20001558 PARAMETER Experiment Name: At_Drought_Soil_Dry_P Parameter: Plant Line Value: WS
  misc_feature: MA Experiment 20001558 PARAMETER Experiment Name: At_Drought_Soil_Dry_P Parameter: Post Timepoint (hr) Value: 6
  misc_feature: MA Experiment 20001558 PARAMETER Experiment Name: At_Drought_Soil_Dry_P Parameter: Post-Treatment Value: Re-Water vs. No Drought
  misc_feature: MA Experiment 20001558 PARAMETER Experiment Name: At_Drought_Soil_Dry_P Parameter: Timepoint (day) Value: 13
  misc_feature: MA Experiment 20001558 PARAMETER Experiment Name: At_Drought_Soil_Dry_P Parameter: Treatment Value: Drought vs. No Drought
  misc_feature: MA Experiment ID: 20001905 Result: Down-regulated in Transcription
  misc_feature: MA Experiment 20001905 PARAMETER Experiment Name: At_Drought_Reproduction_P Parameter: Age (day) Value: 40
  misc_feature: MA Experiment 20001905 PARAMETER Experiment Name: At_Drought_Reproduction_P Parameter: Organism Value: A. thaliana
  misc_feature: MA Experiment 20001905 PARAMETER Experiment Name: At_Drought_Reproduction_P Parameter: Plant Line Value: WS
  misc_feature: MA Experiment 20001905 PARAMETER Experiment Name: At_Drought_Reproduction_P Parameter: Timepoint (day) Value: 10
  misc_feature: MA Experiment 20001905 PARAMETER Experiment Name: At_Drought_Reproduction_P Parameter: Tissue Value: Rosettes
  misc_feature: MA Experiment 20001905 PARAMETER Experiment Name: At_Drought_Reproduction_P Parameter: Treatment Value: Drought vs. No Drought
  misc_feature: MA Experiment ID: 20001911 Result: Down-regulated in Transcription
  misc_feature: MA Experiment 20001911 PARAMETER Experiment Name: At_Drought_Reproduction_P Parameter: Age (day) Value: 40
  misc_feature: MA Experiment 20001911 PARAMETER Experiment Name: At_Drought_Reproduction_P Parameter: Organism Value: A. thaliana
  misc_feature: MA Experiment 20001911 PARAMETER Experiment Name: At_Drought_Reproduction_P Parameter: Plant Line Value: WS
  misc_feature: MA Experiment 20001911 PARAMETER Experiment Name: At_Drought_Reproduction_P Parameter: Timepoint (day) Value: 10
  misc_feature: MA Experiment 20001911 PARAMETER Experiment Name: At_Drought_Reproduction_P Parameter: Tissue Value: Flowers
  misc_feature: MA Experiment 20001911 PARAMETER Experiment Name: At_Drought_Reproduction_P Parameter: Treatment Value: Drought vs. No Drought
acacactagggaaaccacagttctcttctatcctctctttctccgcttctgtagcaatgtcaatgtggtaccctctaccttcttcttcttcctccactcactaaccaaatccagaatcaacaataatagaaaaagccctaactttctccgtcgatggctttcttcttctactttttcttcctcttgactctttcttctccttcttcttctgcttcctcttcaaactccttgacttacatcgtccacgtcgaccacgaagctaaaccctcaatcttccccactcattttcactggtacacttcctctcttgcctcactcacctcttctcctccctccattatccacacatacgacaccgttttccatggcttctccgctagactcacttcacaagacgctagtcaactcttagaccatcctcatgtcatctctgttatcccggaacaagtccgtcacttgcacaccactcgttcccctgagtttcttggtcttaggtccaccgacaaagcgggtctactcgaagagtctgatttcgggtcggatctagttatcggagttatcgatactggtgtttggcccgaaagacctagctttgatgaccgtggtcttggtcctgttcccattaaatggaaaggccaatgtatcgcttcccaagattttccggagtctgcttgtaaccgtaaactcgtcggagctagattcttctgcggtgggtatgaagcaaccaacgggaaaatgaatgaaacgactgagtttcgctctccgcgtgactccgatggacatgggactcacacagcttcaatctccgccggccgttacgtttttccggcgtcaactctcggctacgctcacggcgtcgctgctgggatggctccaaaagctagactcgccgcttacaaagtctgttggaactccggttgttacgactccgatatcttagccgctttcgacaccgccgttgccgacggtgtcgatgtcatctctctctccgttggaggcgtcgtggttccttattacctagacgctatcgctattggagcttttggagctattgacagaggcatattcgtctctgcttccgccggtaacggaggtcccggtgctttaacggtgacaaatgttgctccgtggatgacaacagtcggagctggaacaatcgatagggattttccggccaatgtgaaactcggtaacgggaagatgatttctggtgttagtgtatacggtggaccgggtctggatccgggtcgaatgtacccgcttgtttacggtggtagtttactaggcggcgatggttactcatcgtctctgtgtcttgaaggctcgttggatccgaatttagtgaagggaaagatcgttctttgtgatagaggaatcaattctagagcaaccaaaggtgagatcgtacggaaaaatggaggcttggggatgattatagcgaatggtgtgtttgacggtgaaggtttagtagctgattgccacgtgttaccggcgacatctgttggtgcttctggaggagatgagattcgtaggtatatctctgaatcatccaaatctcgttcatcgaaacatccaacggctacgattgttttcaaaggtacccgacttgggatccgacctgcaccggttgttgcatctttctctgctcgtggtcctaatccagagacgccggagattcttaaaccggatgtaatcgcacctggtttgaatattctagctgcttggcctgaccggattggtccatctggtgttacttctgataaccggagaactgagttcaacattttatcaggcacttcgatggcgtgcccgcacgtgtctggtctagctgctttgcttaaggcggctcatccggattggagtccggcggcgataagatcagcattgataaccacggcttacacggttgataacagcggtgagccgatgatggatgagtccactggcaatacatcttcggttatggattatggttcgggtcatgttcacccaaccaaagctatggatccgggattagtctatgatataacatcttatgattatatcaacttcttgtgtaattctaactacactagaaccaacattgtgacaataacccgtcgccaagcggactgtgacggtgcaagacgagcgggacacgtcgggaatttaaactacccgtcgttctctgtcgtgtttcagcagtatggagagagtaaaatgtcgacacatttcattaggactgtgacaaatgtaggcgattcggattcggtttacgagattaagattaggccgcctagagggactacggtgacggttgagccggagaagctatcgttcagacgggtggggcagaaactgagttttgttgttagggttaagaccacagaggtgaagttgtcaccaggagcgacaaatgtggagactggtcatatagtttggtcagatgggaaacggaatgtgacaagtcccttggtggtcactcttcaacaacctctttgaaggggtttaggatctggtgaccgggaaaattctggtctctgtttgttgtactagtgaaaaagaaagatcataagttgttgttgttgtcgtctatgatctttgttggtgtaatataaatatgtatcttttgttttgttgttaagaaagatagagcgtctaaagaa

SEQ ID NO: 78857 - protein, 775 aa, Arabidopsis thaliana
  peptide (1)..(775): Ceres Seq. ID no. 12646360
  misc_feature (361)..(462): Pfam Name: PA domain Pfam Description: PA domain
  misc_feature (195)..(775): Homolog of NCBI NO: 16930701 NR Description: AT3g14240/MLN21_2 [Arabidopsis thaliana]
  misc_feature (10)..(775): Homolog of NCBI NO: 18418552 NR Description: subtilisin-like serine protease; protein id: supported by cDNA: gi_18389255, supported by cDNA: gi_20465268
  misc_feature (14)..(770): Homolog of NCBI NO: 14488360 NR Description: putative serine protease [Oryza sativa (japonica
  misc_feature (7)..(770): Homolog of NCBI NO: 1076414 NR Description: subtilisin-like proteinase (EC 3.4.21.-),
  misc_feature (7)..(748): Homolog of NCBI NO: 18425181 NR Description: subtilisin-like serine protease ARA12; protein At5g67360.1, supported by cDNA: gi_13430745, supported by cDNA:
  misc_feature (7)..(748): Homolog of NCBI NO: 20147211 NR Description: AT5g67360/K8K14_8 [Arabidopsis thaliana]
  misc_feature (1)..(767): Homolog of NCBI NO: 7435657 NR Description: subtilisin-like proteinase (EC 3.4.21.-) 1 -
  misc_feature (1)..(775): Homolog of NCBI NO: 18423316 NR Description: subtilisin-like serine protease; protein id:
  misc_feature (123)..(768): Homolog of NCBI NO: 34911518 NR Description: putative subtilisin-like protease [Oryza sativa
  misc_feature (122)..(771): Homolog of NCBI NO: 15242456 NR Description: subtilisin-like protease; protein id: At5g45650.1
MAFFFYFFFLLTLSSPSSSASSSNSLTYIVHVDHEAKPSIFPTHFHWYTSSLASLTSSPPSIIHTYDTVFHGFSARLTSQDASQLLDHPHVISVIPEQVRHLHTTRSPEFLGLRSTDKAGLLEESDFGSDLVIGVIDTGVWPERPSFDDRGLGPVPIKWKGQCIASQDFPESACNRKLVGARFFCGGYEATNGKMNETTEFRSPRDSDGHGTHTASISAGRYVFPASTLGYAHGVAAGMAPKARLAAYKVCWNSGCYDSDILAAFDTAVADGVDVISLSVGGVVVPYYLDAIAIGAFGAIDRGIFVSASAGNGGPGALTVTNVAPWMTTVGAGTIDRDFPANVKLGNGKMISGVSVYGGPGLDPGRMYPLVYGGSLLGGDGYSSSLCLEGSLDPNLVKGKIVLCDRGINSRATKGEIVRKNGGLGMIIANGVFDGEGLVADCHVLPATSVGASGGDEIRRYISESSKSRSSKHPTATIVFKGTRLGIRPAPVVASFSARGPNPETPEILKPDVIAPGLNILAAWPDRIGPSGVTSDNRRTEFNILSGTSMACPHVSGLAALLKAAHPDWSPAAIRSALITTAYTVDNSGEPMMDESTGNTSSVMDYGSGHVHPTKAMDPGLVYDITSYDYINFLCNSNYTRTNIVTITRRQADCDGARRAGHVGNLNYPSFSVVFQQYGESKMSTHFIRTVTNVGDSDSVYEIKIRPPRGTTVTVEPEKLSFRRVGQKLSFVVRVKTTEVKLSPGATNVETGHIVWSDGKRNVTSPLVVTLQQPL

SEQ ID NO: 78858 - protein, 581 aa, Arabidopsis thaliana
  peptide (1)..(581): Ceres Seq. ID no. 12646361
  misc_feature (167)..(268): Pfam Name: PA domain Pfam Description: PA domain
  misc_feature (1)..(581): Homolog of NCBI NO: 16930701 NR Description: AT3g14240/MLN21_2 [Arabidopsis thaliana]
  misc_feature (1)..(581): Homolog of NCBI NO: 18418552 NR Description: subtilisin-like serine protease; protein id: supported by cDNA: gi_18389255, supported by cDNA: gi_20465268
  misc_feature (1)..(576): Homolog of NCBI NO: 14488360 NR Description: putative serine protease [Oryza sativa (japonica
  misc_feature (1)..(576): Homolog of NCBI NO: 1076414 NR Description: subtilisin-like proteinase (EC 3.4.21.-),
  misc_feature (1)..(554): Homolog of NCBI NO: 18425181 NR Description: subtilisin-like serine protease ARA12; protein At5g67360.1, supported by cDNA: gi_13430745, supported by cDNA:
  misc_feature (1)..(554): Homolog of NCBI NO: 20147211 NR Description: AT5g67360/K8K14_8 [Arabidopsis thaliana]
  misc_feature (1)..(573): Homolog of NCBI NO: 7435657 NR Description: subtilisin-like proteinase (EC 3.4.21.-) 1 -
  misc_feature (1)..(581): Homolog of NCBI NO: 18423316 NR Description: subtilisin-like serine protease; protein id:
  misc_feature (1)..(574): Homolog of NCBI NO: 34911518 NR Description: putative subtilisin-like protease [Oryza sativa
  misc_feature (1)..(577): Homolog of NCBI NO: 15242456 NR Description: subtilisin-like protease; protein id: At5g45650.1
MNETTEFRSPRDSDGHGTHTASISAGRYVFPASTLGYAHGVAAGMAPKARLAAYKVCWNSGCYDSDILAAFDTAVADGVDVISLSVGGVVVPYYLDAIAIGAFGAIDRGIFVSASAGNGGPGALTVTNVAPWMTTVGAGTIDRDFPANVKLGNGKMISGVSVYGGPGLDPGRMYPLVYGGSLLGGDGYSSSLCLEGSLDPNLVKGKIVLCDRGINSRATKGEIVRKNGGLGMIIANGVFDGEGLVADCHVLPATSVGASGGDEIRRYISESSKSRSSKHPTATIVFKGTRLGIRPAPVVASFSARGPNPETPEILKPDVIAPGLNILAAWPDRIGPSGVTSDNRRTEFNILSGTSMACPHVSGLAALLKAAHPDWSPAAIRSALITTAYTVDNSGEPMMDESTGNTSSVMDYGSGHVHPTKAMDPGLVYDITSYDYINFLCNSNYTRTNIVTITRRQADCDGARRAGHVGNLNYPSFSVVFQQYGESKMSTHFIRTVTNVGDSDSVYEIKIRPPRGTTVTVEPEKLSFRRVGQKLSFVVRVKTTEVKLSPGATNVETGHIVWSDGKRNVTSPLVVTLQQPL

SEQ ID NO: 78859 - protein, 537 aa, Arabidopsis thaliana
  peptide (1)..(537): Ceres Seq. ID no. 12646362
  misc_feature (123)..(224): Pfam Name: PA domain Pfam Description: PA domain
  misc_feature (1)..(537): Homolog of NCBI NO: 16930701 NR Description: AT3g14240/MLN21_2 [Arabidopsis thaliana]
  misc_feature (1)..(537): Homolog of NCBI NO: 18418552 NR Description: subtilisin-like serine protease; protein id: supported by cDNA: gi_18389255, supported by cDNA: gi_20465268
  misc_feature (1)..(532): Homolog of NCBI NO: 14488360 NR Description: putative serine protease [Oryza sativa (japonica
  misc_feature (1)..(532): Homolog of NCBI NO: 1076414 NR Description: subtilisin-like proteinase (EC 3.4.21.-),
  misc_feature (1)..(510): Homolog of NCBI NO: 18425181 NR Description: subtilisin-like serine protease ARA12; protein At5g67360.1, supported by cDNA: gi_13430745, supported by cDNA:
  misc_feature (1)..(510): Homolog of NCBI NO: 20147211 NR Description: AT5g67360/K8K14_8 [Arabidopsis thaliana]
  misc_feature (1)..(529): Homolog of NCBI NO: 7435657 NR Description: subtilisin-like proteinase (EC 3.4.21.-) 1 -
  misc_feature (1)..(537): Homolog of NCBI NO: 18423316 NR Description: subtilisin-like serine protease; protein id:
  misc_feature (1)..(530): Homolog of NCBI NO: 34911518 NR Description: putative subtilisin-like protease [Oryza sativa
  misc_feature (1)..(533): Homolog of NCBI NO: 15242456 NR Description: subtilisin-like protease; protein id: At5g45650.1
MAPKARLAAYKVCWNSGCYDSDILAAFDTAVADGVDVISLSVGGVVVPYYLDAIAIGAFGAIDRGIFVSASAGNGGPGALTVTNVAPWMTTVGAGTIDRDFPANVKLGNGKMISGVSVYGGPGLDPGRMYPLVYGGSLLGGDGYSSSLCLEGSLDPNLVKGKIVLCDRGINSRATKGEIVRKNGGLGMIIANGVFDGEGLVADCHVLPATSVGASGGDEIRRYISESSKSRSSKHPTATIVFKGTRLGIRPAPVVASFSARGPNPETPEILKPDVIAPGLNILAAWPDRIGPSGVTSDNRRTEFNILSGTSMACPHVSGLAALLKAAHPDWSPAAIRSALITTAYTVDNSGEPMMDESTGNTSSVMDYGSGHVHPTKAMDPGLVYDITSYDYINFLCNSNYTRTNIVTITRRQADCDGARRAGHVGNLNYPSFSVVFQQYGESKMSTHFIRTVTNVGDSDSVYEIKIRPPRGTTVTVEPEKLSFRRVGQKLSFVVRVKTTEVKLSPGATNVETGHIVWSDGKRNVTSPLVVTLQQPL

SEQ ID NO: 78860 - DNA, 1529 bp, Arabidopsis thaliana
  misc_feature (1)..(1529): Ceres Seq. ID no. 12646380
  misc_feature: MA Experiment ID: 108595 Result: Down-regulated in Transcription
  misc_feature: MA Experiment 108595 PARAMETER Experiment Name: At_Ler-pi_Ovule_cDNA_P Parameter: Plant Line Value: null
  misc_feature: MA Experiment ID: 20000314 Result: Down-regulated in Transcription
  misc_feature: MA Experiment 20000314 PARAMETER Experiment Name: At_14day_Shoots-Roots_Sub_P Parameter: Age (day) Value: 14
  misc_feature: MA Experiment 20000314 PARAMETER Experiment Name: At_14day_Shoots-Roots_Sub_P Parameter: Organism Value: A. thaliana
  misc_feature: MA Experiment 20000314 PARAMETER Experiment Name: At_14day_Shoots-Roots_Sub_P Parameter: Plant Line Value: WS
  misc_feature: MA Experiment 20000314 PARAMETER Experiment Name: At_14day_Shoots-Roots_Sub_P Parameter: Tissue Value: Roots vs. Whole Plant
aacttgccaataattttttcaactgttacagattactacatcaacgaaatattaaacatttaaccatatataaaagttggagatatatgatataagcttttcttagcagtcccacccttcctctctcgagagagctccattccaatcaaagctgtaaacacacttcagaagatggagatcactaacgttaccgagtatgatgcaatcgcaaaggcgaagttgcctaagatggtatatgactactatgcatctggtgcagaagatcaatggactcttcaagagaacagaaacgcttttgcaagaatcctcttccggcctcggattttgattgatgtgaacaaaattgatatggcgactaccgtcttggggttcaagatctcgatgccgatcatggttgctcctactgcctttcaaaagatggctcaccctgatggggaatatgctacggctagagctgcgtctgctgctggaaccatcatgacactatcttcatgggctacttcaagtgttgaagaagttgcttccacagggccaggaatccgattcttccagctctatgtatacaagaacaggaaggtggttgagcagctcgtgagaagagccgagaaagctgggttcaaagccattgctctcactgtagacaccccaaggctaggtcgcagagagtctgatatcaagaacagattcactttgcctccaaacctgacattgaagaactttgaaggtcttgaccttggaaagatggacgaggccaatgactctggcttggcttcgtatgttgctggtcaaattgaccgtaccttgagctggaaggatatccagtggctccaaacaatcaccaacatgccaattcttgtcaagggtgttcttacaggagaggatgcaaggatagcgattcaagctggagcagcagggatcattgtgtcaaatcatggagctcgccagcttgattatgtcccagcaacaatctcagcccttgaagaggttgtcaaagcaacacaaggacgagttcctgtcttcttggatggtggtgttcgacgtggcactgatgtcttcaaggcacttgcacttggagcctctggaatatttattggaagaccagtggtttttgcactagctgctgaaggagaagccggagtcaaaaaggtgcttcaaatgttgcgtgatgagttcgagctaaccatggcactaagtgggtgccggtcactcagtgaaatcacccgtaaccacattgtcacggaatgggacactccacgccatttgcccaggttatagagaagaaaaaaaaaacagagaacagaaacaacacggcaccaaaacgtattcatattctgattgatcactttgcttctactctgctatatttatatctcgaaaaacttgtttctccctatatcggatcacaaaaacgtgcgtagagattctctgtaatgctatttggctacattttacctttccgtttattcttattgcttgtacaatagatgttgattcctacaataccaatgaatactaaaatctgttcccgg

SEQ ID NO: 78861 - protein, 367 aa, Arabidopsis thaliana; identical to SEQ ID NO: 35825
  peptide (1)..(367): Ceres Seq. ID no. 12646381
  misc_feature (13)..(356): Pfam Name: FMN-dependent dehydrogenase Pfam Description: FMN-dependent dehydrogenase
  misc_feature (1)..(367): Homolog of NCBI NO: 15229497 NR Description: glycolate oxidase; protein id: At3g14415.1
  misc_feature (1)..(367): Homolog of NCBI NO: 15231850 NR Description: glycolate oxidase, putative; protein id: supported by cDNA: gi_15450740, supported by cDNA: gi_16226422, by cDNA: gi_16226771, supported by cDNA: gi_16604393, supported
  misc_feature (1)..(367): Homolog of NCBI NO: 16226772 NR Description: AT3g14420/MOA2_2 [Arabidopsis thaliana]
  misc_feature (1)..(367): Homolog of NCBI NO: 7431428 NR Description: (S)-2-hydroxy-acid oxidase (EC 1.1.3.15) - >gi|217909|dbj|BAA03131.1| glycolate oxidase [Cucurbita cv.
  misc_feature (1)..(367): Homolog of NCBI NO: 1773330 NR Description: glycolate oxidase [Mesembryanthemum crystallinum]
  misc_feature (1)..(367): Homolog of NCBI NO: 27549566 NR Description: glycolate oxidase [Zantedeschia aethiopica]
  misc_feature (1)..(366): Homolog of NCBI NO: 228403 NR Description: glycolate oxidase
  misc_feature (1)..(367): Homolog of NCBI NO: 121530 NR Description: (S)-2-hydroxy-acid oxidase, peroxisomal
  misc_feature (1)..(367): Homolog of NCBI NO: 999542 NR Description: Chain A, Glycolate Oxidase (E.C.1.1.3.15) Mutant Tyr 24 Replaced By Phe (Y24f) >gi|999543|pdb|1GYL|B Chain B,
  misc_feature (1)..(359): Homolog of NCBI NO: 2554675 NR Description: Three-Dimensional Structure Of Glycolate Oxidase

SEQ ID NO: 78862 - protein, 348 aa, Arabidopsis thaliana; identical to SEQ ID NO: 35826
  peptide (1)..(348): Ceres Seq. ID no. 12646382
  misc_feature (1)..(337): Pfam Name: FMN-dependent dehydrogenase Pfam Description: FMN-dependent dehydrogenase
  misc_feature (1)..(348): Homolog of NCBI NO: 15229497 NR Description: glycolate oxidase; protein id: At3g14415.1
  misc_feature (1)..(348): Homolog of NCBI NO: 15231850 NR Description: glycolate oxidase, putative; protein id: supported by cDNA: gi_15450740, supported by cDNA: gi_16226422, by cDNA: gi_16226771, supported by cDNA: gi_16604393, supported
  misc_feature (1)..(348): Homolog of NCBI NO: 16226772 NR Description: AT3g14420/MOA2_2 [Arabidopsis thaliana]
  misc_feature (1)..(348): Homolog of NCBI NO: 7431428 NR Description: (S)-2-hydroxy-acid oxidase (EC 1.1.3.15) - >gi|217909|dbj|BAA03131.1| glycolate oxidase [Cucurbita cv.
  misc_feature (1)..(348): Homolog of NCBI NO: 1773330 NR Description: glycolate oxidase [Mesembryanthemum crystallinum]
  misc_feature (1)..(348): Homolog of NCBI NO: 27549566 NR Description: glycolate oxidase [Zantedeschia aethiopica]
  misc_feature (1)..(347): Homolog of NCBI NO: 228403 NR Description: glycolate oxidase
  misc_feature (1)..(348): Homolog of NCBI NO: 121530 NR Description: (S)-2-hydroxy-acid oxidase, peroxisomal
  misc_feature (1)..(348): Homolog of NCBI NO: 999542 NR Description: Chain A, Glycolate Oxidase (E.C.1.1.3.15) Mutant Tyr 24 Replaced By Phe (Y24f) >gi|999543|pdb|1GYL|B Chain B,
  misc_feature (1)..(340): Homolog of NCBI NO: 2554675 NR Description: Three-Dimensional Structure Of Glycolate Oxidase

SEQ ID NO: 78863 - protein, 308 aa, Arabidopsis thaliana; identical to SEQ ID NO: 35827
  peptide (1)..(308): Ceres Seq. ID no. 12646383
  misc_feature (1)..(297): Pfam Name: FMN-dependent dehydrogenase Pfam Description: FMN-dependent dehydrogenase
  misc_feature (1)..(308): Homolog of NCBI NO: 15229497 NR Description: glycolate oxidase; protein id: At3g14415.1
  misc_feature (1)..(308): Homolog of NCBI NO: 15231850 NR Description: glycolate oxidase, putative; protein id: supported by cDNA: gi_15450740, supported by cDNA: gi_16226422, by cDNA: gi_16226771, supported by cDNA: gi_16604393, supported
  misc_feature (1)..(308): Homolog of NCBI NO: 16226772 NR Description: AT3g14420/MOA2_2 [Arabidopsis thaliana]
  misc_feature (1)..(308): Homolog of NCBI NO: 7431428 NR Description: (S)-2-hydroxy-acid oxidase (EC 1.1.3.15) - >gi|217909|dbj|BAA03131.1| glycolate oxidase [Cucurbita cv.
  misc_feature (1)..(308): Homolog of NCBI NO: 1773330 NR Description: glycolate oxidase [Mesembryanthemum crystallinum]
  misc_feature (1)..(308): Homolog of NCBI NO: 27549566 NR Description: glycolate oxidase [Zantedeschia aethiopica]
  misc_feature (1)..(307): Homolog of NCBI NO: 228403 NR Description: glycolate oxidase
  misc_feature (1)..(308): Homolog of NCBI NO: 121530 NR Description: (S)-2-hydroxy-acid oxidase, peroxisomal
  misc_feature (1)..(308): Homolog of NCBI NO: 999542 NR Description: Chain A, Glycolate Oxidase (E.C.1.1.3.15) Mutant Tyr 24 Replaced By Phe (Y24f) >gi|999543|pdb|1GYL|B Chain B,
  misc_feature (1)..(300): Homolog of NCBI NO: 2554675 NR Description: Three-Dimensional Structure Of Glycolate Oxidase

SEQ ID NO: 78864 - DNA, 1986 bp, Arabidopsis thaliana
  misc_feature (1)..(1986): Ceres Seq. ID no. 12646418
atggatgaatcaaatgagataatcttgcagaaatcaaagaggttgacatctgttgtctggaattactttgagagagtgagaaaggctgatgtgtgctatgctgtttgcattcagtgtaataaaaaactcagtggttcgagcaacagcggaacaactcatcttcggaaccatcttatgcggtgtctcaaaagaactaatcacgacatgtctcagttgctgacacctaaaagaaggaaaaaagagaatccagttactgttgctactatcaattttgatgacggtcaagcgaaagaagagtatcttagacctaagtttgatcaggaccaacgaagggacgaggtggttctaagccgaggaagtggtggaaggtttagtcaagaaaggagtcaggttgatcttgcacgtatgattattttgcacaattatccgttagccatggttgatcatgttggattcaaagtttttgctaggaatcttcagccgttgtttgaagctgtgccaaatagcacaattgaggattcatgtatggagatttacattagggagaagcagagagtgcagcacactttgaatcatttatacggtaaagtcaatctttcggtggagatgtggtcttcccgggataattctaactatgtgtgtttggcctctaattatatcgatgaggagtggaggctacataggaatgttctaaactttatcaccttggatccttctcatactgaagatatgctctcggaagtgatcatcagatgtttgattgaatggagtcttgagaacaagcttttcgctgttacgttcgacagtgtttctgttaatgaagagattgtcctgcgaattaaagaccatatgtctcagagcagccagatattaatcaacgggcagttatttgagttgaaatctgccgctcatcttctgaattctcttgtcgaagattgcttggaggctatgagagatgtgatccaaaagattcgaggaagtgtgagatatgtcaagagctcgcaatcaacacaagtaaggttcaacgaaattgctcaactcgccggaatcaactcccagaagatcttggttcttgattctattgttaactcgaactctacgttcgtgatgcttgaaaccgtattggagtacaagggtgcgttttgccatctgcgtgatcacgatcacagctttgattcatctctaaccgacgaggagtgggaatggacaagatacgttactggttatcttaaacttgtattcgatattgcctctgacttttcagcaaacaaatgtcctacagcaaatgtatactttgctgagatgtgtgatatccacatccagttggtcgagtggtgcaagaaccaggacaacttcttgagttctctcgcagcaaatatgaaggctaaattcgatgagtattggaacaaatgcagccttgttttagcaatcgctgcgatattggatccgcgattcaagatgaagttggtagagtattactactctaagatctatggcagtaccgctctggatcgtatcaaggaagtgtcgaatggtgtcaaggagcttcttgatgcatattcgatgtgctcagccattgtcggtgaagattccttctctggatccggtttaggtagagctagtatggacactagagacagactgaaagggttcgacaagtttcttcacgagacttctcagaaccaaaacacaacaacggatttggacaagtacttgtctgaaccgatctttccccgtagtggcgagttcaacattctgaattactggaaggtccatacaccaagataccctatcctctctttgttggcccgtgacattttgggtacgccgatgtcaatctgtgcgcctgattcaaccttcaactctgggacaccggtgatctctgatagtcagagttccttgaaccctgatatcagacaggctttgttctgtgcacatgactggttgtctacagaaacagagggtacaatctcaaactctatttaa

SEQ ID NO: 78865 - protein, 661 aa, Arabidopsis thaliana
  peptide (1)..(661): Ceres Seq. ID no. 12646419
  misc_feature (567)..(649): Pfam Name: hAT family dimerisation domain Pfam Description: hAT family dimerisation domain
  misc_feature (1)..(656): Homolog of NCBI NO: 15222508 NR Description: unknown protein; protein id: At1g69950.1
  misc_feature (11)..(524): Homolog of NCBI NO: 22535576 NR Description: Ac transposase-like protein [Oryza sativa
  misc_feature (546)..(654): Homolog of NCBI NO: 22535576 NR Description: Ac transposase-like protein [Oryza sativa
  misc_feature (83)..(649): Homolog of NCBI NO: 15228474 NR Description: putative transposase; protein id: At3g42170.1
  misc_feature (1)..(539): Homolog of NCBI NO: 15220044 NR Description: hypothetical protein; protein id: At1g80020.1
  misc_feature (546)..(661): Homolog of NCBI NO: 15220044 NR Description: hypothetical protein; protein id: At1g80020.1
  misc_feature (132)..(649): Homolog of NCBI NO: 37531504 NR Description: putative transposable element [Oryza sativa
  misc_feature (13)..(99): Homolog of NCBI NO: 37531504 NR Description: putative transposable element [Oryza sativa
  misc_feature (99)..(521): Homolog of NCBI NO: 20521440 NR Description: B1003B09.3 [Oryza sativa (japonica
  misc_feature (494)..(649): Homolog of NCBI NO: 20521440 NR Description: B1003B09.3 [Oryza sativa (japonica
MDESNEIILQKSKRLTSVVWNYFERVRKADVCYAVCIQCNKKLSGSSNSGTTHLRNHLMRCLKRTNHDMSQLLTPKRRKKENPVTVATINFDDGQAKEEYLRPKFDQDQRRDEVVLSRGSGGRFSQERSQVDLARMIILHNYPLAMVDHVGFKVFARNLQPLFEAVPNSTIEDSCMEIYIREKQRVQHTLNHLYGKVNLSVEMWSSRDNSNYVCLASNYIDEEWRLHRNVLNFITLDPSHTEDMLSEVIIRCLIEWSLENKLFAVTFDSVSVNEEIVLRIKDHMSQSSQILINGQLFELKSAAHLLNSLVEDCLEAMRDVIQKIRGSVRYVKSSQSTQVRFNEIAQLAGINSQKILVLDSIVNSNSTFVMLETVLEYKGAFCHLRDHDHSFDSSLTDEEWEWTRYVTGYLKLVFDIASDFSANKCPTANVYFAEMCDIHIQLVEWCKNQDNFLSSLAANMKAKFDEYWNKCSLVLAIAAILDPRFKMKLVEYYYSKIYGSTALDRIKEVSNGVKELLDAYSMCSAIVGEDSFSGSGLGRASMDTRDRLKGFDKFLHETSQNQNTTTDLDKYLSEPIFPRSGEFNILNYWKVHTPRYPILSLLARDILGTPMSICAPDSTFNSGTPVISDSQSSLNPDIRQALFCAHDWLSTETEGTISNSI

SEQ ID NO: 78866 - protein, 603 aa, Arabidopsis thaliana
  peptide (1)..(603): Ceres Seq. ID no. 12646420
  misc_feature (509)..(591): Pfam Name: hAT family dimerisation domain Pfam Description: hAT family dimerisation domain
  misc_feature (1)..(598): Homolog of NCBI NO: 15222508 NR Description: unknown protein; protein id: At1g69950.1
  misc_feature (1)..(466): Homolog of NCBI NO: 22535576 NR Description: Ac transposase-like protein [Oryza sativa
  misc_feature (488)..(596): Homolog of NCBI NO: 22535576 NR Description: Ac transposase-like protein [Oryza sativa
  misc_feature (25)..(591): Homolog of NCBI NO: 15228474 NR Description: putative transposase; protein id: At3g42170.1
  misc_feature (1)..(481): Homolog of NCBI NO: 15220044 NR Description: hypothetical protein; protein id: At1g80020.1
  misc_feature (488)..(603): Homolog of NCBI NO: 15220044 NR Description: hypothetical protein; protein id: At1g80020.1
  misc_feature (74)..(591): Homolog of NCBI NO: 37531504 NR Description: putative transposable element [Oryza sativa
  misc_feature (1)..(41): Homolog of NCBI NO: 37531504 NR Description: putative transposable element [Oryza sativa
  misc_feature (41)..(463): Homolog of NCBI NO: 20521440 NR Description: B1003B09.3 [Oryza sativa (japonica
  misc_feature (436)..(591): Homolog of NCBI NO: 20521440 NR Description: B1003B09.3 [Oryza sativa (japonica
MRCLKRTNHDMSQLLTPKRRKKENPVTVATINFDDGQAKEEYLRPKFDQDQRRDEVVLSRGSGGRFSQERSQVDLARMIILHNYPLAMVDHVGFKVFARNLQPLFEAVPNSTIEDSCMEIYIREKQRVQHTLNHLYGKVNLSVEMWSSRDNSNYVCLASNYIDEEWRLHRNVLNFITLDPSHTEDMLSEVIIRCLIEWSLENKLFAVTFDSVSVNEEIVLRIKDHMSQSSQILINGQLFELKSAAHLLNSLVEDCLEAMRDVIQKIRGSVRYVKSSQSTQVRFNEIAQLAGINSQKILVLDSIVNSNSTFVMLETVLEYKGAFCHLRDHDHSFDSSLTDEEWEWTRYVTGYLKLVFDIASDFSANKCPTANVYFAEMCDIHIQLVEWCKNQDNFLSSLAANMKAKFDEYWNKCSLVLAIAAILDPRFKMKLVEYYYSKIYGSTALDRIKEVSNGVKELLDAYSMCSAIVGEDSFSGSGLGRASMDTRDRLKGFDKFLHETSQNQNTTTDLDKYLSEPIFPRSGEFNILNYWKVHTPRYPILSLLARDILGTPMSICAPDSTFNSGTPVISDSQSSLNPDIRQALFCAHDWLSTETEGTISNSI

SEQ ID NO: 78867 - protein, 593 aa, Arabidopsis thaliana
  peptide (1)..(593): Ceres Seq. ID no. 12646421
  misc_feature (499)..(581): Pfam Name: hAT family dimerisation domain Pfam Description: hAT family dimerisation domain
  misc_feature (1)..(588): Homolog of NCBI NO: 15222508 NR Description: unknown protein; protein id: At1g69950.1
  misc_feature (1)..(456): Homolog of NCBI NO: 22535576 NR Description: Ac transposase-like protein [Oryza sativa
  misc_feature (478)..(586): Homolog of NCBI NO: 22535576 NR Description: Ac transposase-like protein [Oryza sativa
  misc_feature (15)..(581): Homolog of NCBI NO: 15228474 NR Description: putative transposase; protein id: At3g42170.1
  misc_feature (1)..(471): Homolog of NCBI NO: 15220044 NR Description: hypothetical protein; protein id: At1g80020.1
  misc_feature (478)..(593): Homolog of NCBI NO: 15220044 NR Description: hypothetical protein; protein id: At1g80020.1
  misc_feature (64)..(581): Homolog of NCBI NO: 37531504 NR Description: putative transposable element [Oryza sativa
  misc_feature (1)..(31): Homolog of NCBI NO: 37531504 NR Description: putative transposable element [Oryza sativa
  misc_feature (31)..(453): Homolog of NCBI NO: 20521440 NR Description: B1003B09.3 [Oryza sativa (japonica
  misc_feature (426)..(581): Homolog of NCBI NO: 20521440 NR Description: B1003B09.3 [Oryza sativa (japonica
MSQLLTPKRRKKENPVTVATINFDDGQAKEEYLRPKFDQDQRRDEVVLSRGSGGRFSQERSQVDLARMIILHNYPLAMVDHVGFKVFARNLQPLFEAVPNSTIEDSCMEIYIREKQRVQHTLNHLYGKVNLSVEMWSSRDNSNYVCLASNYIDEEWRLHRNVLNFITLDPSHTEDMLSEVIIRCLIEWSLENKLFAVTFDSVSVNEEIVLRIKDHMSQSSQILINGQLFELKSAAHLLNSLVEDCLEAMRDVIQKIRGSVRYVKSSQSTQVRFNEIAQLAGINSQKILVLDSIVNSNSTFVMLETVLEYKGAFCHLRDHDHSFDSSLTDEEWEWTRYVTGYLKLVFDIASDFSANKCPTANVYFAEMCDIHIQLVEWCKNQDNFLSSLAANMKAKFDEYWNKCSLVLAIAAILDPRFKMKLVEYYYSKIYGSTALDRIKEVSNGVKELLDAYSMCSAIVGEDSFSGSGLGRASMDTRDRLKGFDKFLHETSQNQNTTTDLDKYLSEPIFPRSGEFNILNYWKVHTPRYPILSLLARDILGTPMSICAPDSTFNSGTPVISDSQSSLNPDIRQALFCAHDWLSTETEGTISNSI

SEQ ID NO: 78868 - DNA, 1071 bp, Arabidopsis thaliana
  misc_feature (1)..(1071): Ceres Seq. ID no. 12646430
  misc_feature: MA Experiment ID: 20000180 Result: Up-regulated in Transcription
  misc_feature: MA Experiment 20000180 PARAMETER Experiment Name: At_Germinating_Seeds_P Parameter: Age (hr) Value: 24 vs. 0
  misc_feature: MA Experiment 20000180 PARAMETER Experiment Name: At_Germinating_Seeds_P Parameter: Tissue Value: Germinating Seeds
  misc_feature: MA Experiment ID: 20000185 Result: Up-regulated in Transcription
  misc_feature: MA Experiment 20000185 PARAMETER Experiment Name: At_Roots__P Parameter: Age (day) Value: 7 vs. 21
  misc_feature: MA Experiment 20000185 PARAMETER Experiment Name: At_Roots__P Parameter: Organism Value: A. thaliana
  misc_feature: MA Experiment 20000185 PARAMETER Experiment Name: At_Roots__P Parameter: Tissue Value: Roots vs. Whole Plant
  misc_feature: MA Experiment ID: 20000227 Result: Up-regulated in Transcription
  misc_feature: MA Experiment 20000227 PARAMETER Experiment Name: At_Root-Tips-vs-Tops_P Parameter: Tissue Value: Root Tips vs. Root Tops
  misc_feature: MA Experiment ID: 20000234 Result: Up-regulated in Transcription
  misc_feature: MA Experiment 20000234 PARAMETER Experiment Name: At_Siliques_P Parameter: Age (day) Value: 21
  misc_feature: MA Experiment 20000234 PARAMETER Experiment Name: At_Siliques_P Parameter: Organism Value: A. thaliana
  misc_feature: MA Experiment 20000234 PARAMETER Experiment Name: At_Siliques_P Parameter: Plant Line Value: WS
  misc_feature: MA Experiment 20000234 PARAMETER Experiment Name: At_Siliques_P Parameter: Tissue Value: Less Than 5mm Siliques vs. Whole Plant
  misc_feature: MA Experiment ID: 20000235 Result: Up-regulated in Transcription
  misc_feature: MA Experiment 20000235 PARAMETER Experiment Name: At_Siliques_P Parameter: Age (day) Value: 21
  misc_feature: MA Experiment 20000235 PARAMETER Experiment Name: At_Siliques_P Parameter: Organism Value: A. thaliana
  misc_feature: MA Experiment 20000235 PARAMETER Experiment Name: At_Siliques_P Parameter: Plant Line Value: WS
  misc_feature: MA Experiment 20000235 PARAMETER Experiment Name: At_Siliques_P Parameter: Tissue Value: 5-10mm Siliques vs. Whole Plant
  misc_feature: MA Experiment ID: 20000264 Result: Up-regulated in Transcription
  misc_feature: MA Experiment 20000264 PARAMETER Experiment Name: At_Open_Flower_P Parameter: Age (day) Value: 21
  misc_feature: MA Experiment 20000264 PARAMETER Experiment Name: At_Open_Flower_P Parameter: Plant Line Value: WS
  misc_feature: MA Experiment 20000264 PARAMETER Experiment Name: At_Open_Flower_P Parameter: Tissue Value: Open Flower vs. Whole Plant
  misc_feature: MA Experiment ID: 20000437 Result: Down-regulated in Transcription
  misc_feature: MA Experiment 20000437 PARAMETER Experiment Name: At_Drought_P Parameter: Age (day) Value: 8
  misc_feature: MA Experiment 20000437 PARAMETER Experiment Name: At_Drought_P Parameter: Organism Value: A. thaliana
  misc_feature: MA Experiment 20000437 PARAMETER Experiment Name: At_Drought_P Parameter: Plant Line Value: WS
  misc_feature: MA Experiment 20000437 PARAMETER Experiment Name: At_Drought_P Parameter: Timepoint (hr) Value: 24
  misc_feature: MA Experiment 20000437 PARAMETER Experiment Name: At_Drought_P Parameter: Tissue Value: Whole Plant
  misc_feature: MA Experiment 20000437 PARAMETER Experiment Name: At_Drought_P Parameter: Treatment Value: Drought vs. No Drought
  misc_feature: MA Experiment ID: 20000439 Result: Up-regulated in Transcription
  misc_feature: MA Experiment 20000439 PARAMETER Experiment Name: At_Roots__P Parameter: Age (day) Value: 14 vs. 21
  misc_feature: MA Experiment 20000439 PARAMETER Experiment Name: At_Roots__P Parameter: Organism Value: A. thaliana
  misc_feature: MA Experiment 20000439 PARAMETER Experiment Name: At_Roots__P Parameter: Tissue Value: Roots vs. Whole Plant
  misc_feature: MA Experiment ID: 20000451 Result: Down-regulated in Transcription
  misc_feature: MA Experiment 20000451 PARAMETER Experiment Name: At_CS6879_Shoots-Roots_P Parameter: Age (day) Value: 14
  misc_feature: MA Experiment 20000451 PARAMETER Experiment Name: At_CS6879_Shoots-Roots_P Parameter: Organism Value: A. thaliana
  misc_feature: MA Experiment 20000451 PARAMETER Experiment Name: At_CS6879_Shoots-Roots_P Parameter: Plant Line Value: CS6879 vs. WS
  misc_feature: MA Experiment 20000451 PARAMETER Experiment Name: At_CS6879_Shoots-Roots_P Parameter: Tissue Value: Roots
  misc_feature: MA Experiment ID: 20000573 Result: Down-regulated in Transcription
  misc_feature: MA Experiment 20000573 PARAMETER Experiment Name: At_100uM_ABA_Mutants__P Parameter: Organism Value: A. thaliana
  misc_feature: MA Experiment 20000573 PARAMETER Experiment Name: At_100uM_ABA_Mutants__P Parameter: Plant Line Value: CS22 vs. Ler wt
  misc_feature: MA Experiment 20000573 PARAMETER Experiment Name: At_100uM_ABA_Mutants__P Parameter: Timepoint (hr) Value: N/A
  misc_feature: MA Experiment 20000573 PARAMETER Experiment Name: At_100uM_ABA_Mutants__P Parameter: Tissue Value: Whole Plant
  misc_feature: MA Experiment 20000573 PARAMETER Experiment Name: At_100uM_ABA_Mutants__P Parameter: Treatment Value: None
  misc_feature: MA Experiment ID: 20000794 Result: Up-regulated in Transcription
  misc_feature: MA Experiment 20000794 PARAMETER Experiment Name: At_Petals_P Parameter: Age (day) Value: 23-25 days
  misc_feature: MA Experiment 20000794 PARAMETER Experiment Name: At_Petals_P Parameter: Plant Line Value: WS
  misc_feature: MA Experiment 20000794 PARAMETER Experiment Name: At_Petals_P Parameter: Tissue Value: Petals vs. Whole plant
  misc_feature: MA Experiment ID: 20001248 Result: Down-regulated in Transcription
  misc_feature: MA Experiment 20001248 PARAMETER Experiment Name: At_Far-red-induction_P Parameter: Age (day) Value: 7
  misc_feature: MA Experiment 20001248 PARAMETER Experiment Name: At_Far-red-induction_P Parameter: Light Value: Far-red vs. White
  misc_feature: MA Experiment 20001248 PARAMETER Experiment Name: At_Far-red-induction_P Parameter: Organism Value: A. thaliana
  misc_feature: MA Experiment 20001248 PARAMETER Experiment Name: At_Far-red-induction_P Parameter: Plant Line Value: Columbia
  misc_feature: MA Experiment 20001248 PARAMETER Experiment Name: At_Far-red-induction_P Parameter: Timepoint (hr) Value: 4
  misc_feature: MA Experiment 20001248 PARAMETER Experiment Name: At_Far-red-induction_P Parameter: Tissue Value: Whole Plant
  misc_feature: MA Experiment ID: 20001451 Result: Down-regulated in Transcription
  misc_feature: MA Experiment 20001451 PARAMETER Experiment Name: At_Far-red-induction_P Parameter: Age (day) Value: 7
  misc_feature: MA Experiment 20001451 PARAMETER Experiment Name: At_Far-red-induction_P Parameter: Light Value: Far-red vs. White
  misc_feature: MA Experiment 20001451 PARAMETER Experiment Name: At_Far-red-induction_P Parameter: Organism Value: A. thaliana
  misc_feature: MA Experiment 20001451 PARAMETER Experiment Name: At_Far-red-induction_P Parameter: Plant Line Value: Columbia
  misc_feature: MA Experiment 20001451 PARAMETER Experiment Name: At_Far-red-induction_P Parameter: Timepoint (hr) Value: 24
  misc_feature: MA Experiment 20001451 PARAMETER Experiment Name: At_Far-red-induction_P Parameter: Tissue Value: Whole Plant
  misc_feature: MA Experiment ID: 20001905 Result: Up-regulated in Transcription
  misc_feature: MA Experiment 20001905 PARAMETER Experiment Name: At_Drought_Reproduction_P Parameter: Age (day) Value: 40
  misc_feature: MA Experiment 20001905 PARAMETER Experiment Name: At_Drought_Reproduction_P Parameter: Organism Value: A. thaliana
  misc_feature: MA Experiment 20001905 PARAMETER Experiment Name: At_Drought_Reproduction_P Parameter: Plant Line Value: WS
  misc_feature: MA Experiment 20001905 PARAMETER Experiment Name: At_Drought_Reproduction_P Parameter: Timepoint (day) Value: 10
  misc_feature: MA Experiment 20001905 PARAMETER Experiment Name: At_Drought_Reproduction_P Parameter: Tissue Value: Rosettes
  misc_feature: MA Experiment 20001905 PARAMETER Experiment Name: At_Drought_Reproduction_P Parameter: Treatment Value: Drought vs. No Drought
atgggttcaaaggataacgccatttctaatgactctgcattagttttatcgcttcttcttcttcttcttcttcccctgcttcacgaagcagcagaaggatgtgacatgttcacggggcggtgggtgaaggacgattcttaccctctctacaattcctccacgtgtccgttcataagacatgagttctcttgccagagaaatggacggccagatctcgattactctaccttcagatggcagcctctttcctgcaaattagcaaggttcaatggattgcagtttttgaagaaaaacaaagggaagaagattatgtttgttggtgattctcttagtctaaatcaatggcaatcgttggcatgtatgcttcattcctctgttccaaattctacgtatactttaaccacacaaggtagtatatcaacctacacattcaaggagtatggactggaattgaagcttgataggaatgtttatctagtagatatagttagggagaagattgggagagttttgaagcttgattcgatcaatgatggaaaaaattgggtagagatggatacattgatttttaatacttggcattggtggagtcggagaggtcctgcacaaccatgggatttgattcaaatagggactaacgttacaaaagacatggaccgtgtggccgcgtttgaaattgcgcttgggacttgggggaaatgggtcgataccgtcttaaatactaagaaaactagagtcttttttcaaggaatttctccatctcattacaaaggagttctgtggggcgaaccagcggcaaagagttgcgtgggacagaaggaaccacttttggggacaaaatatccaggaggattgccagcagaagtgggagttttgaagagagcactcgggaaaatatcgaaaccggtgacattgctagacattacgatgctttcgttgcttcgcaaagatgctcatccttcggtttacggtctaggcgggcgaaactcctccggtgactgcagccactggtgtctctctggggtaccggatacttggaatgagattctttacaattatatggttgagtaa

SEQ ID NO: 78869 - protein, 356 aa, Arabidopsis thaliana
  peptide (1)..(356): Ceres Seq. ID no. 12646431
  misc_feature (1)..(280): Homolog of NCBI NO: 11994596 NR Description: gb|AAD22996.1~gene_id:T21E2.11~similar to unknown
  misc_feature (104)..(356): Homolog of NCBI NO: 22331091 NR Description: hypothetical protein; protein id: At3g14850.1, by cDNA: gi_17065211, supported by cDNA: gi_20259977 [Arabidopsis >gi|17065212|gb|AAL32760.1| Unknown protein [Arabidopsis
  misc_feature (34)..(351): Homolog of NCBI NO: 34911864 NR Description: OSJNBb0032K15.9 [Oryza sativa (japonica
  misc_feature (31)..(351): Homolog of NCBI NO: 18396930 NR Description: expressed protein; protein id: At1g29050.1, by cDNA: 30068., supported by cDNA: gi_18377637, supported by gi_20465654 [Arabidopsis thaliana] >gi|18377638|gb|AAL66969.1|
  misc_feature (33)..(351): Homolog of NCBI NO: 18403435 NR Description: expressed protein; protein id: At2g34070.1, by cDNA: 25519. [Arabidopsis thaliana] expressed protein [Arabidopsis thaliana]
  misc_feature (29)..(352): Homolog of NCBI NO: 18406003 NR Description: expressed protein; protein id: At2g42570.1, by cDNA: 17752., supported by cDNA: gi_14334589, supported by
  misc_feature (34)..(352): Homolog of NCBI NO: 21593142 NR Description: unknown [Arabidopsis thaliana]
  misc_feature (34)..(352): Homolog of NCBI NO: 28393769 NR Description: unknown protein [Arabidopsis thaliana]
  misc_feature (143)..(351): Homolog of NCBI NO: 34904010 NR Description: unnamed protein product [Oryza sativa (japonica group)] >gi|7523484|dbj|BAA94212.1| unnamed protein product
  misc_feature (30)..(148): Homolog of NCBI NO: 34904010 NR Description: unnamed protein product [Oryza sativa (japonica group)] >gi|7523484|dbj|BAA94212.1| unnamed protein product
MGSKDNAISNDSALVLSLLLLLLLPLLHEAAEGCDMFTGRWVKDDSYPLYNSSTCPFIRHEFSCQRNGRPDLDYSTFRWQPLSCKLARFNGLQFLKKNKGKKIMFVGDSLSLNQWQSLACMLHSSVPNSTYTLTTQGSISTYTFKEYGLELKLDRNVYLVDIVREKIGRVLKLDSINDGKNWVEMDTLIFNTWHWWSRRGPAQPWDLIQIGTNVTKDMDRVAAFEIALGTWGKWVDTVLNTKKTRVFFQGISPSHYKGVLWGEPAAKSCVGQKEPLLGTKYPGGLPAEVGVLKRALGKISKPVTLLDITMLSLLRKDAHPSVYGLGGRNSSGDCSHWCLSGVPDTWNEILYNYMVE

SEQ ID NO: 78870 - protein, 321 aa, Arabidopsis thaliana
  peptide (1)..(321): Ceres Seq. ID no. 12646432
  misc_feature (1)..(245): Homolog of NCBI NO: 11994596 NR Description: gb|AAD22996.1~gene_id:T21E2.11~similar to unknown
  misc_feature (69)..(321): Homolog of NCBI NO: 22331091 NR Description: hypothetical protein; protein id: At3g14850.1, by cDNA: gi_17065211, supported by cDNA: gi_20259977 [Arabidopsis >gi|17065212|gb|AAL32760.1| Unknown protein [Arabidopsis
  misc_feature (1)..(316): Homolog of NCBI NO: 34911864 NR Description: OSJNBb0032K15.9 [Oryza sativa (japonica
  misc_feature (1)..(316): Homolog of NCBI NO: 18396930 NR Description: expressed protein; protein id: At1g29050.1, by cDNA: 30068., supported by cDNA: gi_18377637, supported by gi_20465654 [Arabidopsis thaliana] >gi|18377638|gb|AAL66969.1|
  misc_feature (1)..(316): Homolog of NCBI NO: 18403435 NR Description: expressed protein; protein id: At2g34070.1, by cDNA: 25519. [Arabidopsis thaliana] expressed protein [Arabidopsis thaliana]
  misc_feature (1)..(317): Homolog of NCBI NO: 18406003 NR Description: expressed protein; protein id: At2g42570.1, by cDNA: 17752., supported by cDNA: gi_14334589, supported by
  misc_feature (1)..(317): Homolog of NCBI NO: 21593142 NR Description: unknown [Arabidopsis thaliana]
  misc_feature (1)..(317): Homolog of NCBI NO: 28393769 NR Description: unknown protein [Arabidopsis thaliana]
  misc_feature (108)..(316): Homolog of NCBI NO: 34904010 NR Description: unnamed protein product [Oryza sativa (japonica group)] >gi|7523484|dbj|BAA94212.1| unnamed protein product
  misc_feature (1)..(113): Homolog of NCBI NO: 34904010 NR Description: unnamed protein product [Oryza sativa (japonica group)] >gi|7523484|dbj|BAA94212.1| unnamed protein product
MFTGRWVKDDSYPLYNSSTCPFIRHEFSCQRNGRPDLDYSTFRWQPLSCKLARFNGLQFLKKNKGKKIMFVGDSLSLNQWQSLACMLHSSVPNSTYTLTTQGSISTYTFKEYGLELKLDRNVYLVDIVREKIGRVLKLDSINDGKNWVEMDTLIFNTWHWWSRRGPAQPWDLIQIGTNVTKDMDRVAAFEIALGTWGKWVDTVLNTKKTRVFFQGISPSHYKGVLWGEPAAKSCVGQKEPLLGTKYPGGLPAEVGVLKRALGKISKPVTLLDITMLSLLRKDAHPSVYGLGGRNSSGDCSHWCLSGVPDTWNEILYNYMVE

SEQ ID NO: 78871 - protein, 253 aa, Arabidopsis thaliana
  peptide (1)..(253): Ceres Seq. ID no. 12646433
  misc_feature (1)..(177): Homolog of NCBI NO: 11994596 NR Description: gb|AAD22996.1~gene_id:T21E2.11~similar to unknown
  misc_feature (1)..(253): Homolog of NCBI NO: 22331091 NR Description: hypothetical protein; protein id: At3g14850.1, by cDNA: gi_17065211, supported by cDNA: gi_20259977 [Arabidopsis >gi|17065212|gb|AAL32760.1| Unknown protein [Arabidopsis
  misc_feature (1)..(248): Homolog of NCBI NO: 34911864 NR Description: OSJNBb0032K15.9 [Oryza sativa (japonica
  misc_feature (1)..(248): Homolog of NCBI NO: 18396930 NR Description: expressed protein; protein id: At1g29050.1, by cDNA: 30068., supported by cDNA: gi_18377637, supported by gi_20465654 [Arabidopsis thaliana] >gi|18377638|gb|AAL66969.1|
  misc_feature (1)..(248): Homolog of NCBI NO: 18403435 NR Description: expressed protein; protein id: At2g34070.1, by cDNA: 25519. [Arabidopsis thaliana] expressed protein [Arabidopsis thaliana]
  misc_feature (1)..(249): Homolog of NCBI NO: 18406003 NR Description: expressed protein; protein id: At2g42570.1, by cDNA: 17752., supported by cDNA: gi_14334589, supported by
  misc_feature (1)..(249): Homolog of NCBI NO: 21593142 NR Description: unknown [Arabidopsis thaliana]
  misc_feature (1)..(249): Homolog of NCBI NO: 28393769 NR Description: unknown protein [Arabidopsis thaliana]
  misc_feature (40)..(248): Homolog of NCBI NO: 34904010 NR Description: unnamed protein product [Oryza sativa (japonica group)] >gi|7523484|dbj|BAA94212.1| unnamed protein product
  misc_feature (1)..(45): Homolog of NCBI NO: 34904010 NR Description: unnamed protein product [Oryza sativa (japonica group)] >gi|7523484|dbj|BAA94212.1| unnamed protein product
MFVGDSLSLNQWQSLACMLHSSVPNSTYTLTTQGSISTYTFKEYGLELKLDRNVYLVDIVREKIGRVLKLDSINDGKNWVEMDTLIFNTWHWWSRRGPAQPWDLIQIGTNVTKDMDRVAAFEIALGTWGKWVDTVLNTKKTRVFFQGISPSHYKGVLWGEPAAKSCVGQKEPLLGTKYPGGLPAEVGVLKRALGKISKPVTLLDITMLSLLRKDAHPSVYGLGGRNSSGDCSHWCLSGVPDTWNEILYNYMVE

SEQ ID NO: 78872 - DNA, 738 bp, Arabidopsis thaliana
  misc_feature (1)..(738): Ceres Seq. ID no. 12646457
  misc_feature: MA Experiment ID: 20000180 Result: Down-regulated in Transcription
  misc_feature: MA Experiment 20000180 PARAMETER Experiment Name: At_Germinating_Seeds_P Parameter: Age (hr) Value: 24 vs. 0
  misc_feature: MA Experiment 20000180 PARAMETER Experiment Name: At_Germinating_Seeds_P Parameter: Tissue Value: Germinating Seeds
  misc_feature: MA Experiment ID: 20000439 Result: Up-regulated in Transcription
  misc_feature: MA Experiment 20000439 PARAMETER Experiment Name: At_Roots__P Parameter: Age (day) Value: 14 vs. 21
  misc_feature: MA Experiment 20000439 PARAMETER Experiment Name: At_Roots__P Parameter: Organism Value: A. thaliana
  misc_feature: MA Experiment 20000439 PARAMETER Experiment Name: At_Roots__P Parameter: Tissue Value: Roots vs. Whole Plant
atggcgtcggcgtcctcgtctgacggagttgccggaaggattcagaacgcttctttggttcttgtctccgataacagttccacgcttgctgatatccgcaaagctgtggcaatgatgaagaacattgcagttcaattggagaaagaaaatcaaacggacaaggttaaggaccttgaaaattctgtggctgagttattggatttgcatagtgattgtaatcaccgttcgacagcaattcaatccgttgcaaatcggtaccaacccgtggaacaattaacggactttaaaaagttgcttgatgatgaattcacaaagctcaaggctacaccttcctcagtgccacaaaatgatcatttgatgcgccagttcagggaagcagtttggaatgttcatcatgcaggtgaaccaatgcctggtgacgatgatgaggacattgttatgaccagtactcagtgccctcttctaaacatgacatgtcccttgagcgggaagcctgtcactgaattagcagatccagttcgcaggcacgtctatgaaaaatctgtaatcctgcattacatagtcaacaatccaaatgcgaattgtcctgtagcagggtgccgaggtaaactgcagaatagcaaagtgatttgtgatgcaatgttgaagtttgaaatagaggagatgcgctcgttgaacaaacaatctaatagggctgaagtgattgaagacttcacagaagatgtggatgaagattag

SEQ ID NO: 78873 - protein, 245 aa, Arabidopsis thaliana
  peptide (1)..(245): Ceres Seq. ID no. 12646458
  misc_feature (1)..(245): Homolog of NCBI NO: 11994504 NR Description: emb|CAB09999.1~gene_id:F4B12.6~similar to unknown
  misc_feature (1)..(245): Homolog of NCBI NO: 30683483 NR Description: expressed protein [Arabidopsis thaliana]
MASASSSDGVAGRIQNASLVLVSDNSSTLADIRKAVAMMKNIAVQLEKENQTDKVKDLENSVAELLDLHSDCNHRSTAIQSVANRYQPVEQLTDFKKLLDDEFTKLKATPSSVPQNDHLMRQFREAVWNVHHAGEPMPGDDDEDIVMTSTQCPLLNMTCPLSGKPVTELADPVRRHVYEKSVILHYIVNNPNANCPVAGCRGKLQNSKVICDAMLKFEIEEMRSLNKQSNRAEVIEDFTEDVDED

SEQ ID NO: 78874 - protein, 208 aa, Arabidopsis thaliana
  peptide (1)..(208): Ceres Seq. ID no. 12646459
  misc_feature (1)..(208): Homolog of NCBI NO: 11994504 NR Description: emb|CAB09999.1~gene_id:F4B12.6~similar to unknown
  misc_feature (1)..(208): Homolog of NCBI NO: 30683483 NR Description: expressed protein [Arabidopsis thaliana]
MMKNIAVQLEKENQTDKVKDLENSVAELLDLHSDCNHRSTAIQSVANRYQPVEQLTDFKKLLDDEFTKLKATPSSVPQNDHLMRQFREAVWNVHHAGEPMPGDDDEDIVMTSTQCPLLNMTCPLSGKPVTELADPVRRHVYEKSVILHYIVNNPNANCPVAGCRGKLQNSKVICDAMLKFEIEEMRSLNKQSNRAEVIEDFTEDVDED

SEQ ID NO: 78875 - protein, 207 aa, Arabidopsis thaliana
  peptide (1)..(207): Ceres Seq. ID no. 12646460
  misc_feature (1)..(207): Homolog of NCBI NO: 11994504 NR Description: emb|CAB09999.1~gene_id:F4B12.6~similar to unknown
  misc_feature (1)..(207): Homolog of NCBI NO: 30683483 NR Description: expressed protein [Arabidopsis thaliana]
MKNIAVQLEKENQTDKVKDLENSVAELLDLHSDCNHRSTAIQSVANRYQPVEQLTDFKKLLDDEFTKLKATPSSVPQNDHLMRQFREAVWNVHHAGEPMPGDDDEDIVMTSTQCPLLNMTCPLSGKPVTELADPVRRHVYEKSVILHYIVNNPNANCPVAGCRGKLQNSKVICDAMLKFEIEEMRSLNKQSNRAEVIEDFTEDVDED

SEQ ID NO: 78876 - DNA, 4617 bp, Arabidopsis thaliana
  misc_feature (1)..(4617): Ceres Seq. ID no. 12646476
  misc_feature: MA Experiment ID: 20000184 Result: Down-regulated in Transcription
  misc_feature: MA Experiment 20000184 PARAMETER Experiment Name: At_Shoots__P Parameter: Age (day) Value: 7
  misc_feature: MA Experiment 20000184 PARAMETER Experiment Name: At_Shoots__P Parameter: Tissue Value: Shoots vs. Whole Plant
  misc_feature: MA Experiment ID: 20000794 Result: Up-regulated in Transcription
  misc_feature: MA Experiment 20000794 PARAMETER Experiment Name: At_Petals_P Parameter: Age (day) Value: 23-25 days
  misc_feature: MA Experiment 20000794 PARAMETER Experiment Name: At_Petals_P Parameter: Plant Line Value: WS
  misc_feature: MA Experiment 20000794 PARAMETER Experiment Name: At_Petals_P Parameter: Tissue Value: Petals vs. Whole plant
  misc_feature: MA Experiment ID: 20001451 Result: Down-regulated in Transcription
  misc_feature: MA Experiment 20001451 PARAMETER Experiment Name: At_Far-red-induction_P Parameter: Age (day) Value: 7
  misc_feature: MA Experiment 20001451 PARAMETER Experiment Name: At_Far-red-induction_P Parameter: Light Value: Far-red vs. White
  misc_feature: MA Experiment 20001451 PARAMETER Experiment Name: At_Far-red-induction_P Parameter: Organism Value: A. thaliana
  misc_feature: MA Experiment 20001451 PARAMETER Experiment Name: At_Far-red-induction_P Parameter: Plant Line Value: Columbia
  misc_feature: MA Experiment 20001451 PARAMETER Experiment Name: At_Far-red-induction_P Parameter: Timepoint (hr) Value: 24
  misc_feature: MA Experiment 20001451 PARAMETER Experiment Name: At_Far-red-induction_P Parameter: Tissue Value: Whole Plant
  misc_feature: MA Experiment ID: 20001905 Result: Up-regulated in Transcription
  misc_feature: MA Experiment 20001905 PARAMETER Experiment Name: At_Drought_Reproduction_P Parameter: Age (day) Value: 40
  misc_feature: MA Experiment 20001905 PARAMETER Experiment Name: At_Drought_Reproduction_P Parameter: Organism Value: A. thaliana
  misc_feature: MA Experiment 20001905 PARAMETER Experiment Name: At_Drought_Reproduction_P Parameter: Plant Line Value: WS
  misc_feature: MA Experiment 20001905 PARAMETER Experiment Name: At_Drought_Reproduction_P Parameter: Timepoint (day) Value: 10
  misc_feature: MA Experiment 20001905 PARAMETER Experiment Name: At_Drought_Reproduction_P Parameter: Tissue Value: Rosettes
  misc_feature: MA Experiment 20001905 PARAMETER Experiment Name: At_Drought_Reproduction_P Parameter: Treatment Value: Drought vs. No Drought
atggactggatacacaaatctactccttttatggaaccttcgaatttggcaaaactggttcaaggaaatgttcctcttcagccacatgacagccattcttcgctaactgatctagatatggaccttagagaagtctatttcctgattttacattttctttctattggcccctgcgaacgaacctttggccacttgagagacgaaattttggaaaaagggcttttaccccgtagatatcattcctggtggtcaagaagtggcatttatagcgggcgtgctgatgatgatggcatctccctccccttgagttatgataatttgatagagaggtatcctcatatcgaaaaggatcacttggtgaagcttctcaaacaactaattttaaacccgtctttcccttcacacatgagagttgaaggaaatgctcctaatgctgctgatgttccaacactattgggatctggcaccttttcacttgtggatcgtagtaacaatatagagtctcagaaagctaggcatgttgcgtcatacttacgctggccgcatatgcatgccgatcaagtgcgtggcctaagtctcagagaaattggaggaggtttcaggaaacaccaccgtgctccgtccattctttcagcatgtcatgctattgcaaaaccatcaacaatggttcaaaagatgcaaaatataaagaagctcagaggacatcgtaatgctgtctactgcgctatatttgatcgttctggaagatatgttatcactggctccgatgaccggcttgtcaaaatttggtcaatggaaactgcgctttgcttggctagctgccgtgggcatgaaggtgacattacagacttggccgttagttcaaacaatgctttggttgcttcagcttcaaacgattttgtgattcgagtgtggcggttgcctgatggaatgccaatttctgtattgcggggacacactggagctgttaccgcaattgcattcagtcccagacaggcgtctgtttaccaacttttatcgtcatcagatgatggaacctgtcgtatctgggatgctaggtattctcagtggctcccacgaatctatgttccaagtccttcagatgctaacactggctcattggaagtttctctcttaggcgaaagcacttttacatcttccaacacaggatccacgagcaatgcatctcagagtcatcaaatattatgttgtgcatacaatgctaatggaaccattttcgtcacgggtagctctgacagcaatgcaagggtttggagtgcctcaaaacctaacttggatgatgctgaacagccgactcatgagctggatgttctacggggccatgagaatgatgtcaactatgtgcaatttagtggttgtgctgtggctccaaaatcttcaacagctgatgctctgaaggaagatagctacccaaagtttaagaattcctggttttgtcatgacaatatagtaacctgctctcgcgatggtagtgcaattatatggactccaagatcacgtaaattccatgggaaatctggacgctggatgaaaggatatcatctgaaggttccacctcctccacttcctccacaacctcctcgaggaggcccacgtcaaaggtttcttccaacaccacggggtgttaatatgattatatggagcttggataatcgttttgtacttgccgctatcatggattgcaggatttgtgtttggaatgctgctgatggtagcttagtgcattgtttaactggtcacagtgaatcgtcttatgtcttggatgtccatcctttcaatcctcggattgctatgagcgctggctatgatgggaaaacaatcatctgggatatatgggagggtataccaatcaaagtgtacgaaatcgggagatttaagttggttgatggaaagttttcacaagatgggacatctattgtgctttcagatgatgttggccagatatattttctaaacacaggacaaggagagtctcaaaagaatgcaaaatacgaccagttcttccttggtgattatcgtcctcttattcgagataccaatggacatgttcttgatcaggagacgcagctacttcctcatcggaggaaccttcaggatcttctttgtgattcaagtatgattccgtatccagaacctgaccagacaatgtttcagcaacgcagacttggtgcattaggagttgaatggcgtccttcctcgataaagttttctgttggccctgattttagtttaggtcaagattatataatgcctcctttggctgatctggatagactgattgagccattgcctgagtttatagatgctatgtactgggaaccagaacacgaagttctgagtgacgacaatgattcagagtataatgctgaagtttcctctgatggggctagggcaagcccatgttccaactcttcaaatgaacttgagtgcagctccgaggacagtgacgttgaaaatattcacgaaagtagctatcattggaaaagaagaagaaaacatcctaaggtcaacgtctctacttcatctggaagacgtgataagaggattttggatgagaatgatagctcgaattctggaattaagagaaccaagaaccgaagaattgtcgtgaaggcttcaaaaagaaaacattctgatgtcaaagcatcacggccgcagagagcagcagctcaaaatgctcgatccttgctttctaaaatttctggaagctcttcggatgaagttgatgatgataatgattcatccaacagtgaatctgatagaagcatacccactttgcgacagttggacaaaccatctcagatgctggaatctctttcaaatgacaaacagaagaaaagattgattgtaaagatctctgttaagaagccagcagagtctatgggaagcaagggagatgtgataaatcaggctgatttagagcaactatcttccaaacctttggaggagaatcacagagtgattggtatatattccagagaacccgggtcaagttctgtagatgcaaaaggtgattcagggtgtcagagtattccctactctatgaatacgccacagagagaaaaggccgataatcagttgataagatcttcagatcaagaccagaatatgtgcaagtggagggaagagattcctgtttgtgaacctaccgaattaactgcgcctgagaacatagaagaagcccaaccattttatggggatgaagctgatgagattcttccaaagaaagttcgacgactgaggttaaagcttcggcatcccaacagtcctcgaaaactagaacctgatgaggtggcagatgatttggcagatggtggagatgggtttgcatccatagctccctctttcatgaatccgattatggattctgaacctgtgatagatagcgttagagattcttctgcacataactttgagtttggagaagctacagctgatgtgatacgtaggaaaagatccataagaagtgaatctagtacaagaaatagcgcattacgcataaggttgggctctggatctgtagacaaaataaagaaacaagggattccttccacaagcgtgtatgatgatgcatcacttgaagaatggccttctacctcaaaagctgggtccaggtctagatctgcaagcgtcagcaaaccaagtcttcatactgggataaggttgaatagtgtctcaggaaaaatctcatggttattgttgtctgaacacgaggaaggctgccgttatatacctcagctaggggatgaagttatttacttcaagcagggtcatcaagagttccttaaaactaaagaattaaatgacagggaccgatcaaggtaccttccccgaaacctaggagcagtagagatttgcaaagtcgagaaacttaactatgatacatatcctggttctggagatagctgctgcaaaatgaccctcagggttctggattcttcttcatcacatgcctcccgcaaagagtttcaactgacacttcctgagctcattaatttccctgattttattgtggagaagactcgatacgacgctgcaattcaaacaaactggaaaattggtaatgagtgccgtgtgtggtggagagacgcaaccggtgaaggcggggcttggtgggaaggtaggattgagtcttcacaagtaaaatccactgacttcccagagagtccatgggaaagatacagagttgtctatgaaacaggggaaacgagtcttcacagcccgtgggagtttgacaatcccgagtttccctgggaaaaatctaccatcgaagatgagagaagagagaaactgctttcattatttgctggactagtaaaatcaatcagcaagcatcaggatagttacgggatccaaaagctaaacgaagcagctcaaaagatggatttctgcaataggttcccggttccattataccctgagctgattcacgaaagactagagaatcagtactacagaagtattgaatcgtttaaacacgacgtggatgcaatgctctcaaatgcggagttgtatttcgttagaagtgcacatatgctttcgaagataaagcgactgcgagataaattgacaaaaacgttaagaaagctgatctga

SEQ ID NO: 78877 - protein, 1538 aa, Arabidopsis thaliana
  peptide (1)..(1538): Ceres Seq. ID no. 12646477
  misc_feature (311)..(425): Pfam Name: WD domain, G-beta repeat Pfam Description: WD domain, G-beta repeat
  misc_feature (1)..(425): Homolog of NCBI NO: 20196881 NR Description: hypothetical protein [Arabidopsis thaliana]
  misc_feature (568)..(693): Homolog of NCBI NO: 20196881 NR Description: hypothetical protein [Arabidopsis thaliana]
  misc_feature (275)..(484): Homolog of NCBI NO: 9759426 NR Description: WD-40 repeat protein-like [Arabidopsis thaliana]
  misc_feature (424)..(484): Homolog of NCBI NO: 15239884 NR Description: WD-40 repeat protein-like; protein id:
  misc_feature (92)..(425): Homolog of NCBI NO: 34867725 NR Description: similar to WDR9 protein, form A [Rattus
  misc_feature (474)..(731): Homolog of NCBI NO: 34867725 NR Description: similar to WDR9 protein, form A [Rattus
  misc_feature (1250)..(1439): Homolog of NCBI NO: 34867725 NR Description: similar to WDR9 protein, form A [Rattus
  misc_feature (44)..(126): Homolog of NCBI NO: 34867725 NR Description: similar to WDR9 protein, form A [Rattus
  misc_feature (447)..(1068): Homolog of NCBI NO: 17976802 NR Description: WD repeat domain 11 protein [Mus musculus]
  misc_feature (92)..(360): Homolog of NCBI NO: 17976802 NR Description: WD repeat domain 11 protein [Mus musculus]
MDWIHKSTPFMEPSNLAKLVQGNVPLQPHDSHSSLTDLDMDLREVYFLILHFLSIGPCERTFGHLRDEILEKGLLPRRYHSWWSRSGIYSGRADDDGISLPLSYDNLIERYPHIEKDHLVKLLKQLILNPSFPSHMRVEGNAPNAADVPTLLGSGTFSLVDRSNNIESQKARHVASYLRWPHMHADQVRGLSLREIGGGFRKHHRAPSILSACHAIAKPSTMVQKMQNIKKLRGHRNAVYCAIFDRSGRYVITGSDDRLVKIWSMETALCLASCRGHEGDITDLAVSSNNALVASASNDFVIRVWRLPDGMPISVLRGHTGAVTAIAFSPRQASVYQLLSSSDDGTCRIWDARYSQWLPRIYVPSPSDANTGSLEVSLLGESTFTSSNTGSTSNASQSHQILCCAYNANGTIFVTGSSDSNARVWSASKPNLDDAEQPTHELDVLRGHENDVNYVQFSGCAVAPKSSTADALKEDSYPKFKNSWFCHDNIVTCSRDGSAIIWTPRSRKFHGKSGRWMKGYHLKVPPPPLPPQPPRGGPRQRFLPTPRGVNMIIWSLDNRFVLAAIMDCRICVWNAADGSLVHCLTGHSESSYVLDVHPFNPRIAMSAGYDGKTIIWDIWEGIPIKVYEIGRFKLVDGKFSQDGTSIVLSDDVGQIYFLNTGQGESQKNAKYDQFFLGDYRPLIRDTNGHVLDQETQLLPHRRNLQDLLCDSSMIPYPEPDQTMFQQRRLGALGVEWRPSSIKFSVGPDFSLGQDYIMPPLADLDRLIEPLPEFIDAMYWEPEHEVLSDDNDSEYNAEVSSDGARASPCSNSSNELECSSEDSDVENIHESSYHWKRRRKHPKVNVSTSSGRRDKRILDENDSSNSGIKRTKNRRIVVKASKRKHSDVKASRPQRAAAQNARSLLSKISGSSSDEVDDDNDSSNSESDRSIPTLRQLDKPSQMLESLSNDKQKKRLIVKISVKKPAESMGSKGDVINQADLEQLSSKPLEENHRVIGIYSREPGSSSVDAKGDSGCQSIPYSMNTPQREKADNQLIRSSDQDQNMCKWREEIPVCEPTELTAPENIEEAQPFYGDEADEILPKKVRRLRLKLRHPNSPRKLEPDEVADDLADGGDGFASIAPSFMNPIMDSEPVIDSVRDSSAHNFEFGEATADVIRRKRSIRSESSTRNSALRIRLGSGSVDKIKKQGIPSTSVYDDASLEEWPSTSKAGSRSRSASVSKPSLHTGIRLNSVSGKISWLLLSEHEEGCRYIPQLGDEVIYFKQGHQEFLKTKELNDRDRSRYLPRNLGAVEICKVEKLNYDTYPGSGDSCCKMTLRVLDSSSSHASRKEFQLTLPELINFPDFIVEKTRYDAAIQTNWKIGNECRVWWRDATGEGGAWWEGRIESSQVKSTDFPESPWERYRVVYETGETSLHSPWEFDNPEFPWEKSTIEDERREKLLSLFAGLVKSISKHQDSYGIQKLNEAAQKMDFCNRFPVPLYPELIHERLENQYYRSIESFKHDVDAMLSNAELYFVRSAHMLSKIKRLRDKLTKTLRKLI

SEQ ID NO: 78878 - protein, 1528 aa, Arabidopsis thaliana
  peptide (1)..(1528): Ceres Seq. ID no. 12646478
  misc_feature (301)..(415): Pfam Name: WD domain, G-beta repeat Pfam Description: WD domain, G-beta repeat
  misc_feature (1)..(415): Homolog of NCBI NO: 20196881 NR Description: hypothetical protein [Arabidopsis thaliana]
  misc_feature (558)..(683): Homolog of NCBI NO: 20196881 NR Description: hypothetical protein [Arabidopsis thaliana]
  misc_feature (265)..(474): Homolog of NCBI NO: 9759426 NR Description: WD-40 repeat protein-like [Arabidopsis thaliana]
  misc_feature (414)..(474): Homolog of NCBI NO: 15239884 NR Description: WD-40 repeat protein-like; protein id:
  misc_feature (82)..(415): Homolog of NCBI NO: 34867725 NR Description: similar to WDR9 protein, form A [Rattus
  misc_feature (464)..(721): Homolog of NCBI NO: 34867725 NR Description: similar to WDR9 protein, form A [Rattus
  misc_feature (1240)..(1429): Homolog of NCBI NO: 34867725 NR Description: similar to WDR9 protein, form A [Rattus
  misc_feature (34)..(116): Homolog of NCBI NO: 34867725 NR Description: similar to WDR9 protein, form A [Rattus
  misc_feature (437)..(1058): Homolog of NCBI NO: 17976802 NR Description: WD repeat domain 11 protein [Mus musculus]
  misc_feature (82)..(350): Homolog of NCBI NO: 17976802 NR Description: WD repeat domain 11 protein [Mus musculus]
MEPSNLAKLVQGNVPLQPHDSHSSLTDLDMDLREVYFLILHFLSIGPCERTFGHLRDEILEKGLLPRRYHSWWSRSGIYSGRADDDGISLPLSYDNLIERYPHIEKDHLVKLLKQLILNPSFPSHMRVEGNAPNAADVPTLLGSGTFSLVDRSNNIESQKARHVASYLRWPHMHADQVRGLSLREIGGGFRKHHRAPSILSACHAIAKPSTMVQKMQNIKKLRGHRNAVYCAIFDRSGRYVITGSDDRLVKIWSMETALCLASCRGHEGDITDLAVSSNNALVASASNDFVIRVWRLPDGMPISVLRGHTGAVTAIAFSPRQASVYQLLSSSDDGTCRIWDARYSQWLPRIYVPSPSDANTGSLEVSLLGESTFTSSNTGSTSNASQSHQILCCAYNANGTIFVTGSSDSNARVWSASKPNLDDAEQPTHELDVLRGHENDVNYVQFSGCAVAPKSSTADALKEDSYPKFKNSWFCHDNIVTCSRDGSAIIWTPRSRKFHGKSGRWMKGYHLKVPPPPLPPQPPRGGPRQRFLPTPRGVNMIIWSLDNRFVLAAIMDCRICVWNAADGSLVHCLTGHSESSYVLDVHPFNPRIAMSAGYDGKTIIWDIWEGIPIKVYEIGRFKLVDGKFSQDGTSIVLSDDVGQIYFLNTGQGESQKNAKYDQFFLGDYRPLIRDTNGHVLDQETQLLPHRRNLQDLLCDSSMIPYPEPDQTMFQQRRLGALGVEWRPSSIKFSVGPDFSLGQDYIMPPLADLDRLIEPLPEFIDAMYWEPEHEVLSDDNDSEYNAEVSSDGARASPCSNSSNELECSSEDSDVENIHESSYHWKRRRKHPKVNVSTSSGRRDKRILDENDSSNSGIKRTKNRRIVVKASKRKHSDVKASRPQRAAAQNARSLLSKISGSSSDEVDDDNDSSNSESDRSIPTLRQLDKPSQMLESLSNDKQKKRLIVKISVKKPAESMGSKGDVINQADLEQLSSKPLEENHRVIGIYSREPGSSSVDAKGDSGCQSIPYSMNTPQREKADNQLIRSSDQDQNMCKWREEIPVCEPTELTAPENIEEAQPFYGDEADEILPKKVRRLRLKLRHPNSPRKLEPDEVADDLADGGDGFASIAPSFMNPIMDSEPVIDSVRDSSAHNFEFGEATADVIRRKRSIRSESSTRNSALRIRLGSGSVDKIKKQGIPSTSVYDDASLEEWPSTSKAGSRSRSASVSKPSLHTGIRLNSVSGKISWLLLSEHEEGCRYIPQLGDEVIYFKQGHQEFLKTKELNDRDRSRYLPRNLGAVEICKVEKLNYDTYPGSGDSCCKMTLRVLDSSSSHASRKEFQLTLPELINFPDFIVEKTRYDAAIQTNWKIGNECRVWWRDATGEGGAWWEGRIESSQVKSTDFPESPWERYRVVYETGETSLHSPWEFDNPEFPWEKSTIEDERREKLLSLFAGLVKSISKHQDSYGIQKLNEAAQKMDFCNRFPVPLYPELIHERLENQYYRSIESFKHDVDAMLSNAELYFVRSAHMLSKIKRLRDKLTKTLRKLI

SEQ ID NO: 78879 - protein, 1499 aa, Arabidopsis thaliana
  peptide (1)..(1499): Ceres Seq. ID no. 12646479
  misc_feature (272)..(386): Pfam Name: WD domain, G-beta repeat Pfam Description: WD domain, G-beta repeat
  misc_feature (1)..(386): Homolog of NCBI NO: 20196881 NR Description: hypothetical protein [Arabidopsis thaliana]
  misc_feature (529)..(654): Homolog of NCBI NO: 20196881 NR Description: hypothetical protein [Arabidopsis thaliana]
  misc_feature (236)..(445): Homolog of NCBI NO: 9759426 NR Description: WD-40 repeat protein-like [Arabidopsis thaliana]
  misc_feature (385)..(445): Homolog of NCBI NO: 15239884 NR Description: WD-40 repeat protein-like; protein id:
  misc_feature (53)..(386): Homolog of NCBI NO: 34867725 NR Description: similar to WDR9 protein, form A [Rattus
  misc_feature (435)..(692): Homolog of NCBI NO: 34867725 NR Description: similar to WDR9 protein, form A [Rattus
  misc_feature (1211)..(1400): Homolog of NCBI NO: 34867725 NR Description: similar to WDR9 protein, form A [Rattus
  misc_feature (5)..(87): Homolog of NCBI NO: 34867725 NR Description: similar to WDR9 protein, form A [Rattus
  misc_feature (408)..(1029): Homolog of NCBI NO: 17976802 NR Description: WD repeat domain 11 protein [Mus musculus]
  misc_feature (53)..(321): Homolog of NCBI NO: 17976802 NR Description: WD repeat domain 11 protein [Mus musculus]
MDLREVYFLILHFLSIGPCERTFGHLRDEILEKGLLPRRYHSWWSRSGIYSGRADDDGISLPLSYDNLIERYPHIEKDHLVKLLKQLILNPSFPSHMRVEGNAPNAADVPTLLGSGTFSLVDRSNNIESQKARHVASYLRWPHMHADQVRGLSLREIGGGFRKHHRAPSILSACHAIAKPSTMVQKMQNIKKLRGHRNAVYCAIFDRSGRYVITGSDDRLVKIWSMETALCLASCRGHEGDITDLAVSSNNALVASASNDFVIRVWRLPDGMPISVLRGHTGAVTAIAFSPRQASVYQLLSSSDDGTCRIWDARYSQWLPRIYVPSPSDANTGSLEVSLLGESTFTSSNTGSTSNASQSHQILCCAYNANGTIFVTGSSDSNARVWSASKPNLDDAEQPTHELDVLRGHENDVNYVQFSGCAVAPKSSTADALKEDSYPKFKNSWFCHDNIVTCSRDGSAIIWTPRSRKFHGKSGRWMKGYHLKVPPPPLPPQPPRGGPRQRFLPTPRGVNMIIWSLDNRFVLAAIMDCRICVWNAADGSLVHCLTGHSESSYVLDVHPFNPRIAMSAGYDGKTIIWDIWEGIPIKVYEIGRFKLVDGKFSQDGTSIVLSDDVGQIYFLNTGQGESQKNAKYDQFFLGDYRPLIRDTNGHVLDQETQLLPHRRNLQDLLCDSSMIPYPEPDQTMFQQRRLGALGVEWRPSSIKFSVGPDFSLGQDYIMPPLADLDRLIEPLPEFIDAMYWEPEHEVLSDDNDSEYNAEVSSDGARASPCSNSSNELECSSEDSDVENIHESSYHWKRRRKHPKVNVSTSSGRRDKRILDENDSSNSGIKRTKNRRIVVKASKRKHSDVKASRPQRAAAQNARSLLSKISGSSSDEVDDDNDSSNSESDRSIPTLRQLDKPSQMLESLSNDKQKKRLIVKISVKKPAESMGSKGDVINQADLEQLSSKPLEENHRVIGIYSREPGSSSVDAKGDSGCQSIPYSMNTPQREKADNQLIRSSDQDQNMCKWREEIPVCEPTELTAPENIEEAQPFYGDEADEILPKKVRRLRLKLRHPNSPRKLEPDEVADDLADGGDGFASIAPSFMNPIMDSEPVIDSVRDSSAHNFEFGEATADVIRRKRSIRSESSTRNSALRIRLGSGSVDKIKKQGIPSTSVYDDASLEEWPSTSKAGSRSRSASVSKPSLHTGIRLNSVSGKISWLLLSEHEEGCRYIPQLGDEVIYFKQGHQEFLKTKELNDRDRSRYLPRNLGAVEICKVEKLNYDTYPGSGDSCCKMTLRVLDSSSSHASRKEFQLTLPELINFPDFIVEKTRYDAAIQTNWKIGNECRVWWRDATGEGGAWWEGRIESSQVKSTDFPESPWERYRVVYETGETSLHSPWEFDNPEFPWEKSTIEDERREKLLSLFAGLVKSISKHQDSYGIQKLNEAAQKMDFCNRFPVPLYPELIHERLENQYYRSIESFKHDVDAMLSNAELYFVRSAHMLSKIKRLRDKLTKTLRKLI

SEQ ID NO: 78880 - DNA, 918 bp, Arabidopsis thaliana
  misc_feature (1)..(918): Ceres Seq. ID no. 12646597
  misc_feature: MA Experiment ID: 20000306 Result: Up-regulated in Transcription
  misc_feature: MA Experiment 20000306 PARAMETER Experiment Name: At_Germinating_Seeds_Sub_P Parameter: Age (hr) Value: 6 vs. 0
  misc_feature: MA Experiment 20000306 PARAMETER Experiment Name: At_Germinating_Seeds_Sub_P Parameter: Organism Value: A. thaliana
  misc_feature: MA Experiment 20000306 PARAMETER Experiment Name: At_Germinating_Seeds_Sub_P Parameter: Plant Line Value: WS
  misc_feature: MA Experiment 20000306 PARAMETER Experiment Name: At_Germinating_Seeds_Sub_P Parameter: Tissue Value: Germinating Seeds
  misc_feature: MA Experiment ID: 20000307 Result: Up-regulated in Transcription
  misc_feature: MA Experiment 20000307 PARAMETER Experiment Name: At_Germinating_Seeds_Sub_P Parameter: Age (hr) Value: 24 vs. 0
  misc_feature: MA Experiment 20000307 PARAMETER Experiment Name: At_Germinating_Seeds_Sub_P Parameter: Organism Value: A. thaliana
  misc_feature: MA Experiment 20000307 PARAMETER Experiment Name: At_Germinating_Seeds_Sub_P Parameter: Plant Line Value: WS
  misc_feature: MA Experiment 20000307 PARAMETER Experiment Name: At_Germinating_Seeds_Sub_P Parameter: Tissue Value: Germinating Seeds
  misc_feature: MA Experiment ID: 20000315 Result: Down-regulated in Transcription
  misc_feature: MA Experiment 20000315 PARAMETER Experiment Name: At_14day_Shoots-Roots_Sub_P Parameter: Age (day) Value: 14
  misc_feature: MA Experiment 20000315 PARAMETER Experiment Name: At_14day_Shoots-Roots_Sub_P Parameter: Organism Value: A. thaliana
  misc_feature: MA Experiment 20000315 PARAMETER Experiment Name: At_14day_Shoots-Roots_Sub_P Parameter: Plant Line Value: WS
  misc_feature: MA Experiment 20000315 PARAMETER Experiment Name: At_14day_Shoots-Roots_Sub_P Parameter: Tissue Value: Shoots vs. Whole Plant
  misc_feature: MA Experiment ID: 20000329 Result: Down-regulated in Transcription
  misc_feature: MA Experiment 20000329 PARAMETER Experiment Name: At_4deg_Cold_Sub_P Parameter: Age (day) Value: 14
  misc_feature: MA Experiment 20000329 PARAMETER Experiment Name: At_4deg_Cold_Sub_P Parameter: Organism Value: A. thaliana
  misc_feature: MA Experiment 20000329 PARAMETER Experiment Name: At_4deg_Cold_Sub_P Parameter: Plant Line Value: WS
  misc_feature: MA Experiment 20000329 PARAMETER Experiment Name: At_4deg_Cold_Sub_P Parameter: Temperature (deg C) Value: 4 vs. 22
  misc_feature: MA Experiment 20000329 PARAMETER Experiment Name: At_4deg_Cold_Sub_P Parameter: Timepoint (hr) Value: 6
  misc_feature: MA Experiment 20000329 PARAMETER Experiment Name: At_4deg_Cold_Sub_P Parameter: Tissue Value: Aerial
  misc_feature: MA Experiment ID: 20000355 Result: Down-regulated in Transcription
  misc_feature: MA Experiment 20000355 PARAMETER Experiment Name: At_Siliques_Sub_P Parameter: Age (day) Value: 21
  misc_feature: MA Experiment 20000355 PARAMETER Experiment Name: At_Siliques_Sub_P Parameter: Organism Value: A. thaliana
  misc_feature: MA Experiment 20000355 PARAMETER Experiment Name: At_Siliques_Sub_P Parameter: Plant Line Value: WS
  misc_feature: MA Experiment 20000355 PARAMETER Experiment Name: At_Siliques_Sub_P Parameter: Tissue Value: Less Than 5mm Siliques vs. Whole Plant
  misc_feature: MA Experiment ID: 20000440 Result: Down-regulated in Transcription
  misc_feature: MA Experiment 20000440 PARAMETER Experiment Name: At_Closed-Flower__Sub_P Parameter: Tissue Value: Closed Flower vs. Whole Plant
  misc_feature: MA Experiment ID: 20001807 Result: Down-regulated in Transcription
  misc_feature: MA Experiment 20001807 PARAMETER Experiment Name: At_50mM_NH4NO3_L-to-H_Sub_P Parameter: Timepoint (hr) Value: 6
  misc_feature: MA Experiment 20001807 PARAMETER Experiment Name: At_50mM_NH4NO3_L-to-H_Sub_P Parameter: Tissue Value: Leaf
  misc_feature: MA Experiment 20001807 PARAMETER Experiment Name: At_50mM_NH4NO3_L-to-H_Sub_P Parameter: Treatment Value: 50mM NH4NO3 vs 100mM Mannitol
atggcttcagtggctcctaaaatcgctaaagatgtaactgaactaatagggaacactccattagtgtatctaaacaaagtagctaaagattgtgttggtcatgttgctgctaagcttgagatgatggaaccatgttctagcgtcaaagacaggattggttatagtatgattgctgatgcagaagctaaaggacttattaaaccgggagagagtgtgttgattgagccaacaagtgggaacactggagttggtttagcatttactgcagctgcaaagggctataagcttgttataacaatgccagcttcaatgagtatagagagaagaatcattctcttagcttttggagctgagttgattcttactgatccggctaaaggtatgaaaggtgctgttgcaaaggcggaggagattttggcgaaaacacctaatggttatatgcttcaacagtttgagaatcctgctaatccaaagatccattatgagactactggacctgagatatggaaaggtgctgggaagtatctcaaggaacagaacacaaacataaagctgtatggtgtcgagcctgttgaaagccctattctgtccggtggaaagccaggtccccacaaaattcaaggtataggtgctggttttattccaggcattttggatgttgatcttatagatgaagttgttcaggtttcaagtgaagaatccattgacatggcaaggcttcttgctagggaagagggtctgttagtgggaatctcatctggagcagcagctactgcagcaatcaaacttgcaaagaggccagaaaatgctgggaagcttatagtggcggtgtttccgagtttcggggaaagatatctatcgactgtactgtttgatgcagcaaggaaagaggcagagactatgacctttgagccctga

SEQ ID NO: 78881 - protein, 305 aa, Arabidopsis thaliana
  peptide (1)..(305): Ceres Seq. ID no. 12646598
  misc_feature (12)..(281): Pfam Name: Pyridoxal-phosphate dependent enzyme Pfam Description: Pyridoxal-phosphate dependent enzyme
  misc_feature (1)..(305): Homolog of NCBI NO: 11994278 NR Description: cysteine synthase; O-acetylserine(thiol) lyase
  misc_feature (4)..(174): Homolog of NCBI NO: 11131561 NR Description: Cysteine synthase (O-acetylserine sulfhydrylase)
  misc_feature (164)..(304): Homolog of NCBI NO: 11131561 NR Description: Cysteine synthase (O-acetylserine sulfhydrylase)
  misc_feature (8)..(174): Homolog of NCBI NO: 11131564 NR Description: Cysteine synthase (O-acetylserine sulfhydrylase)
  misc_feature (164)..(304): Homolog of NCBI NO: 11131564 NR Description: Cysteine synthase (O-acetylserine sulfhydrylase)
  misc_feature (4)..(173): Homolog of NCBI NO: 15233613 NR Description: cytosolic O-acetylserine(thiol)lyase (EC protein id: At4g14880.1, supported by cDNA: gi_15027936
  misc_feature (164)..(304): Homolog of NCBI NO: 15233613 NR Description: cytosolic O-acetylserine(thiol)lyase (EC protein id: At4g14880.1, supported by cDNA: gi_15027936
  misc_feature (4)..(173): Homolog of NCBI NO: 804950 NR Description: cysteine synthase [Arabidopsis thaliana]
  misc_feature (164)..(304): Homolog of NCBI NO: 804950 NR Description: cysteine synthase [Arabidopsis thaliana]
  misc_feature (4)..(173): Homolog of NCBI NO: 15027937 NR Description: putative cytosolic O-acetylserine(thiol)lyase
MASVAPKIAKDVTELIGNTPLVYLNKVAKDCVGHVAAKLEMMEPCSSVKDRIGYSMIADAEAKGLIKPGESVLIEPTSGNTGVGLAFTAAAKGYKLVITMPASMSIERRIILLAFGAELILTDPAKGMKGAVAKAEEILAKTPNGYMLQQFENPANPKIHYETTGPEIWKGAGKYLKEQNTNIKLYGVEPVESPILSGGKPGPHKIQGIGAGFIPGILDVDLIDEVVQVSSEESIDMARLLAREEGLLVGISSGAAATAAIKLAKRPENAGKLIVAVFPSFGERYLSTVLFDAARKEAETMTFEP

SEQ ID NO: 78882 - protein, 265 aa, Arabidopsis thaliana
  peptide (1)..(265): Ceres Seq. ID no. 12646599
  misc_feature (1)..(241): Pfam Name: Pyridoxal-phosphate dependent enzyme Pfam Description: Pyridoxal-phosphate dependent enzyme
  misc_feature (1)..(265): Homolog of NCBI NO: 11994278 NR Description: cysteine synthase; O-acetylserine(thiol) lyase
  misc_feature (1)..(134): Homolog of NCBI NO: 11131561 NR Description: Cysteine synthase (O-acetylserine sulfhydrylase)
  misc_feature (124)..(264): Homolog of NCBI NO: 11131561 NR Description: Cysteine synthase (O-acetylserine sulfhydrylase)
  misc_feature (1)..(134): Homolog of NCBI NO: 11131564 NR Description: Cysteine synthase (O-acetylserine sulfhydrylase)
  misc_feature (124)..(264): Homolog of NCBI NO: 11131564 NR Description: Cysteine synthase (O-acetylserine sulfhydrylase)
  misc_feature (1)..(133): Homolog of NCBI NO: 15233613 NR Description: cytosolic O-acetylserine(thiol)lyase (EC protein id: At4g14880.1, supported by cDNA: gi_15027936
  misc_feature (124)..(264): Homolog of NCBI NO: 15233613 NR Description: cytosolic O-acetylserine(thiol)lyase (EC protein id: At4g14880.1, supported by cDNA: gi_15027936
  misc_feature (1)..(133): Homolog of NCBI NO: 804950 NR Description: cysteine synthase [Arabidopsis thaliana]
  misc_feature (124)..(264): Homolog of NCBI NO: 804950 NR Description: cysteine synthase [Arabidopsis thaliana]
  misc_feature (1)..(133): Homolog of NCBI NO: 15027937 NR Description: putative cytosolic O-acetylserine(thiol)lyase
MMEPCSSVKDRIGYSMIADAEAKGLIKPGESVLIEPTSGNTGVGLAFTAAAKGYKLVITMPASMSIERRIILLAFGAELILTDPAKGMKGAVAKAEEILAKTPNGYMLQQFENPANPKIHYETTGPEIWKGAGKYLKEQNTNIKLYGVEPVESPILSGGKPGPHKIQGIGAGFIPGILDVDLIDEVVQVSSEESIDMARLLAREEGLLVGISSGAAATAAIKLAKRPENAGKLIVAVFPSFGERYLSTVLFDAARKEAETMTFEP

SEQ ID NO: 78883 - protein, 264 aa, Arabidopsis thaliana
  peptide (1)..(264): Ceres Seq. ID no. 12646600
  misc_feature (1)..(240): Pfam Name: Pyridoxal-phosphate dependent enzyme Pfam Description: Pyridoxal-phosphate dependent enzyme
  misc_feature (1)..(264): Homolog of NCBI NO: 11994278 NR Description: cysteine synthase; O-acetylserine(thiol) lyase
  misc_feature (1)..(133): Homolog of NCBI NO: 11131561 NR Description: Cysteine synthase (O-acetylserine sulfhydrylase)
  misc_feature (123)..(263): Homolog of NCBI NO: 11131561 NR Description: Cysteine synthase (O-acetylserine sulfhydrylase)
  misc_feature (1)..(133): Homolog of NCBI NO: 11131564 NR Description: Cysteine synthase (O-acetylserine sulfhydrylase)
  misc_feature (123)..(263): Homolog of NCBI NO: 11131564 NR Description: Cysteine synthase (O-acetylserine sulfhydrylase)
  misc_feature (1)..(132): Homolog of NCBI NO: 15233613 NR Description: cytosolic O-acetylserine(thiol)lyase (EC protein id: At4g14880.1, supported by cDNA: gi_15027936
  misc_feature (123)..(263): Homolog of NCBI NO: 15233613 NR Description: cytosolic O-acetylserine(thiol)lyase (EC protein id: At4g14880.1, supported by cDNA: gi_15027936
  misc_feature (1)..(132): Homolog of NCBI NO: 804950 NR Description: cysteine synthase [Arabidopsis thaliana]
  misc_feature (123)..(263): Homolog of NCBI NO: 804950 NR Description: cysteine synthase [Arabidopsis thaliana]
  misc_feature (1)..(132): Homolog of NCBI NO: 15027937 NR Description: putative cytosolic O-acetylserine(thiol)lyase
MEPCSSVKDRIGYSMIADAEAKGLIKPGESVLIEPTSGNTGVGLAFTAAAKGYKLVITMPASMSIERRIILLAFGAELILTDPAKGMKGAVAKAEEILAKTPNGYMLQQFENPANPKIHYETTGPEIWKGAGKYLKEQNTNIKLYGVEPVESPILSGGKPGPHKIQGIGAGFIPGILDVDLIDEVVQVSSEESIDMARLLAREEGLLVGISSGAAATAAIKLAKRPENAGKLIVAVFPSFGERYLSTVLFDAARKEAETMTFEP

SEQ ID NO: 78884 - DNA, 787 bp, Arabidopsis thaliana
  misc_feature (1)..(787): Ceres Seq. ID no. 12646618
  misc_feature: MA Experiment ID: 108434 Result: Down-regulated in Transcription
  misc_feature: MA Experiment 108434 PARAMETER Experiment Name: At_Root_Tips_cDNA_P Parameter: Tissue Value: Root Tips
  misc_feature: MA Experiment ID: 108462 Result: Up-regulated in Transcription
  misc_feature: MA Experiment 108462 PARAMETER Experiment Name: At_Germinating_Seeds_cDNA_P Parameter: Age (day) Value: 2 vs. 0
  misc_feature: MA Experiment 108462 PARAMETER Experiment Name: At_Germinating_Seeds_cDNA_P Parameter: Tissue Value: Germinating Seeds
  misc_feature: MA Experiment ID: 108463 Result: Up-regulated in Transcription
  misc_feature: MA Experiment 108463 PARAMETER Experiment Name: At_Germinating_Seeds_cDNA_P Parameter: Age (day) Value: 3 vs. 0
  misc_feature: MA Experiment 108463 PARAMETER Experiment Name: At_Germinating_Seeds_cDNA_P Parameter: Tissue Value: Germinating Seeds
  misc_feature: MA Experiment ID: 108464 Result: Up-regulated in Transcription
  misc_feature: MA Experiment 108464 PARAMETER Experiment Name: At_Germinating_Seeds_cDNA_P Parameter: Age (day) Value: 4 vs. 0
  misc_feature: MA Experiment 108464 PARAMETER Experiment Name: At_Germinating_Seeds_cDNA_P Parameter: Tissue Value: Germinating Seeds
  misc_feature: MA Experiment ID: 108469 Result: Up-regulated in Transcription
  misc_feature: MA Experiment ID: 108501 Result: Down-regulated in Transcription
  misc_feature: MA Experiment 108501 PARAMETER Experiment Name: At_ap2_floral_buds_cDNA_P Parameter: Plant Line Value: ap2 (Ler.)
  misc_feature: MA Experiment 108501 PARAMETER Experiment Name: At_ap2_floral_buds_cDNA_P Parameter: Tissue Value: Closed Flower
  misc_feature: MA Experiment ID: 108561 Result: Up-regulated in Transcription
  misc_feature: MA Experiment 108561 PARAMETER Experiment Name: At_100uM_ABA_cDNA_P Parameter: Timepoint (hr) Value: 6
  misc_feature: MA Experiment 108561 PARAMETER Experiment Name: At_100uM_ABA_cDNA_P Parameter: Tissue Value: Aerial
  misc_feature: MA Experiment 108561 PARAMETER Experiment Name: At_100uM_ABA_cDNA_P Parameter: Treatment Value: 100uM ABA vs. No Treatment
  misc_feature: MA Experiment ID: 108573 Result: Up-regulated in Transcription
  misc_feature: MA Experiment 108573 PARAMETER Experiment Name: At_Drought_cDNA_P Parameter: Timepoint (hr) Value: 6
  misc_feature: MA Experiment 108573 PARAMETER Experiment Name: At_Drought_cDNA_P Parameter: Tissue Value: Aerial
  misc_feature: MA Experiment 108573 PARAMETER Experiment Name: At_Drought_cDNA_P Parameter: Treatment Value: Drought vs. No Drought
  misc_feature: MA Experiment ID: 108585 Result: Up-regulated in Transcription
  misc_feature: MA Experiment 108585 PARAMETER Experiment Name: At_5mM_NaNP_cDNA_P Parameter: Timepoint (hr) Value: 6
  misc_feature: MA Experiment 108585 PARAMETER Experiment Name: At_5mM_NaNP_cDNA_P Parameter: Tissue Value: Aerial
  misc_feature: MA Experiment 108585 PARAMETER Experiment Name: At_5mM_NaNP_cDNA_P Parameter: Treatment Value: null
  misc_feature: MA Experiment ID: 108605 Result: Up-regulated in Transcription
  misc_feature: MA Experiment 108605 PARAMETER Experiment Name: At_100uM_ABA_cDNA_P Parameter: Timepoint (hr) Value: 6
  misc_feature: MA Experiment 108605 PARAMETER Experiment Name: At_100uM_ABA_cDNA_P Parameter: Tissue Value: Aerial
  misc_feature: MA Experiment 108605 PARAMETER Experiment Name: At_100uM_ABA_cDNA_P Parameter: Treatment Value: 100uM ABA vs. No Treatment
  misc_feature: MA Experiment ID: 108607 Result: Up-regulated in Transcription
  misc_feature: MA Experiment 108607 PARAMETER Experiment Name: At_100uM_ABA_cDNA_P Parameter: Timepoint (hr) Value: 4
  misc_feature: MA Experiment 108607 PARAMETER Experiment Name: At_100uM_ABA_cDNA_P Parameter: Tissue Value: Aerial
  misc_feature: MA Experiment 108607 PARAMETER Experiment Name: At_100uM_ABA_cDNA_P Parameter: Treatment Value: 100uM ABA vs. No Treatment
  misc_feature: MA Experiment ID: 108608 Result: Up-regulated in Transcription
  misc_feature: MA Experiment 108608 PARAMETER Experiment Name: At_100uM_ABA_cDNA_P Parameter: Timepoint (hr) Value: 1
  misc_feature: MA Experiment 108608 PARAMETER Experiment Name: At_100uM_ABA_cDNA_P Parameter: Tissue Value: Aerial
  misc_feature: MA Experiment 108608 PARAMETER Experiment Name: At_100uM_ABA_cDNA_P Parameter: Treatment Value: 100uM ABA vs. No Treatment
  misc_feature: MA Experiment ID: 108668 Result: Up-regulated in Transcription
  misc_feature: MA Experiment 108668 PARAMETER Experiment Name: At_2mM_SA_cDNA_P Parameter: Plant Line Value: WS
  misc_feature: MA Experiment 108668 PARAMETER Experiment Name: At_2mM_SA_cDNA_P Parameter: Timepoint (hr) Value: 6
  misc_feature: MA Experiment 108668 PARAMETER Experiment Name: At_2mM_SA_cDNA_P Parameter: Treatment Value: 2mM SA vs. No Treatment
  misc_feature: MA Experiment ID: 20000069 Result: Up-regulated in Transcription
  misc_feature: MA Experiment 20000069 PARAMETER Experiment Name: At_100uM_ABA_Mutants_cDNA_P Parameter: Plant Line Value: CS23
  misc_feature: MA Experiment 20000069 PARAMETER Experiment Name: At_100uM_ABA_Mutants_cDNA_P Parameter: Timepoint (hr) Value: 6
  misc_feature: MA Experiment 20000069 PARAMETER Experiment Name: At_100uM_ABA_Mutants_cDNA_P Parameter: Tissue Value: Aerial
  misc_feature: MA Experiment 20000069 PARAMETER Experiment Name: At_100uM_ABA_Mutants_cDNA_P Parameter: Treatment Value: 100uM ABA vs. No Treatment
  misc_feature: MA Experiment ID: 20000070 Result: Up-regulated in Transcription
  misc_feature: MA Experiment 20000070 PARAMETER Experiment Name: At_100uM_ABA_Mutants_cDNA_P Parameter: Plant Line Value: CS24
  misc_feature: MA Experiment 20000070 PARAMETER Experiment Name: At_100uM_ABA_Mutants_cDNA_P Parameter: Timepoint (hr) Value: 6
  misc_feature: MA Experiment 20000070 PARAMETER Experiment Name: At_100uM_ABA_Mutants_cDNA_P Parameter: Tissue Value: Aerial
  misc_feature: MA Experiment 20000070 PARAMETER Experiment Name: At_100uM_ABA_Mutants_cDNA_P Parameter: Treatment Value: 100uM ABA vs. No Treatment
  misc_feature: MA Experiment ID: 20000071 Result: Up-regulated in Transcription
  misc_feature: MA Experiment 20000071 PARAMETER Experiment Name: At_100uM_ABA_Mutants_cDNA_P Parameter: Plant Line Value: CS8104
  misc_feature: MA Experiment 20000071 PARAMETER Experiment Name: At_100uM_ABA_Mutants_cDNA_P Parameter: Timepoint (hr) Value: 6
  misc_feature: MA Experiment 20000071 PARAMETER Experiment Name: At_100uM_ABA_Mutants_cDNA_P Parameter: Tissue Value: Aerial
  misc_feature: MA Experiment 20000071 PARAMETER Experiment Name: At_100uM_ABA_Mutants_cDNA_P Parameter: Treatment Value: 100uM ABA vs. No Treatment
  misc_feature: MA Experiment ID: 20000072 Result: Up-regulated in Transcription
  misc_feature: MA Experiment 20000072 PARAMETER Experiment Name: At_100uM_ABA_Mutants_cDNA_P Parameter: Plant Line Value: CS8105
  misc_feature: MA Experiment 20000072 PARAMETER Experiment Name: At_100uM_ABA_Mutants_cDNA_P Parameter: Timepoint (hr) Value: 6
  misc_feature: MA Experiment 20000072 PARAMETER Experiment Name: At_100uM_ABA_Mutants_cDNA_P Parameter: Tissue Value: Aerial
  misc_feature: MA Experiment 20000072 PARAMETER Experiment Name: At_100uM_ABA_Mutants_cDNA_P Parameter: Treatment Value: 100uM ABA vs. No Treatment
  misc_feature: MA Experiment ID: 20000086 Result: Up-regulated in Transcription
  misc_feature: MA Experiment 20000086 PARAMETER Experiment Name: At_100uM_ABA_Mutants_cDNA_P Parameter: Plant Line Value: CS22
  misc_feature: MA Experiment 20000086 PARAMETER Experiment Name: At_100uM_ABA_Mutants_cDNA_P Parameter: Timepoint (hr) Value: 6
  misc_feature: MA Experiment 20000086 PARAMETER Experiment Name: At_100uM_ABA_Mutants_cDNA_P Parameter: Tissue Value: Aerial
  misc_feature: MA Experiment 20000086 PARAMETER Experiment Name: At_100uM_ABA_Mutants_cDNA_P Parameter: Treatment Value: 100uM ABA vs. No Treatment
  misc_feature: MA Experiment ID: 20000087 Result: Up-regulated in Transcription
  misc_feature: MA Experiment 20000087 PARAMETER Experiment Name: At_100uM_ABA_Mutants_cDNA_P Parameter: Plant Line Value: WS
  misc_feature: MA Experiment 20000087 PARAMETER Experiment Name: At_100uM_ABA_Mutants_cDNA_P Parameter: Timepoint (hr) Value: 6
  misc_feature: MA Experiment 20000087 PARAMETER Experiment Name: At_100uM_ABA_Mutants_cDNA_P Parameter: Tissue Value: Aerial
  misc_feature: MA Experiment 20000087 PARAMETER Experiment Name: At_100uM_ABA_Mutants_cDNA_P Parameter: Treatment Value: 100uM ABA vs. No Treatment
  misc_feature: MA Experiment ID: 20000088 Result: Up-regulated in Transcription
  misc_feature: MA Experiment 20000088 PARAMETER Experiment Name: At_100uM_ABA_Mutants_cDNA_P Parameter: Plant Line Value: Landsberg
  misc_feature: MA Experiment 20000088 PARAMETER Experiment Name: At_100uM_ABA_Mutants_cDNA_P Parameter: Timepoint (hr) Value: 6
  misc_feature: MA Experiment 20000088 PARAMETER Experiment Name: At_100uM_ABA_Mutants_cDNA_P Parameter: Tissue Value: Aerial
  misc_feature: MA Experiment 20000088 PARAMETER Experiment Name: At_100uM_ABA_Mutants_cDNA_P Parameter: Treatment Value: 100uM ABA vs. No Treatment
  misc_feature: MA Experiment ID: 20000090 Result: Up-regulated in Transcription
  misc_feature: MA Experiment ID: 20000111 Result: Down-regulated in Transcription
  misc_feature: MA Experiment 20000111 PARAMETER Experiment Name: At_42deg_Heat_cDNA_P Parameter: Temperature (deg C) Value: 42 vs. 22
  misc_feature: MA Experiment 20000111 PARAMETER Experiment Name: At_42deg_Heat_cDNA_P Parameter: Timepoint (hr) Value: 6
  misc_feature: MA Experiment 20000111 PARAMETER Experiment Name: At_42deg_Heat_cDNA_P Parameter: Tissue Value: Aerial
  misc_feature: MA Experiment ID: 20000113 Result: Down-regulated in Transcription
  misc_feature: MA Experiment 20000113 PARAMETER Experiment Name: At_42deg_Heat_cDNA_P Parameter: Temperature (deg C) Value: 42 vs. 22
  misc_feature: MA Experiment 20000113 PARAMETER Experiment Name: At_42deg_Heat_cDNA_P Parameter: Timepoint (hr) Value: 8
  misc_feature: MA Experiment 20000113 PARAMETER Experiment Name: At_42deg_Heat_cDNA_P Parameter: Tissue Value: Aerial
  misc_feature: MA Experiment ID: 20000117 Result: Up-regulated in Transcription
  misc_feature: MA Experiment 20000117 PARAMETER Experiment Name: At_100uM_ABA_Mutants_cDNA_P Parameter: Plant Line Value: Columbia
  misc_feature: MA Experiment 20000117 PARAMETER Experiment Name: At_100uM_ABA_Mutants_cDNA_P Parameter: Timepoint (hr) Value: 6
  misc_feature: MA Experiment 20000117 PARAMETER Experiment Name: At_100uM_ABA_Mutants_cDNA_P Parameter: Tissue Value: Aerial
  misc_feature: MA Experiment 20000117 PARAMETER Experiment Name: At_100uM_ABA_Mutants_cDNA_P Parameter: Treatment Value: 100uM ABA vs. No Treatment
  misc_feature: MA Experiment ID: 20000144 Result: Down-regulated in Transcription
  misc_feature: MA Experiment 20000144 PARAMETER Experiment Name: At_42deg_Heat_cDNA_P Parameter: Temperature (deg C) Value: 42 vs. 22
  misc_feature: MA Experiment 20000144 PARAMETER Experiment Name: At_42deg_Heat_cDNA_P Parameter: Timepoint (hr) Value: 1
  misc_feature: MA Experiment 20000144 PARAMETER Experiment Name: At_42deg_Heat_cDNA_P Parameter: Tissue Value: Aerial
  misc_feature: MA Experiment ID: 20000166 Result: Up-regulated in Transcription
  misc_feature: MA Experiment 20000166 PARAMETER Experiment Name: At_100uM_ABA_P Parameter: Age (day) Value: 14
  misc_feature: MA Experiment 20000166 PARAMETER Experiment Name: At_100uM_ABA_P Parameter: Organism Value: A. thaliana
  misc_feature: MA Experiment 20000166 PARAMETER Experiment Name: At_100uM_ABA_P Parameter: Plant Line Value: WS
  misc_feature: MA Experiment 20000166 PARAMETER Experiment Name: At_100uM_ABA_P Parameter: Timepoint (hr) Value: 1
  misc_feature: MA Experiment 20000166 PARAMETER Experiment Name: At_100uM_ABA_P Parameter: Tissue Value: Aerial
  misc_feature: MA Experiment 20000166 PARAMETER Experiment Name: At_100uM_ABA_P Parameter: Treatment Value: 100uM ABA vs. No Treatment
  misc_feature: MA Experiment ID: 20000169 Result: Up-regulated in Transcription
  misc_feature: MA Experiment 20000169 PARAMETER Experiment Name: At_100uM_ABA_P Parameter: Age (day) Value: 14
  misc_feature: MA Experiment 20000169 PARAMETER Experiment Name: At_100uM_ABA_P Parameter: Organism Value: A. thaliana
  misc_feature: MA Experiment 20000169 PARAMETER Experiment Name: At_100uM_ABA_P Parameter: Plant Line Value: WS
  misc_feature: MA Experiment 20000169 PARAMETER Experiment Name: At_100uM_ABA_P Parameter: Timepoint (hr) Value: 6
  misc_feature: MA Experiment 20000169 PARAMETER Experiment Name: At_100uM_ABA_P Parameter: Tissue Value: Aerial
  misc_feature: MA Experiment 20000169 PARAMETER Experiment Name: At_100uM_ABA_P Parameter: Treatment Value: 100uM ABA vs. No Treatment
  misc_feature: MA Experiment ID: 20000171 Result: Down-regulated in Transcription
  misc_feature: MA Experiment 20000171 PARAMETER Experiment Name: At_42deg_Heat_P Parameter: Age (day) Value: 14
  misc_feature: MA Experiment 20000171 PARAMETER Experiment Name: At_42deg_Heat_P Parameter: Organism Value: A. thaliana
  misc_feature: MA Experiment 20000171 PARAMETER Experiment Name: At_42deg_Heat_P Parameter: Plant Line Value: WS
  misc_feature: MA Experiment 20000171 PARAMETER Experiment Name: At_42deg_Heat_P Parameter: Temperature (deg C) Value: 42 vs. 22
  misc_feature: MA Experiment 20000171 PARAMETER Experiment Name: At_42deg_Heat_P Parameter: Timepoint (hr) Value: 1
  misc_feature: MA Experiment 20000171 PARAMETER Experiment Name: At_42deg_Heat_P Parameter: Tissue Value: Aerial
  misc_feature: MA Experiment ID: 20000173 Result: Down-regulated in Transcription
  misc_feature: MA Experiment 20000173 PARAMETER Experiment Name: At_42deg_Heat_P Parameter: Age (day) Value: 14
  misc_feature: MA Experiment 20000173 PARAMETER Experiment Name: At_42deg_Heat_P Parameter: Organism Value: A. thaliana
  misc_feature: MA Experiment 20000173 PARAMETER Experiment Name: At_42deg_Heat_P Parameter: Plant Line Value: WS
  misc_feature: MA Experiment 20000173 PARAMETER Experiment Name: At_42deg_Heat_P Parameter: Temperature (deg C) Value: 42 vs. 22
  misc_feature: MA Experiment 20000173 PARAMETER Experiment Name: At_42deg_Heat_P Parameter: Timepoint (hr) Value: 6
  misc_feature: MA Experiment 20000173 PARAMETER Experiment Name: At_42deg_Heat_P Parameter: Tissue Value: Aerial
  misc_feature: MA Experiment ID: 20000182 Result: Up-regulated in Transcription
  misc_feature: MA Experiment 20000182 PARAMETER Experiment Name: At_2mM_SA_P Parameter: Age (day) Value: 14
  misc_feature: MA Experiment 20000182 PARAMETER Experiment Name: At_2mM_SA_P Parameter: Organism Value: A. thaliana
  misc_feature: MA Experiment 20000182 PARAMETER Experiment Name: At_2mM_SA_P Parameter: Plant Line Value: WS
  misc_feature: MA Experiment 20000182 PARAMETER Experiment Name: At_2mM_SA_P Parameter: Timepoint (hr) Value: 6
  misc_feature: MA Experiment 20000182 PARAMETER Experiment Name: At_2mM_SA_P Parameter: Tissue Value: Aerial
  misc_feature: MA Experiment 20000182 PARAMETER Experiment Name: At_2mM_SA_P Parameter: Treatment Value: 2mM SA vs. No Treatment
  misc_feature: MA Experiment ID: 20000185 Result: Up-regulated in Transcription
  misc_feature: MA Experiment 20000185 PARAMETER Experiment Name: At_Roots__P Parameter: Age (day) Value: 7 vs. 21
  misc_feature: MA Experiment 20000185 PARAMETER Experiment Name: At_Roots__P Parameter: Organism Value: A. thaliana
  misc_feature: MA Experiment 20000185 PARAMETER Experiment Name: At_Roots__P Parameter: Tissue Value: Roots vs. Whole Plant
  misc_feature: MA Experiment ID: 20000234 Result: Down-regulated in Transcription
  misc_feature: MA Experiment 20000234 PARAMETER Experiment Name: At_Siliques_P Parameter: Age (day) Value: 21
  misc_feature: MA Experiment 20000234 PARAMETER Experiment Name: At_Siliques_P Parameter: Organism Value: A. thaliana
  misc_feature: MA Experiment 20000234 PARAMETER Experiment Name: At_Siliques_P Parameter: Plant Line Value: WS
  misc_feature: MA Experiment 20000234 PARAMETER Experiment Name: At_Siliques_P Parameter: Tissue Value: Less Than 5mm Siliques vs. Whole Plant
  misc_feature: MA Experiment ID: 20000235 Result: Down-regulated in Transcription
  misc_feature: MA Experiment 20000235 PARAMETER Experiment Name: At_Siliques_P Parameter: Age (day) Value: 21
  misc_feature: MA Experiment 20000235 PARAMETER Experiment Name: At_Siliques_P Parameter: Organism Value: A. thaliana
  misc_feature: MA Experiment 20000235 PARAMETER Experiment Name: At_Siliques_P Parameter: Plant Line Value: WS
  misc_feature: MA Experiment 20000235 PARAMETER Experiment Name: At_Siliques_P Parameter: Tissue Value: 5-10mm Siliques vs. Whole Plant
  misc_feature: MA Experiment ID: 20000264 Result: Down-regulated in Transcription
  misc_feature: MA Experiment 20000264 PARAMETER Experiment Name: At_Open_Flower_P Parameter: Age (day) Value: 21
  misc_feature: MA Experiment 20000264 PARAMETER Experiment Name: At_Open_Flower_P Parameter: Plant Line Value: WS
  misc_feature: MA Experiment 20000264 PARAMETER Experiment Name: At_Open_Flower_P Parameter: Tissue Value: Open Flower vs. Whole Plant
  misc_feature: MA Experiment ID: 20000265 Result: Down-regulated in Transcription
  misc_feature: MA Experiment 20000265 PARAMETER Experiment Name: At_Open_Flower_P Parameter: Age (day) Value: 21
  misc_feature: MA Experiment 20000265 PARAMETER Experiment Name: At_Open_Flower_P Parameter: Plant Line Value: WS
  misc_feature: MA Experiment 20000265 PARAMETER Experiment Name: At_Open_Flower_P Parameter: Tissue Value: Closed Flower vs. Whole Plant
  misc_feature: MA Experiment ID: 20000267 Result: Up-regulated in Transcription
  misc_feature: MA Experiment 20000267 PARAMETER Experiment Name: At_Drought_P Parameter: Age (day) Value: 7
  misc_feature: MA Experiment 20000267 PARAMETER Experiment Name: At_Drought_P Parameter: Organism Value: A. thaliana
  misc_feature: MA Experiment 20000267 PARAMETER Experiment Name: At_Drought_P Parameter: Plant Line Value: WS
  misc_feature: MA Experiment 20000267 PARAMETER Experiment Name: At_Drought_P Parameter: Timepoint (hr) Value: 6
  misc_feature: MA Experiment 20000267 PARAMETER Experiment Name: At_Drought_P Parameter: Tissue Value: Whole Plant
  misc_feature: MA Experiment 20000267 PARAMETER Experiment Name: At_Drought_P Parameter: Treatment Value: Drought vs. No Drought
  misc_feature: MA Experiment ID: 20000286 Result: Down-regulated in Transcription
  misc_feature: MA Experiment 20000286 PARAMETER Experiment Name: At_Open_Flower_P Parameter: Age (day) Value: 21
  misc_feature: MA Experiment 20000286 PARAMETER Experiment Name: At_Open_Flower_P Parameter: Plant Line Value: WS
  misc_feature: MA Experiment 20000286 PARAMETER Experiment Name: At_Open_Flower_P Parameter: Tissue Value: Half Open vs. Whole Plant
  misc_feature: MA Experiment ID: 20000436 Result: Up-regulated in Transcription
  misc_feature: MA Experiment 20000436 PARAMETER Experiment Name: At_Drought_P Parameter: Age (day) Value: 7
  misc_feature: MA Experiment 20000436 PARAMETER Experiment Name: At_Drought_P Parameter: Organism Value: A. thaliana
  misc_feature: MA Experiment 20000436 PARAMETER Experiment Name: At_Drought_P Parameter: Plant Line Value: WS
  misc_feature: MA Experiment 20000436 PARAMETER Experiment Name: At_Drought_P Parameter: Timepoint (hr) Value: 12
  misc_feature: MA Experiment 20000436 PARAMETER Experiment Name: At_Drought_P Parameter: Tissue Value: Whole Plant
  misc_feature: MA Experiment 20000436 PARAMETER Experiment Name: At_Drought_P Parameter: Treatment Value: Drought vs. No Drought
  misc_feature: MA Experiment ID: 20000438 Result: Down-regulated in Transcription
  misc_feature: MA Experiment 20000438 PARAMETER Experiment Name: At_Shoots__P Parameter: Age (day) Value: 14
  misc_feature: MA Experiment 20000438 PARAMETER Experiment Name: At_Shoots__P Parameter: Tissue Value: Shoots vs. Whole Plant
  misc_feature: MA Experiment ID: 20000439 Result: Up-regulated in Transcription
  misc_feature: MA Experiment 20000439 PARAMETER Experiment Name: At_Roots__P Parameter: Age (day) Value: 14 vs. 21
  misc_feature: MA Experiment 20000439 PARAMETER Experiment Name: At_Roots__P Parameter: Organism Value: A. thaliana
  misc_feature: MA Experiment 20000439 PARAMETER Experiment Name: At_Roots__P Parameter: Tissue Value: Roots vs. Whole Plant
  misc_feature: MA Experiment ID: 20000453 Result: Up-regulated in Transcription
  misc_feature: MA Experiment 20000453 PARAMETER Experiment Name: At_100uM_ABA_P Parameter: Age (day) Value: 15
  misc_feature: MA Experiment 20000453 PARAMETER Experiment Name: At_100uM_ABA_P Parameter: Organism Value: A. thaliana
  misc_feature: MA Experiment 20000453 PARAMETER Experiment Name: At_100uM_ABA_P Parameter: Plant Line Value: WS
  misc_feature: MA Experiment 20000453 PARAMETER Experiment Name: At_100uM_ABA_P Parameter: Timepoint (hr) Value: 24
  misc_feature: MA Experiment 20000453 PARAMETER Experiment Name: At_100uM_ABA_P Parameter: Tissue Value: Aerial
  misc_feature: MA Experiment 20000453 PARAMETER Experiment Name: At_100uM_ABA_P Parameter: Treatment Value: 100uM ABA vs. No Treatment
  misc_feature: MA Experiment ID: 20000455 Result: Up-regulated in Transcription
  misc_feature: MA Experiment 20000455 PARAMETER Experiment Name: At_100uM_ABA_P Parameter: Age (day) Value: 16
  misc_feature: MA Experiment 20000455 PARAMETER Experiment Name: At_100uM_ABA_P Parameter: Organism Value: A. thaliana
  misc_feature: MA Experiment 20000455 PARAMETER Experiment Name: At_100uM_ABA_P Parameter: Plant Line Value: WS
  misc_feature: MA Experiment 20000455 PARAMETER Experiment Name: At_100uM_ABA_P Parameter: Timepoint (hr) Value: 48
  misc_feature: MA Experiment 20000455 PARAMETER Experiment Name: At_100uM_ABA_P Parameter: Tissue Value: Aerial
  misc_feature: MA Experiment 20000455 PARAMETER Experiment Name: At_100uM_ABA_P Parameter: Treatment Value: 100uM ABA vs. No Treatment
  misc_feature: MA Experiment ID: 20000506 Result: Up-regulated in Transcription
  misc_feature: MA Experiment 20000506 PARAMETER Experiment Name: At_Wounding_P Parameter: Organism Value: A. thaliana
  misc_feature: MA Experiment 20000506 PARAMETER Experiment Name: At_Wounding_P Parameter: Plant Line Value: WS
  misc_feature: MA Experiment 20000506 PARAMETER Experiment Name: At_Wounding_P Parameter: Timepoint (hr) Value: 6
  misc_feature: MA Experiment 20000506 PARAMETER Experiment Name: At_Wounding_P Parameter: Tissue Value: Aerial
  misc_feature: MA Experiment 20000506 PARAMETER Experiment Name: At_Wounding_P Parameter: Treatment Value: Wounding vs. No Wounding
  misc_feature: MA Experiment ID: 20000527 Result: Down-regulated in Transcription
  misc_feature: MA Experiment 20000527 PARAMETER Experiment Name: At_10percent_PEG_P Parameter: Age (day) Value: 20
  misc_feature: MA Experiment 20000527 PARAMETER Experiment Name: At_10percent_PEG_P Parameter: Organism Value: A. thaliana
  misc_feature: MA Experiment 20000527 PARAMETER Experiment Name: At_10percent_PEG_P Parameter: Plant Line Value: WS
  misc_feature: MA Experiment 20000527 PARAMETER Experiment Name: At_10percent_PEG_P Parameter: Timepoint (day) Value: 20
  misc_feature: MA Experiment 20000527 PARAMETER Experiment Name: At_10percent_PEG_P Parameter: Tissue Value: Whole Plant
  misc_feature: MA Experiment 20000527 PARAMETER Experiment Name: At_10percent_PEG_P Parameter: Treatment Value: 10percent PEG vs. No Treatment
  misc_feature: MA Experiment ID: 20000709 Result: Down-regulated in Transcription
  misc_feature: MA Experiment 20000709 PARAMETER Experiment Name: At_15mM_NH4NO3_L-to-H_P Parameter: Age (hr) Value: 14
  misc_feature: MA Experiment 20000709 PARAMETER Experiment Name: At_15mM_NH4NO3_L-to-H_P Parameter: Organism Value: A. thaliana
  misc_feature: MA Experiment 20000709 PARAMETER Experiment Name: At_15mM_NH4NO3_L-to-H_P Parameter: Plant Line Value: WS
  misc_feature: MA Experiment 20000709 PARAMETER Experiment Name: At_15mM_NH4NO3_L-to-H_P Parameter: Timepoint (hr) Value: 4
  misc_feature: MA Experiment 20000709 PARAMETER Experiment Name: At_15mM_NH4NO3_L-to-H_P Parameter: Tissue Value: Aerial
  misc_feature: MA Experiment 20000709 PARAMETER Experiment Name: At_15mM_NH4NO3_L-to-H_P Parameter: Treatment Value: 15mM NH4NO3 vs. 30mM Mannitol
  misc_feature: MA Experiment ID: 20000794 Result: Down-regulated in Transcription
  misc_feature: MA Experiment 20000794 PARAMETER Experiment Name: At_Petals_P Parameter: Age (day) Value: 23-25 days
  misc_feature: MA Experiment 20000794 PARAMETER Experiment Name: At_Petals_P Parameter: Plant Line Value: WS
  misc_feature: MA Experiment 20000794 PARAMETER Experiment Name: At_Petals_P Parameter: Tissue Value: Petals vs. Whole plant
  misc_feature: MA Experiment ID: 20001450 Result: Down-regulated in Transcription
  misc_feature: MA Experiment 20001450 PARAMETER Experiment Name: At_Far-red-induction_P Parameter: Age (day) Value: 7
  misc_feature: MA Experiment 20001450 PARAMETER Experiment Name: At_Far-red-induction_P Parameter: Light Value: Far-red vs. White
  misc_feature: MA Experiment 20001450 PARAMETER Experiment Name: At_Far-red-induction_P Parameter: Organism Value: A. thaliana
  misc_feature: MA Experiment 20001450 PARAMETER Experiment Name: At_Far-red-induction_P Parameter: Plant Line Value: Columbia
  misc_feature: MA Experiment 20001450 PARAMETER Experiment Name: At_Far-red-induction_P Parameter: Timepoint (hr) Value: 8
  misc_feature: MA Experiment 20001450 PARAMETER Experiment Name: At_Far-red-induction_P Parameter: Tissue Value: Whole Plant
  misc_feature: MA Experiment ID: 20001554 Result: Up-regulated in Transcription
  misc_feature: MA Experiment 20001554 PARAMETER Experiment Name: At_Drought_Soil_Dry_P Parameter: Age (day) Value: 21
  misc_feature: MA Experiment 20001554 PARAMETER Experiment Name: At_Drought_Soil_Dry_P Parameter: Organism Value: A. thaliana
  misc_feature: MA Experiment 20001554 PARAMETER Experiment Name: At_Drought_Soil_Dry_P Parameter: Plant Line Value: WS
  misc_feature: MA Experiment 20001554 PARAMETER Experiment Name: At_Drought_Soil_Dry_P Parameter: Post Timepoint (hr) Value: None
  misc_feature: MA Experiment 20001554 PARAMETER Experiment Name: At_Drought_Soil_Dry_P Parameter: Post-Treatment Value: None
  misc_feature: MA Experiment 20001554 PARAMETER Experiment Name: At_Drought_Soil_Dry_P Parameter: Timepoint (day) Value: 7
  misc_feature: MA Experiment 20001554 PARAMETER Experiment Name: At_Drought_Soil_Dry_P Parameter: Treatment Value: Drought vs. No Drought
  misc_feature: MA Experiment ID: 20001761 Result: Down-regulated in Transcription
  misc_feature: MA Experiment 20001761 PARAMETER Experiment Name: At_50mM_NH4NO3_L-to-H_P Parameter: Timepoint (hr) Value: 4
  misc_feature: MA Experiment 20001761 PARAMETER Experiment Name: At_50mM_NH4NO3_L-to-H_P Parameter: Tissue Value: Siliques
  misc_feature: MA Experiment 20001761 PARAMETER Experiment Name: At_50mM_NH4NO3_L-to-H_P Parameter: Treatment Value: 50mM NH4NO3 vs 100mM Mannitol
  misc_feature: MA Experiment ID: 20001773 Result: Down-regulated in Transcription
  misc_feature: MA Experiment 20001773 PARAMETER Experiment Name: At_Far-red-enriched-adult_P Parameter: Age (day) Value: 30
  misc_feature: MA Experiment 20001773 PARAMETER Experiment Name: At_Far-red-enriched-adult_P Parameter: Light Value: Far-red enriched vs. White
  misc_feature: MA Experiment 20001773 PARAMETER Experiment Name: At_Far-red-enriched-adult_P Parameter: Organism Value: A. thaliana
  misc_feature: MA Experiment 20001773 PARAMETER Experiment Name: At_Far-red-enriched-adult_P Parameter: Plant Line Value: Columbia
  misc_feature: MA Experiment 20001773 PARAMETER Experiment Name: At_Far-red-enriched-adult_P Parameter: Timepoint (hr) Value: 48
  misc_feature: MA Experiment 20001773 PARAMETER Experiment Name: At_Far-red-enriched-adult_P Parameter: Tissue Value: Aerial
  misc_feature: MA Experiment ID: 20001904 Result: Up-regulated in Transcription
  misc_feature: MA Experiment 20001904 PARAMETER Experiment Name: At_Drought_Reproduction_P Parameter: Age (day) Value: 37
  misc_feature: MA Experiment 20001904 PARAMETER Experiment Name: At_Drought_Reproduction_P Parameter: Organism Value: A. thaliana
  misc_feature: MA Experiment 20001904 PARAMETER Experiment Name: At_Drought_Reproduction_P Parameter: Plant Line Value: WS
  misc_feature: MA Experiment 20001904 PARAMETER Experiment Name: At_Drought_Reproduction_P Parameter: Timepoint (day) Value: 7
  misc_feature: MA Experiment 20001904 PARAMETER Experiment Name: At_Drought_Reproduction_P Parameter: Tissue Value: Rosettes
  misc_feature: MA Experiment 20001904 PARAMETER Experiment Name: At_Drought_Reproduction_P Parameter: Treatment Value: Drought vs. No Drought
  misc_feature: MA Experiment ID: 20001905 Result: Up-regulated in Transcription
  misc_feature: MA Experiment 20001905 PARAMETER Experiment Name: At_Drought_Reproduction_P Parameter: Age (day) Value: 40
  misc_feature: MA Experiment 20001905 PARAMETER Experiment Name: At_Drought_Reproduction_P Parameter: Organism Value: A. thaliana
  misc_feature: MA Experiment 20001905 PARAMETER Experiment Name: At_Drought_Reproduction_P Parameter: Plant Line Value: WS
  misc_feature: MA Experiment 20001905 PARAMETER Experiment Name: At_Drought_Reproduction_P Parameter: Timepoint (day) Value: 10
  misc_feature: MA Experiment 20001905 PARAMETER Experiment Name: At_Drought_Reproduction_P Parameter: Tissue Value: Rosettes
  misc_feature: MA Experiment 20001905 PARAMETER Experiment Name: At_Drought_Reproduction_P Parameter: Treatment Value: Drought vs. No Drought
  misc_feature: MA Experiment ID: 20001906 Result: Up-regulated in Transcription
  misc_feature: MA Experiment 20001906 PARAMETER Experiment Name: At_Drought_Reproduction_P Parameter: Age (day) Value: 35
  misc_feature: MA Experiment 20001906 PARAMETER Experiment Name: At_Drought_Reproduction_P Parameter: Organism Value: A. thaliana
  misc_feature: MA Experiment 20001906 PARAMETER Experiment Name: At_Drought_Reproduction_P Parameter: Plant Line Value: WS
  misc_feature: MA Experiment 20001906 PARAMETER Experiment Name: At_Drought_Reproduction_P Parameter: Timepoint (day) Value: 5
  misc_feature: MA Experiment 20001906 PARAMETER Experiment Name: At_Drought_Reproduction_P Parameter: Tissue Value: Siliques
  misc_feature: MA Experiment 20001906 PARAMETER Experiment Name: At_Drought_Reproduction_P Parameter: Treatment Value: Drought vs. No Drought
  misc_feature: MA Experiment ID: 20001908 Result: Up-regulated in Transcription
  misc_feature: MA Experiment 20001908 PARAMETER Experiment Name: At_Drought_Reproduction_P Parameter: Age (day) Value: 40
  misc_feature: MA Experiment 20001908 PARAMETER Experiment Name: At_Drought_Reproduction_P Parameter: Organism Value: A. thaliana
  misc_feature: MA Experiment 20001908 PARAMETER Experiment Name: At_Drought_Reproduction_P Parameter: Plant Line Value: WS
  misc_feature: MA Experiment 20001908 PARAMETER Experiment Name: At_Drought_Reproduction_P Parameter: Timepoint (day) Value: 10
  misc_feature: MA Experiment 20001908 PARAMETER Experiment Name: At_Drought_Reproduction_P Parameter: Tissue Value: Siliques
  misc_feature: MA Experiment 20001908 PARAMETER Experiment Name: At_Drought_Reproduction_P Parameter: Treatment Value: Drought vs. No Drought
  misc_feature: MA Experiment ID: 20001910 Result: Up-regulated in Transcription
  misc_feature: MA Experiment 20001910 PARAMETER Experiment Name: At_Drought_Reproduction_P Parameter: Age (day) Value: 37
  misc_feature: MA Experiment 20001910 PARAMETER Experiment Name: At_Drought_Reproduction_P Parameter: Organism Value: A. thaliana
  misc_feature: MA Experiment 20001910 PARAMETER Experiment Name: At_Drought_Reproduction_P Parameter: Plant Line Value: WS
  misc_feature: MA Experiment 20001910 PARAMETER Experiment Name: At_Drought_Reproduction_P Parameter: Timepoint (day) Value: 7
  misc_feature: MA Experiment 20001910 PARAMETER Experiment Name: At_Drought_Reproduction_P Parameter: Tissue Value: Flowers
  misc_feature: MA Experiment 20001910 PARAMETER Experiment Name: At_Drought_Reproduction_P Parameter: Treatment Value: Drought vs. No Drought
  misc_feature: MA Experiment ID: 20001911 Result: Up-regulated in Transcription
  misc_feature: MA Experiment 20001911 PARAMETER Experiment Name: At_Drought_Reproduction_P Parameter: Age (day) Value: 40
  misc_feature: MA Experiment 20001911 PARAMETER Experiment Name: At_Drought_Reproduction_P Parameter: Organism Value: A. thaliana
  misc_feature: MA Experiment 20001911 PARAMETER Experiment Name: At_Drought_Reproduction_P Parameter: Plant Line Value: WS
  misc_feature: MA Experiment 20001911 PARAMETER Experiment Name: At_Drought_Reproduction_P Parameter: Timepoint (day) Value: 10
  misc_feature: MA Experiment 20001911 PARAMETER Experiment Name: At_Drought_Reproduction_P Parameter: Tissue Value: Flowers
  misc_feature: MA Experiment 20001911 PARAMETER Experiment Name: At_Drought_Reproduction_P Parameter: Treatment Value: Drought vs. No Drought
aaatcaaacataacaaaaaccaacaaaacaaactcaaaaggattcttcttcaaacacaacatcttcaagaaaacatgaaaatggaaatgggtttagtgttccttacagtttttatggctgtgatgtcttctacaatggtctctgctcagtcaagctgcacaaacgcgttgattagcatgtcgccgtgtctcaactacataactggaaactctacctctcctaatcagcaatgctgtaatcagttgagtagagtagtccagtcttctcctgactgtttgtgtcaagtccttaacggtggaggctctcagcttgggatcaatgttaaccaaacacaagctcttggtctgcctagggcttgtaatgttcagactcctcctgtcagtcgctgtaataccggtggtggtggtggtggttctacttctgactctcctgcagaatcaccaaactcttcaggaccaggtaatggatcgaaaaccgtaccagtaggagaaggagacggacccccatcgtctgatggaagctctatcaagttctcatttcctcttattgccttcttctccgcggtttcctacatggcaatcttctgagttactattttcccatacgcttttgtgccactcagattgcattctttatttgtccctatttattcacatttcgttgtgattttgtgtgatgtattttatgctctgtaaatccctactctccgggtgatattgctttgttgtaccaacggagagcattttggatctctttaccttttataataaacattactttccagaac

SEQ ID NO: 78885 - protein, 194 aa, Arabidopsis thaliana; identical to SEQ ID NO: 30839
  peptide (1)..(194): Ceres Seq. ID no. 12646619
  misc_feature (52)..(129): Pfam Name: Protease inhibitor/seed storage/LTP family Pfam Description: Protease inhibitor/seed storage/LTP family
  misc_feature (25)..(194): Homolog of NCBI NO: 18403453 NR Description: expressed protein; protein id: At3g22600.1, by cDNA: 19287., supported by cDNA: gi_15010697, supported by gi_18958061 [Arabidopsis thaliana] >gi|11994292|dbj|BAB01475.1|
  misc_feature (27)..(194): Homolog of NCBI NO: 24417478 NR Description: unknown [Arabidopsis thaliana]
  misc_feature (29)..(194): Homolog of NCBI NO: 21554014 NR Description: unknown [Arabidopsis thaliana]
  misc_feature (25)..(193): Homolog of NCBI NO: 21592722 NR Description: unknown [Arabidopsis thaliana]
  misc_feature (25)..(193): Homolog of NCBI NO: 18414320 NR Description: Expressed protein; protein id: At4g14815.1,
  misc_feature (47)..(193): Homolog of NCBI NO: 28269454 NR Description: putative protease inhibitor [Oryza sativa
  misc_feature (31)..(177): Homolog of NCBI NO: 21592774 NR Description: unknown [Arabidopsis thaliana]
  misc_feature (31)..(177): Homolog of NCBI NO: 18407534 NR Description: expressed protein; protein id: At2g48130.1, by cDNA: 32411., supported by cDNA: gi_17529319 [Arabidopsis >gi|25409096|pir||G84923 hypothetical protein At2g48130
  misc_feature (47)..(167): Homolog of NCBI NO: 25553602 NR Description: OJ1656_E11.34 [Oryza sativa (japonica
  misc_feature (25)..(190): Homolog of NCBI NO: 25553595 NR Description: OJ1656_E11.26 [Oryza sativa (japonica

SEQ ID NO: 78886 - protein, 170 aa, Arabidopsis thaliana; identical to SEQ ID NO: 30840
  peptide (1)..(170): Ceres Seq. ID no. 12646620
  misc_feature (28)..(105): Pfam Name: Protease inhibitor/seed storage/LTP family Pfam Description: Protease inhibitor/seed storage/LTP family
  misc_feature (1)..(170): Homolog of NCBI NO: 18403453 NR Description: expressed protein; protein id: At3g22600.1, by cDNA: 19287., supported by cDNA: gi_15010697, supported by gi_18958061 [Arabidopsis thaliana] >gi|11994292|dbj|BAB01475.1|
  misc_feature (3)..(170): Homolog of NCBI NO: 24417478 NR Description: unknown [Arabidopsis thaliana]
  misc_feature (5)..(170): Homolog of NCBI NO: 21554014 NR Description: unknown [Arabidopsis thaliana]
  misc_feature (1)..(169): Homolog of NCBI NO: 21592722 NR Description: unknown [Arabidopsis thaliana]
  misc_feature (1)..(169): Homolog of NCBI NO: 18414320 NR Description: Expressed protein; protein id: At4g14815.1,
  misc_feature (23)..(169): Homolog of NCBI NO: 28269454 NR Description: putative protease inhibitor [Oryza sativa
  misc_feature (7)..(153): Homolog of NCBI NO: 21592774 NR Description: unknown [Arabidopsis thaliana]
  misc_feature (7)..(153): Homolog of NCBI NO: 18407534 NR Description: expressed protein; protein id: At2g48130.1, by cDNA: 32411., supported by cDNA: gi_17529319 [Arabidopsis >gi|25409096|pir||G84923 hypothetical protein At2g48130
  misc_feature (23)..(143): Homolog of NCBI NO: 25553602 NR Description: OJ1656_E11.34 [Oryza sativa (japonica
  misc_feature (1)..(166): Homolog of NCBI NO: 25553595 NR Description: OJ1656_E11.26 [Oryza sativa (japonica

SEQ ID NO: 78887 - protein, 168 aa, Arabidopsis thaliana; identical to SEQ ID NO: 30841
  peptide (1)..(168): Ceres Seq. ID no. 12646621
  misc_feature (26)..(103): Pfam Name: Protease inhibitor/seed storage/LTP family Pfam Description: Protease inhibitor/seed storage/LTP family
  misc_feature (1)..(168): Homolog of NCBI NO: 18403453 NR Description: expressed protein; protein id: At3g22600.1, by cDNA: 19287., supported by cDNA: gi_15010697, supported by gi_18958061 [Arabidopsis thaliana] >gi|11994292|dbj|BAB01475.1|
  misc_feature (1)..(168): Homolog of NCBI NO: 24417478 NR Description: unknown [Arabidopsis thaliana]
  misc_feature (3)..(168): Homolog of NCBI NO: 21554014 NR Description: unknown [Arabidopsis thaliana]
  misc_feature (1)..(167): Homolog of NCBI NO: 21592722 NR Description: unknown [Arabidopsis thaliana]
  misc_feature (1)..(167): Homolog of NCBI NO: 18414320 NR Description: Expressed protein; protein id: At4g14815.1,
  misc_feature (21)..(167): Homolog of NCBI NO: 28269454 NR Description: putative protease inhibitor [Oryza sativa
  misc_feature (5)..(151): Homolog of NCBI NO: 21592774 NR Description: unknown [Arabidopsis thaliana]
  misc_feature (5)..(151): Homolog of NCBI NO: 18407534 NR Description: expressed protein; protein id: At2g48130.1, by cDNA: 32411., supported by cDNA: gi_17529319 [Arabidopsis >gi|25409096|pir||G84923 hypothetical protein At2g48130
  misc_feature (21)..(141): Homolog of NCBI NO: 25553602 NR Description: OJ1656_E11.34 [Oryza sativa (japonica
  misc_feature (1)..(164): Homolog of NCBI NO: 25553595 NR Description: OJ1656_E11.26 [Oryza sativa (japonica

SEQ ID NO: 78888 - DNA, 1342 bp, Arabidopsis thaliana
  misc_feature (1)..(1342): Ceres Seq. ID no. 12646638
  misc_feature: MA Experiment ID: 20000169 Result: Up-regulated in Transcription
  misc_feature: MA Experiment 20000169 PARAMETER Experiment Name: At_100uM_ABA_P Parameter: Age (day) Value: 14
  misc_feature: MA Experiment 20000169 PARAMETER Experiment Name: At_100uM_ABA_P Parameter: Organism Value: A. thaliana
  misc_feature: MA Experiment 20000169 PARAMETER Experiment Name: At_100uM_ABA_P Parameter: Plant Line Value: WS
  misc_feature: MA Experiment 20000169 PARAMETER Experiment Name: At_100uM_ABA_P Parameter: Timepoint (hr) Value: 6
  misc_feature: MA Experiment 20000169 PARAMETER Experiment Name: At_100uM_ABA_P Parameter: Tissue Value: Aerial
  misc_feature: MA Experiment 20000169 PARAMETER Experiment Name: At_100uM_ABA_P Parameter: Treatment Value: 100uM ABA vs. No Treatment
  misc_feature: MA Experiment ID: 20000171 Result: Down-regulated in Transcription
  misc_feature: MA Experiment 20000171 PARAMETER Experiment Name: At_42deg_Heat_P Parameter: Age (day) Value: 14
  misc_feature: MA Experiment 20000171 PARAMETER Experiment Name: At_42deg_Heat_P Parameter: Organism Value: A. thaliana
  misc_feature: MA Experiment 20000171 PARAMETER Experiment Name: At_42deg_Heat_P Parameter: Plant Line Value: WS
  misc_feature: MA Experiment 20000171 PARAMETER Experiment Name: At_42deg_Heat_P Parameter: Temperature (deg C) Value: 42 vs. 22
  misc_feature: MA Experiment 20000171 PARAMETER Experiment Name: At_42deg_Heat_P Parameter: Timepoint (hr) Value: 1
  misc_feature: MA Experiment 20000171 PARAMETER Experiment Name: At_42deg_Heat_P Parameter: Tissue Value: Aerial
  misc_feature: MA Experiment ID: 20000173 Result: Down-regulated in Transcription
  misc_feature: MA Experiment 20000173 PARAMETER Experiment Name: At_42deg_Heat_P Parameter: Age (day) Value: 14
  misc_feature: MA Experiment 20000173 PARAMETER Experiment Name: At_42deg_Heat_P Parameter: Organism Value: A. thaliana
  misc_feature: MA Experiment 20000173 PARAMETER Experiment Name: At_42deg_Heat_P Parameter: Plant Line Value: WS
  misc_feature: MA Experiment 20000173 PARAMETER Experiment Name: At_42deg_Heat_P Parameter: Temperature (deg C) Value: 42 vs. 22
  misc_feature: MA Experiment 20000173 PARAMETER Experiment Name: At_42deg_Heat_P Parameter: Timepoint (hr) Value: 6
  misc_feature: MA Experiment 20000173 PARAMETER Experiment Name: At_42deg_Heat_P Parameter: Tissue Value: Aerial
  misc_feature: MA Experiment ID: 20000182 Result: Down-regulated in Transcription
  misc_feature: MA Experiment 20000182 PARAMETER Experiment Name: At_2mM_SA_P Parameter: Age (day) Value: 14
  misc_feature: MA Experiment 20000182 PARAMETER Experiment Name: At_2mM_SA_P Parameter: Organism Value: A. thaliana
  misc_feature: MA Experiment 20000182 PARAMETER Experiment Name: At_2mM_SA_P Parameter: Plant Line Value: WS
  misc_feature: MA Experiment 20000182 PARAMETER Experiment Name: At_2mM_SA_P Parameter: Timepoint (hr) Value: 6
  misc_feature: MA Experiment 20000182 PARAMETER Experiment Name: At_2mM_SA_P Parameter: Tissue Value: Aerial
  misc_feature: MA Experiment 20000182 PARAMETER Experiment Name: At_2mM_SA_P Parameter: Treatment Value: 2mM SA vs. No Treatment
  misc_feature: MA Experiment ID: 20000184 Result: Down-regulated in Transcription
  misc_feature: MA Experiment 20000184 PARAMETER Experiment Name: At_Shoots__P Parameter: Age (day) Value: 7
  misc_feature: MA Experiment 20000184 PARAMETER Experiment Name: At_Shoots__P Parameter: Tissue Value: Shoots vs. Whole Plant
  misc_feature: MA Experiment ID: 20000185 Result: Down-regulated in Transcription
  misc_feature: MA Experiment 20000185 PARAMETER Experiment Name: At_Roots__P Parameter: Age (day) Value: 7 vs. 21
  misc_feature: MA Experiment 20000185 PARAMETER Experiment Name: At_Roots__P Parameter: Organism Value: A. thaliana
  misc_feature: MA Experiment 20000185 PARAMETER Experiment Name: At_Roots__P Parameter: Tissue Value: Roots vs. Whole Plant
  misc_feature: MA Experiment ID: 20000211 Result: Up-regulated in Transcription
  misc_feature: MA Experiment 20000211 PARAMETER Experiment Name: At_0.001percent_MeJA__P Parameter: Age (day) Value: 14
  misc_feature: MA Experiment 20000211 PARAMETER Experiment Name: At_0.001percent_MeJA__P Parameter: Organism Value: A. thaliana
  misc_feature: MA Experiment 20000211 PARAMETER Experiment Name: At_0.001percent_MeJA__P Parameter: Plant Line Value: WS
  misc_feature: MA Experiment 20000211 PARAMETER Experiment Name: At_0.001percent_MeJA__P Parameter: Timepoint (hr) Value: 1
  misc_feature: MA Experiment 20000211 PARAMETER Experiment Name: At_0.001percent_MeJA__P Parameter: Tissue Value: Aerial
  misc_feature: MA Experiment 20000211 PARAMETER Experiment Name: At_0.001percent_MeJA__P Parameter: Treatment Value: 0.001percent MeJA vs. No Treatment
  misc_feature: MA Experiment ID: 20000227 Result: Up-regulated in Transcription
  misc_feature: MA Experiment 20000227 PARAMETER Experiment Name: At_Root-Tips-vs-Tops_P Parameter: Tissue Value: Root Tips vs. Root Tops
  misc_feature: MA Experiment ID: 20000234 Result: Down-regulated in Transcription
  misc_feature: MA Experiment 20000234 PARAMETER Experiment Name: At_Siliques_P Parameter: Age (day) Value: 21
  misc_feature: MA Experiment 20000234 PARAMETER Experiment Name: At_Siliques_P Parameter: Organism Value: A. thaliana
  misc_feature: MA Experiment 20000234 PARAMETER Experiment Name: At_Siliques_P Parameter: Plant Line Value: WS
  misc_feature: MA Experiment 20000234 PARAMETER Experiment Name: At_Siliques_P Parameter: Tissue Value: Less Than 5mm Siliques vs. Whole Plant
  misc_feature: MA Experiment ID: 20000235 Result: Down-regulated in Transcription
  misc_feature: MA Experiment 20000235 PARAMETER Experiment Name: At_Siliques_P Parameter: Age (day) Value: 21
  misc_feature: MA Experiment 20000235 PARAMETER Experiment Name: At_Siliques_P Parameter: Organism Value: A. thaliana
  misc_feature: MA Experiment 20000235 PARAMETER Experiment Name: At_Siliques_P Parameter: Plant Line Value: WS
  misc_feature: MA Experiment 20000235 PARAMETER Experiment Name: At_Siliques_P Parameter: Tissue Value: 5-10mm Siliques vs. Whole Plant
  misc_feature: MA Experiment ID: 20000438 Result: Down-regulated in Transcription
  misc_feature: MA Experiment 20000438 PARAMETER Experiment Name: At_Shoots__P Parameter: Age (day) Value: 14
  misc_feature: MA Experiment 20000438 PARAMETER Experiment Name: At_Shoots__P Parameter: Tissue Value: Shoots vs. Whole Plant
  misc_feature: MA Experiment ID: 20000439 Result: Down-regulated in Transcription
  misc_feature: MA Experiment 20000439 PARAMETER Experiment Name: At_Roots__P Parameter: Age (day) Value: 14 vs. 21
  misc_feature: MA Experiment 20000439 PARAMETER Experiment Name: At_Roots__P Parameter: Organism Value: A. thaliana
  misc_feature: MA Experiment 20000439 PARAMETER Experiment Name: At_Roots__P Parameter: Tissue Value: Roots vs. Whole Plant
  misc_feature: MA Experiment ID: 20000455 Result: Up-regulated in Transcription
  misc_feature: MA Experiment 20000455 PARAMETER Experiment Name: At_100uM_ABA_P Parameter: Age (day) Value: 16
  misc_feature: MA Experiment 20000455 PARAMETER Experiment Name: At_100uM_ABA_P Parameter: Organism Value: A. thaliana
  misc_feature: MA Experiment 20000455 PARAMETER Experiment Name: At_100uM_ABA_P Parameter: Plant Line Value: WS
  misc_feature: MA Experiment 20000455 PARAMETER Experiment Name: At_100uM_ABA_P Parameter: Timepoint (hr) Value: 48
  misc_feature: MA Experiment 20000455 PARAMETER Experiment Name: At_100uM_ABA_P Parameter: Tissue Value: Aerial
  misc_feature: MA Experiment 20000455 PARAMETER Experiment Name: At_100uM_ABA_P Parameter: Treatment Value: 100uM ABA vs. No Treatment
  misc_feature: MA Experiment ID: 20000495 Result: Up-regulated in Transcription
  misc_feature: MA Experiment 20000495 PARAMETER Experiment Name: At_Guard_Cells_P Parameter: Harvest Date Value: 8/2/2002
  misc_feature: MA Experiment 20000495 PARAMETER Experiment Name: At_Guard_Cells_P Parameter: Organism Value: A. thaliana
  misc_feature: MA Experiment 20000495 PARAMETER Experiment Name: At_Guard_Cells_P Parameter: Tissue Value: Guard Cells vs. Leaves
  misc_feature: MA Experiment ID: 20000527 Result: Up-regulated in Transcription
  misc_feature: MA Experiment 20000527 PARAMETER Experiment Name: At_10percent_PEG_P Parameter: Age (day) Value: 20
  misc_feature: MA Experiment 20000527 PARAMETER Experiment Name: At_10percent_PEG_P Parameter: Organism Value: A. thaliana
  misc_feature: MA Experiment 20000527 PARAMETER Experiment Name: At_10percent_PEG_P Parameter: Plant Line Value: WS
  misc_feature: MA Experiment 20000527 PARAMETER Experiment Name: At_10percent_PEG_P Parameter: Timepoint (day) Value: 20
  misc_feature: MA Experiment 20000527 PARAMETER Experiment Name: At_10percent_PEG_P Parameter: Tissue Value: Whole Plant
  misc_feature: MA Experiment 20000527 PARAMETER Experiment Name: At_10percent_PEG_P Parameter: Treatment Value: 10percent PEG vs. No Treatment
  misc_feature: MA Experiment ID: 20001247 Result: Down-regulated in Transcription
  misc_feature: MA Experiment 20001247 PARAMETER Experiment Name: At_Far-red-induction_P Parameter: Age (day) Value: 7
  misc_feature: MA Experiment 20001247 PARAMETER Experiment Name: At_Far-red-induction_P Parameter: Light Value: Far-red vs. White
  misc_feature: MA Experiment 20001247 PARAMETER Experiment Name: At_Far-red-induction_P Parameter: Organism Value: A. thaliana
  misc_feature: MA Experiment 20001247 PARAMETER Experiment Name: At_Far-red-induction_P Parameter: Plant Line Value: Columbia
  misc_feature: MA Experiment 20001247 PARAMETER Experiment Name: At_Far-red-induction_P Parameter: Timepoint (hr) Value: 1
  misc_feature: MA Experiment 20001247 PARAMETER Experiment Name: At_Far-red-induction_P Parameter: Tissue Value: Whole Plant
  misc_feature: MA Experiment ID: 20001248 Result: Down-regulated in Transcription
  misc_feature: MA Experiment 20001248 PARAMETER Experiment Name: At_Far-red-induction_P Parameter: Age (day) Value: 7
  misc_feature: MA Experiment 20001248 PARAMETER Experiment Name: At_Far-red-induction_P Parameter: Light Value: Far-red vs. White
  misc_feature: MA Experiment 20001248 PARAMETER Experiment Name: At_Far-red-induction_P Parameter: Organism Value: A. thaliana
  misc_feature: MA Experiment 20001248 PARAMETER Experiment Name: At_Far-red-induction_P Parameter: Plant Line Value: Columbia
  misc_feature: MA Experiment 20001248 PARAMETER Experiment Name: At_Far-red-induction_P Parameter: Timepoint (hr) Value: 4
  misc_feature: MA Experiment 20001248 PARAMETER Experiment Name: At_Far-red-induction_P Parameter: Tissue Value: Whole Plant
  misc_feature: MA Experiment ID: 20001450 Result: Down-regulated in Transcription
  misc_feature: MA Experiment 20001450 PARAMETER Experiment Name: At_Far-red-induction_P Parameter: Age (day) Value: 7
  misc_feature: MA Experiment 20001450 PARAMETER Experiment Name: At_Far-red-induction_P Parameter: Light Value: Far-red vs. White
  misc_feature: MA Experiment 20001450 PARAMETER Experiment Name: At_Far-red-induction_P Parameter: Organism Value: A. thaliana
  misc_feature: MA Experiment 20001450 PARAMETER Experiment Name: At_Far-red-induction_P Parameter: Plant Line Value: Columbia
  misc_feature: MA Experiment 20001450 PARAMETER Experiment Name: At_Far-red-induction_P Parameter: Timepoint (hr) Value: 8
  misc_feature: MA Experiment 20001450 PARAMETER Experiment Name: At_Far-red-induction_P Parameter: Tissue Value: Whole Plant
  misc_feature: MA Experiment ID: 20001451 Result: Down-regulated in Transcription
  misc_feature: MA Experiment 20001451 PARAMETER Experiment Name: At_Far-red-induction_P Parameter: Age (day) Value: 7
  misc_feature: MA Experiment 20001451 PARAMETER Experiment Name: At_Far-red-induction_P Parameter: Light Value: Far-red vs. White
  misc_feature: MA Experiment 20001451 PARAMETER Experiment Name: At_Far-red-induction_P Parameter: Organism Value: A. thaliana
  misc_feature: MA Experiment 20001451 PARAMETER Experiment Name: At_Far-red-induction_P Parameter: Plant Line Value: Columbia
  misc_feature: MA Experiment 20001451 PARAMETER Experiment Name: At_Far-red-induction_P Parameter: Timepoint (hr) Value: 24
  misc_feature: MA Experiment 20001451 PARAMETER Experiment Name: At_Far-red-induction_P Parameter: Tissue Value: Whole Plant
  misc_feature: MA Experiment ID: 20001457 Result: Down-regulated in Transcription
  misc_feature: MA Experiment 20001457 PARAMETER Experiment Name: At_50mM_NH4NO3_L-to-H_P Parameter: Age (day) Value: Undefined
  misc_feature: MA Experiment 20001457 PARAMETER Experiment Name: At_50mM_NH4NO3_L-to-H_P Parameter: Organism Value: Undefined
  misc_feature: MA Experiment 20001457 PARAMETER Experiment Name: At_50mM_NH4NO3_L-to-H_P Parameter: Plant Line Value: Undefined
  misc_feature: MA Experiment 20001457 PARAMETER Experiment Name: At_50mM_NH4NO3_L-to-H_P Parameter: Timepoint (hr) Value: 0.5
  misc_feature: MA Experiment 20001457 PARAMETER Experiment Name: At_50mM_NH4NO3_L-to-H_P Parameter: Tissue Value: Siliques
  misc_feature: MA Experiment 20001457 PARAMETER Experiment Name: At_50mM_NH4NO3_L-to-H_P Parameter: Treatment Value: 50mM NH4NO3 vs. 100mM Manitol
  misc_feature: MA Experiment ID: 20001555 Result: Up-regulated in Transcription
  misc_feature: MA Experiment 20001555 PARAMETER Experiment Name: At_Drought_Soil_Dry_P Parameter: Age (day) Value: 24
  misc_feature: MA Experiment 20001555 PARAMETER Experiment Name: At_Drought_Soil_Dry_P Parameter: Organism Value: A. thaliana
  misc_feature: MA Experiment 20001555 PARAMETER Experiment Name: At_Drought_Soil_Dry_P Parameter: Plant Line Value: WS
  misc_feature: MA Experiment 20001555 PARAMETER Experiment Name: At_Drought_Soil_Dry_P Parameter: Post Timepoint (hr) Value: None
  misc_feature: MA Experiment 20001555 PARAMETER Experiment Name: At_Drought_Soil_Dry_P Parameter: Post-Treatment Value: None
  misc_feature: MA Experiment 20001555 PARAMETER Experiment Name: At_Drought_Soil_Dry_P Parameter: Timepoint (day) Value: 10
  misc_feature: MA Experiment 20001555 PARAMETER Experiment Name: At_Drought_Soil_Dry_P Parameter: Treatment Value: Drought vs. No Drought
  misc_feature: MA Experiment ID: 20001557 Result: Down-regulated in Transcription
  misc_feature: MA Experiment 20001557 PARAMETER Experiment Name: At_Drought_Soil_Dry_P Parameter: Age (day) Value: 27
  misc_feature: MA Experiment 20001557 PARAMETER Experiment Name: At_Drought_Soil_Dry_P Parameter: Organism Value: A. thaliana
  misc_feature: MA Experiment 20001557 PARAMETER Experiment Name: At_Drought_Soil_Dry_P Parameter: Plant Line Value: WS
  misc_feature: MA Experiment 20001557 PARAMETER Experiment Name: At_Drought_Soil_Dry_P Parameter: Post Timepoint (hr) Value: 3
  misc_feature: MA Experiment 20001557 PARAMETER Experiment Name: At_Drought_Soil_Dry_P Parameter: Post-Treatment Value: Re-Water vs. No Drought
  misc_feature: MA Experiment 20001557 PARAMETER Experiment Name: At_Drought_Soil_Dry_P Parameter: Timepoint (day) Value: 13
  misc_feature: MA Experiment 20001557 PARAMETER Experiment Name: At_Drought_Soil_Dry_P Parameter: Treatment Value: Drought vs. No Drought
  misc_feature: MA Experiment ID: 20001558 Result: Down-regulated in Transcription
  misc_feature: MA Experiment 20001558 PARAMETER Experiment Name: At_Drought_Soil_Dry_P Parameter: Age (day) Value: 27
  misc_feature: MA Experiment 20001558 PARAMETER Experiment Name: At_Drought_Soil_Dry_P Parameter: Organism Value: A. thaliana
  misc_feature: MA Experiment 20001558 PARAMETER Experiment Name: At_Drought_Soil_Dry_P Parameter: Plant Line Value: WS
  misc_feature: MA Experiment 20001558 PARAMETER Experiment Name: At_Drought_Soil_Dry_P Parameter: Post Timepoint (hr) Value: 6
  misc_feature: MA Experiment 20001558 PARAMETER Experiment Name: At_Drought_Soil_Dry_P Parameter: Post-Treatment Value: Re-Water vs. No Drought
  misc_feature: MA Experiment 20001558 PARAMETER Experiment Name: At_Drought_Soil_Dry_P Parameter: Timepoint (day) Value: 13
  misc_feature: MA Experiment 20001558 PARAMETER Experiment Name: At_Drought_Soil_Dry_P Parameter: Treatment Value: Drought vs. No Drought
  misc_feature: MA Experiment ID: 20001560 Result: Up-regulated in Transcription
  misc_feature: MA Experiment 20001560 PARAMETER Experiment Name: At_Drought_Soil_Dry_P Parameter: Age (day) Value: 28
  misc_feature: MA Experiment 20001560 PARAMETER Experiment Name: At_Drought_Soil_Dry_P Parameter: Organism Value: A. thaliana
  misc_feature: MA Experiment 20001560 PARAMETER Experiment Name: At_Drought_Soil_Dry_P Parameter: Plant Line Value: WS
  misc_feature: MA Experiment 20001560 PARAMETER Experiment Name: At_Drought_Soil_Dry_P Parameter: Post Timepoint (hr) Value: None
  misc_feature: MA Experiment 20001560 PARAMETER Experiment Name: At_Drought_Soil_Dry_P Parameter: Post-Treatment Value: None
  misc_feature: MA Experiment 20001560 PARAMETER Experiment Name: At_Drought_Soil_Dry_P Parameter: Timepoint (day) Value: 14
  misc_feature: MA Experiment 20001560 PARAMETER Experiment Name: At_Drought_Soil_Dry_P Parameter: Treatment Value: Drought vs. No Drought
  misc_feature: MA Experiment ID: 20001772 Result: Down-regulated in Transcription
  misc_feature: MA Experiment 20001772 PARAMETER Experiment Name: At_Far-red-enriched-adult_P Parameter: Age (day) Value: 29
  misc_feature: MA Experiment 20001772 PARAMETER Experiment Name: At_Far-red-enriched-adult_P Parameter: Light Value: Far-red enriched vs. White
  misc_feature: MA Experiment 20001772 PARAMETER Experiment Name: At_Far-red-enriched-adult_P Parameter: Organism Value: A. thaliana
  misc_feature: MA Experiment 20001772 PARAMETER Experiment Name: At_Far-red-enriched-adult_P Parameter: Plant Line Value: Columbia
  misc_feature: MA Experiment 20001772 PARAMETER Experiment Name: At_Far-red-enriched-adult_P Parameter: Timepoint (hr) Value: 24
  misc_feature: MA Experiment 20001772 PARAMETER Experiment Name: At_Far-red-enriched-adult_P Parameter: Tissue Value: Aerial
  misc_feature: MA Experiment ID: 20001773 Result: Up-regulated in Transcription
  misc_feature: MA Experiment 20001773 PARAMETER Experiment Name: At_Far-red-enriched-adult_P Parameter: Age (day) Value: 30
  misc_feature: MA Experiment 20001773 PARAMETER Experiment Name: At_Far-red-enriched-adult_P Parameter: Light Value: Far-red enriched vs. White
  misc_feature: MA Experiment 20001773 PARAMETER Experiment Name: At_Far-red-enriched-adult_P Parameter: Organism Value: A. thaliana
  misc_feature: MA Experiment 20001773 PARAMETER Experiment Name: At_Far-red-enriched-adult_P Parameter: Plant Line Value: Columbia
  misc_feature: MA Experiment 20001773 PARAMETER Experiment Name: At_Far-red-enriched-adult_P Parameter: Timepoint (hr) Value: 48
  misc_feature: MA Experiment 20001773 PARAMETER Experiment Name: At_Far-red-enriched-adult_P Parameter: Tissue Value: Aerial
  misc_feature: MA Experiment ID: 20001904 Result: Up-regulated in Transcription
  misc_feature: MA Experiment 20001904 PARAMETER Experiment Name: At_Drought_Reproduction_P Parameter: Age (day) Value: 37
  misc_feature: MA Experiment 20001904 PARAMETER Experiment Name: At_Drought_Reproduction_P Parameter: Organism Value: A. thaliana
  misc_feature: MA Experiment 20001904 PARAMETER Experiment Name: At_Drought_Reproduction_P Parameter: Plant Line Value: WS
  misc_feature: MA Experiment 20001904 PARAMETER Experiment Name: At_Drought_Reproduction_P Parameter: Timepoint (day) Value: 7
  misc_feature: MA Experiment 20001904 PARAMETER Experiment Name: At_Drought_Reproduction_P Parameter: Tissue Value: Rosettes
  misc_feature: MA Experiment 20001904 PARAMETER Experiment Name: At_Drought_Reproduction_P Parameter: Treatment Value: Drought vs. No Drought
  misc_feature: MA Experiment ID: 20001906 Result: Up-regulated in Transcription
  misc_feature: MA Experiment 20001906 PARAMETER Experiment Name: At_Drought_Reproduction_P Parameter: Age (day) Value: 35
  misc_feature: MA Experiment 20001906 PARAMETER Experiment Name: At_Drought_Reproduction_P Parameter: Organism Value: A. thaliana
  misc_feature: MA Experiment 20001906 PARAMETER Experiment Name: At_Drought_Reproduction_P Parameter: Plant Line Value: WS
  misc_feature: MA Experiment 20001906 PARAMETER Experiment Name: At_Drought_Reproduction_P Parameter: Timepoint (day) Value: 5
  misc_feature: MA Experiment 20001906 PARAMETER Experiment Name: At_Drought_Reproduction_P Parameter: Tissue Value: Siliques
  misc_feature: MA Experiment 20001906 PARAMETER Experiment Name: At_Drought_Reproduction_P Parameter: Treatment Value: Drought vs. No Drought
aaccatatgaatctcacgatcaaagataatatctcatcatctatatagtatttgtctcgatattagagacgtacacactttgtttatactcaaatcaatatgggatctttcgtgaaagaagaaacgtcgtcgttgatgacagattttttggagaagtgcggtggttatgcggtggtggatggagggtttgcgacggagctacagcgccacggagctgatatcaatgatccactttggagtgctaagtgccttattacttctcctcaccttgttacaaaggtgcacttggattaccttgaatctggagcaaatatcatcataacagcatcttaccaggcgacgatacaaggttttgtggcaaaaggtctatcggtgggagaagcagaaaatttacttagaaggagcgttgaaatcacgtacgaggcacgtgagattttctacaacagatgcaccaagggttcatgggatttcgcctacgctggaaaagcttcccggagaccaattcttgtcgcagcttccgttggtagctatggagcttatctcgctgacggctccgaatacagtgggatatatggagattctgtgagtaaggagacattaaaggatttccatagaagaagagttcaaatcttagcaaaatctggagccgacctaatagcattcgagactattccaaataagctcgaagcagaggcttatgcggatcttcttgaggaggaagatatcgatattccggcatggttctcgttcacttccaaggacggagtcagtgtgccacgaggagattcagttgtagaatgtgcgaaagtggcagattcatgcaagaacgtggtggccattggaatcaattgtactgcaccaagatacattcatgctttaattatctccttgcgccagatgacacgcaaaccaatcgttgtatacccaaacagcggggaagtctacgacggtctgaacaagaaatggattaagtcagagggagagtcagaggaggattttgtgtcgtacgtgagtaaatggagagatgcaggagcttctctgtttggaggatgttgtcggactactccaaacaccatcagagccattgctaaagttctctccgacgaaccttctgcagcatcaaaacccaaattcgggcaatagacttgtcaacggtgaatttctatgcttgtgatgtcaggaaggagtttaaaatgtacaataacgcaagcgtagttctgtaatctactaatatgttgaaactataaataatggtaaactatgttagagacaactgtgtaattagcgtatgataataatggagtttaaacgataatttgatgttatagtaagcatattttta

SEQ ID NO: 78889 - protein, 347 aa, Arabidopsis thaliana; identical to SEQ ID NO: 39499
  peptide (1)..(347): Ceres Seq. ID no. 12646639
  misc_feature (23)..(335): Pfam Name: Homocysteine S-methyltransferase Pfam Description: Homocysteine S-methyltransferase
  misc_feature (1)..(347): Homolog of NCBI NO: 18403505 NR Description: putative selenocysteine methyltransferase; id: At3g22740.1, supported by cDNA: 36591., supported by cDNA: [Arabidopsis thaliana] >gi|9279692|dbj|BAB01249.1| cysteine
  misc_feature (1)..(347): Homolog of NCBI NO: 21593147 NR Description: putative selenocysteine methyltransferase
  misc_feature (13)..(338): Homolog of NCBI NO: 15229396 NR Description: homocysteine S-methyltransferase AtHMT-2; protein At3g63250.1, supported by cDNA: gi_16226445 [Arabidopsis
  misc_feature (13)..(338): Homolog of NCBI NO: 25453566 NR Description: homocysteine S-methyltransferase (EC 2.1.1.10)
  misc_feature (9)..(342): Homolog of NCBI NO: 6094303 NR Description: Selenocysteine methyltransferase
  misc_feature (7)..(333): Homolog of NCBI NO: 37534456 NR Description: putative homocysteine S-methyltransferase-2
  misc_feature (16)..(343): Homolog of NCBI NO: 10732787 NR Description: homocysteine S-methyltransferase-2 [Zea mays]
  misc_feature (16)..(334): Homolog of NCBI NO: 10732789 NR Description: homocysteine S-methyltransferase-3 [Zea mays]
  misc_feature (8)..(335): Homolog of NCBI NO: 10732791 NR Description: homocysteine S-methyltransferase-4 [Zea mays]
  misc_feature (5)..(333): Homolog of NCBI NO: 15230929 NR Description: homocysteine S-methyltransferase AtHMT-1; protein At3g25900.1, supported by cDNA: gi_17473822, supported by cDNA: [Arabidopsis thaliana] >gi|25453565|pir||T51941 Arabidopsis

SEQ ID NO: 78890 - protein, 335 aa, Arabidopsis thaliana; identical to SEQ ID NO: 39500
  peptide (1)..(335): Ceres Seq. ID no. 12646640
  misc_feature (11)..(323): Pfam Name: Homocysteine S-methyltransferase Pfam Description: Homocysteine S-methyltransferase
  misc_feature (1)..(335): Homolog of NCBI NO: 18403505 NR Description: putative selenocysteine methyltransferase; id: At3g22740.1, supported by cDNA: 36591., supported by cDNA: [Arabidopsis thaliana] >gi|9279692|dbj|BAB01249.1| cysteine
  misc_feature (1)..(335): Homolog of NCBI NO: 21593147 NR Description: putative selenocysteine methyltransferase
  misc_feature (1)..(326): Homolog of NCBI NO: 15229396 NR Description: homocysteine S-methyltransferase AtHMT-2; protein At3g63250.1, supported by cDNA: gi_16226445 [Arabidopsis
  misc_feature (1)..(326): Homolog of NCBI NO: 25453566 NR Description: homocysteine S-methyltransferase (EC 2.1.1.10)
  misc_feature (1)..(330): Homolog of NCBI NO: 6094303 NR Description: Selenocysteine methyltransferase
  misc_feature (1)..(321): Homolog of NCBI NO: 37534456 NR Description: putative homocysteine S-methyltransferase-2
  misc_feature (4)..(331): Homolog of NCBI NO: 10732787 NR Description: homocysteine S-methyltransferase-2 [Zea mays]
  misc_feature (4)..(322): Homolog of NCBI NO: 10732789 NR Description: homocysteine S-methyltransferase-3 [Zea mays]
  misc_feature (1)..(323): Homolog of NCBI NO: 10732791 NR Description: homocysteine S-methyltransferase-4 [Zea mays]
  misc_feature (1)..(321): Homolog of NCBI NO: 15230929 NR Description: homocysteine S-methyltransferase AtHMT-1; protein At3g25900.1, supported by cDNA: gi_17473822, supported by cDNA: [Arabidopsis thaliana] >gi|25453565|pir||T51941 Arabidopsis

SEQ ID NO: 78891 - DNA, 708 bp, Arabidopsis thaliana
  misc_feature (1)..(708): Ceres Seq. ID no. 12646665
  misc_feature: MA Experiment ID: 20000307 Result: Down-regulated in Transcription
  misc_feature: MA Experiment 20000307 PARAMETER Experiment Name: At_Germinating_Seeds_Sub_P Parameter: Age (hr) Value: 24 vs. 0
  misc_feature: MA Experiment 20000307 PARAMETER Experiment Name: At_Germinating_Seeds_Sub_P Parameter: Organism Value: A. thaliana
  misc_feature: MA Experiment 20000307 PARAMETER Experiment Name: At_Germinating_Seeds_Sub_P Parameter: Plant Line Value: WS
  misc_feature: MA Experiment 20000307 PARAMETER Experiment Name: At_Germinating_Seeds_Sub_P Parameter: Tissue Value: Germinating Seeds
atggctaaccctaaagttttctttgatttgaccgtggatggcaaacccgctggtcggatcgtgatagagctcttcgctgacttgactccacggacggcggagaacttcaggggtctgtgtaccggcgagagaggcatcggaaagtgtggtaaaccaatccactacaaaggatcaaccttcgaccatattgttcccgatctcatgtggtgtggaggagatatcatcttcgaaaacgaacccatccacagcgaagaattagacgacgagtactttatcttgaaccacgaagacggtccaggtatcatctccatggccgactccaacggatctcagttccaaatccacatgaaggactatggcttgcaagtggacggtgatcacgttgtgatcggcaaagttgttgaaggattggatcttatgaggaacattgagaaggaggtcataactacgacaacaaggacgccttcaaagcctgtggtgatcgcggactgcggtgagctttcagattataggtcagaaagatgttatcttatgaagaacattgagaaggaggtcataattaaaacagcaaaggataacaagcccgtggtgattgcggactgcggtgggctttcagatgatagatctgaaagatattatcttataaatatagttgttgcttgcatggttttgatgtgtttttggtcttgttggtgttcctttagttag

SEQ ID NO: 78892 - protein, 235 aa, Arabidopsis thaliana
  peptide (1)..(235): Ceres Seq. ID no. 12646666
  misc_feature (1)..(231): Homolog of NCBI NO: 15228892 NR Description: cyclophilin, putative; protein id: At3g22920.1
  misc_feature (2)..(168): Homolog of NCBI NO: 18076088 NR Description: cyclophilin [Ricinus communis]
  misc_feature (1)..(168): Homolog of NCBI NO: 6014890 NR Description: Peptidyl-prolyl cis-trans isomerase (PPIase)
  misc_feature (3)..(168): Homolog of NCBI NO: 15227259 NR Description: cytosolic cyclophilin (ROC3); protein id: supported by cDNA: 23995., supported by cDNA: gi_1305454, by cDNA: gi_15081645, supported by cDNA: gi_20147152 [Arabidopsis
  misc_feature (1)..(167): Homolog of NCBI NO: 118103 NR Description: Peptidyl-prolyl cis-trans isomerase (PPIase)
  misc_feature (1)..(168): Homolog of NCBI NO: 15234781 NR Description: peptidylprolyl isomerase ROC1; protein id: supported by cDNA: 41363. [Arabidopsis thaliana]
  misc_feature (1)..(167): Homolog of NCBI NO: 68406 NR Description: peptidylprolyl isomerase (EC 5.2.1.8) - tomato
  misc_feature (1)..(168): Homolog of NCBI NO: 29124975 NR Description: cyclophilin [Populus tremuloides]
  misc_feature (1)..(168): Homolog of NCBI NO: 18146786 NR Description: CYP1 [Vigna radiata]
  misc_feature (1)..(167): Homolog of NCBI NO: 13925734 NR Description: cyclophilin A-2 [Triticum aestivum]
MANPKVFFDLTVDGKPAGRIVIELFADLTPRTAENFRGLCTGERGIGKCGKPIHYKGSTFDHIVPDLMWCGGDIIFENEPIHSEELDDEYFILNHEDGPGIISMADSNGSQFQIHMKDYGLQVDGDHVVIGKVVEGLDLMRNIEKEVITTTTRTPSKPVVIADCGELSDYRSERCYLMKNIEKEVIIKTAKDNKPVVIADCGGLSDDRSERYYLINIVVACMVLMCFWSCWCSFS

SEQ ID NO: 78893 - protein, 168 aa, Arabidopsis thaliana
  peptide (1)..(168): Ceres Seq. ID no. 12646667
  misc_feature (1)..(164): Homolog of NCBI NO: 15228892 NR Description: cyclophilin, putative; protein id: At3g22920.1
  misc_feature (1)..(101): Homolog of NCBI NO: 18076088 NR Description: cyclophilin [Ricinus communis]
  misc_feature (1)..(101): Homolog of NCBI NO: 6014890 NR Description: Peptidyl-prolyl cis-trans isomerase (PPIase)
  misc_feature (1)..(101): Homolog of NCBI NO: 15227259 NR Description: cytosolic cyclophilin (ROC3); protein id: supported by cDNA: 23995., supported by cDNA: gi_1305454, by cDNA: gi_15081645, supported by cDNA: gi_20147152 [Arabidopsis
  misc_feature (1)..(100): Homolog of NCBI NO: 118103 NR Description: Peptidyl-prolyl cis-trans isomerase (PPIase)
  misc_feature (1)..(101): Homolog of NCBI NO: 15234781 NR Description: peptidylprolyl isomerase ROC1; protein id: supported by cDNA: 41363. [Arabidopsis thaliana]
  misc_feature (1)..(100): Homolog of NCBI NO: 68406 NR Description: peptidylprolyl isomerase (EC 5.2.1.8) - tomato
  misc_feature (1)..(101): Homolog of NCBI NO: 29124975 NR Description: cyclophilin [Populus tremuloides]
  misc_feature (1)..(101): Homolog of NCBI NO: 18146786 NR Description: CYP1 [Vigna radiata]
  misc_feature (1)..(100): Homolog of NCBI NO: 13925734 NR Description: cyclophilin A-2 [Triticum aestivum]
MWCGGDIIFENEPIHSEELDDEYFILNHEDGPGIISMADSNGSQFQIHMKDYGLQVDGDHVVIGKVVEGLDLMRNIEKEVITTTTRTPSKPVVIADCGELSDYRSERCYLMKNIEKEVIIKTAKDNKPVVIADCGGLSDDRSERYYLINIVVACMVLMCFWSCWCSFS

SEQ ID NO: 78894 - protein, 132 aa, Arabidopsis thaliana
  peptide (1)..(132): Ceres Seq. ID no. 12646668
  misc_feature (1)..(128): Homolog of NCBI NO: 15228892 NR Description: cyclophilin, putative; protein id: At3g22920.1
  misc_feature (1)..(65): Homolog of NCBI NO: 18076088 NR Description: cyclophilin [Ricinus communis]
  misc_feature (1)..(65): Homolog of NCBI NO: 6014890 NR Description: Peptidyl-prolyl cis-trans isomerase (PPIase)
  misc_feature (1)..(65): Homolog of NCBI NO: 15227259 NR Description: cytosolic cyclophilin (ROC3); protein id: supported by cDNA: 23995., supported by cDNA: gi_1305454, by cDNA: gi_15081645, supported by cDNA: gi_20147152 [Arabidopsis
  misc_feature (1)..(64): Homolog of NCBI NO: 118103 NR Description: Peptidyl-prolyl cis-trans isomerase (PPIase)
  misc_feature (1)..(65): Homolog of NCBI NO: 15234781 NR Description: peptidylprolyl isomerase ROC1; protein id: supported by cDNA: 41363. [Arabidopsis thaliana]
  misc_feature (1)..(64): Homolog of NCBI NO: 68406 NR Description: peptidylprolyl isomerase (EC 5.2.1.8) - tomato
  misc_feature (1)..(65): Homolog of NCBI NO: 29124975 NR Description: cyclophilin [Populus tremuloides]
  misc_feature (1)..(65): Homolog of NCBI NO: 18146786 NR Description: CYP1 [Vigna radiata]
  misc_feature (1)..(64): Homolog of NCBI NO: 13925734 NR Description: cyclophilin A-2 [Triticum aestivum]
MADSNGSQFQIHMKDYGLQVDGDHVVIGKVVEGLDLMRNIEKEVITTTTRTPSKPVVIADCGELSDYRSERCYLMKNIEKEVIIKTAKDNKPVVIADCGGLSDDRSERYYLINIVVACMVLMCFWSCWCSFS

SEQ ID NO: 78895 - DNA, 888 bp, Arabidopsis thaliana
  misc_feature (1)..(888): Ceres Seq. ID no. 12646673
  misc_feature: MA Experiment ID: 20000307 Result: Down-regulated in Transcription
  misc_feature: MA Experiment 20000307 PARAMETER Experiment Name: At_Germinating_Seeds_Sub_P Parameter: Age (hr) Value: 24 vs. 0
  misc_feature: MA Experiment 20000307 PARAMETER Experiment Name: At_Germinating_Seeds_Sub_P Parameter: Organism Value: A. thaliana
  misc_feature: MA Experiment 20000307 PARAMETER Experiment Name: At_Germinating_Seeds_Sub_P Parameter: Plant Line Value: WS
  misc_feature: MA Experiment 20000307 PARAMETER Experiment Name: At_Germinating_Seeds_Sub_P Parameter: Tissue Value: Germinating Seeds
atggctaaccctaaagttttctttgatttgaccgtggatggcaaacccgctggtcggatcgtgatagagctcttcgctgacttgactccacggacggcggagaacttcaggggtctgtgtaccggcgagagaggcatcggaaagtgtggtaaaccaatccactacaaaggatcaaccttcgaccatattgttcccgatctcatgtggtgtggaggagatatcatcttcgaaaacgaacccatccacagcgaagaattagacgacgagtactttatcttgaaccacgaagacggtccaggtatcatctccatggccgactccaacggatctcagttccaaatccacatgaaggactatggcttgcaagtggacggtgatcacgttgtgatcggcaaagttgttgaaggattggatcttatgaggaacattgagaaggaggtcataactacgacaacaaggacgccttcaaagcctgtggtgatcgcggactgcggtgagctttcagattataggtcagaaagatgttatcttatgaagaacattgagaaggaggtcataattaaaacagcaaaggataacaagcccgtggtgattgcggactgcggtgggctttcagatgatagatctgaaagatattatcttataaatatagttgttgcttgcatggttttgatgtgtttttggtcttgtagcgtactatcgaagaaaagttatatgaacgacggaagtctcaattataaacaaaaaaaaagaacagaattttttgggccccataaaatgtttatgatatgtatttttagggacttcttttttatcaagaagttttcgatttcgatttcacaaatgtccaagacaagttttcgatttcacaaatgtccaacagcctaa

SEQ ID NO: 78896 - protein, 295 aa, Arabidopsis thaliana
  peptide (1)..(295): Ceres Seq. ID no. 12646674
  misc_feature (1)..(229): Homolog of NCBI NO: 15228892 NR Description: cyclophilin, putative; protein id: At3g22920.1
  misc_feature (2)..(168): Homolog of NCBI NO: 18076088 NR Description: cyclophilin [Ricinus communis]
  misc_feature (1)..(168): Homolog of NCBI NO: 6014890 NR Description: Peptidyl-prolyl cis-trans isomerase (PPIase)
  misc_feature (3)..(168): Homolog of NCBI NO: 15227259 NR Description: cytosolic cyclophilin (ROC3); protein id: supported by cDNA: 23995., supported by cDNA: gi_1305454, by cDNA: gi_15081645, supported by cDNA: gi_20147152 [Arabidopsis
  misc_feature (1)..(167): Homolog of NCBI NO: 118103 NR Description: Peptidyl-prolyl cis-trans isomerase (PPIase)
  misc_feature (1)..(168): Homolog of NCBI NO: 15234781 NR Description: peptidylprolyl isomerase ROC1; protein id: supported by cDNA: 41363. [Arabidopsis thaliana]
  misc_feature (1)..(167): Homolog of NCBI NO: 68406 NR Description: peptidylprolyl isomerase (EC 5.2.1.8) - tomato
  misc_feature (1)..(168): Homolog of NCBI NO: 29124975 NR Description: cyclophilin [Populus tremuloides]
  misc_feature (1)..(168): Homolog of NCBI NO: 18146786 NR Description: CYP1 [Vigna radiata]
  misc_feature (1)..(167): Homolog of NCBI NO: 13925734 NR Description: cyclophilin A-2 [Triticum aestivum]
MANPKVFFDLTVDGKPAGRIVIELFADLTPRTAENFRGLCTGERGIGKCGKPIHYKGSTFDHIVPDLMWCGGDIIFENEPIHSEELDDEYFILNHEDGPGIISMADSNGSQFQIHMKDYGLQVDGDHVVIGKVVEGLDLMRNIEKEVITTTTRTPSKPVVIADCGELSDYRSERCYLMKNIEKEVIIKTAKDNKPVVIADCGGLSDDRSERYYLINIVVACMVLMCFWSCSVLSKKSYMNDGSLNYKQKKRTEFFGPHKMFMICIFRDFFFIKKFSISISQMSKTSFRFHKCPTA

SEQ ID NO: 78897 - protein, 228 aa, Arabidopsis thaliana
  peptide (1)..(228): Ceres Seq. ID no. 12646675
  misc_feature (1)..(162): Homolog of NCBI NO: 15228892 NR Description: cyclophilin, putative; protein id: At3g22920.1
  misc_feature (1)..(101): Homolog of NCBI NO: 18076088 NR Description: cyclophilin [Ricinus communis]
  misc_feature (1)..(101): Homolog of NCBI NO: 6014890 NR Description: Peptidyl-prolyl cis-trans isomerase (PPIase)
  misc_feature (1)..(101): Homolog of NCBI NO: 15227259 NR Description: cytosolic cyclophilin (ROC3); protein id: supported by cDNA: 23995., supported by cDNA: gi_1305454, by cDNA: gi_15081645, supported by cDNA: gi_20147152 [Arabidopsis
  misc_feature (1)..(100): Homolog of NCBI NO: 118103 NR Description: Peptidyl-prolyl cis-trans isomerase (PPIase)
  misc_feature (1)..(101): Homolog of NCBI NO: 15234781 NR Description: peptidylprolyl isomerase ROC1; protein id: supported by cDNA: 41363. [Arabidopsis thaliana]
  misc_feature (1)..(100): Homolog of NCBI NO: 68406 NR Description: peptidylprolyl isomerase (EC 5.2.1.8) - tomato
  misc_feature (1)..(101): Homolog of NCBI NO: 29124975 NR Description: cyclophilin [Populus tremuloides]
  misc_feature (1)..(101): Homolog of NCBI NO: 18146786 NR Description: CYP1 [Vigna radiata]
  misc_feature (1)..(100): Homolog of NCBI NO: 13925734 NR Description: cyclophilin A-2 [Triticum aestivum]
MWCGGDIIFENEPIHSEELDDEYFILNHEDGPGIISMADSNGSQFQIHMKDYGLQVDGDHVVIGKVVEGLDLMRNIEKEVITTTTRTPSKPVVIADCGELSDYRSERCYLMKNIEKEVIIKTAKDNKPVVIADCGGLSDDRSERYYLINIVVACMVLMCFWSCSVLSKKSYMNDGSLNYKQKKRTEFFGPHKMFMICIFRDFFFIKKFSISISQMSKTSFRFHKCPTA

SEQ ID NO: 78898 - protein, 192 aa, Arabidopsis thaliana
  peptide (1)..(192): Ceres Seq. ID no. 12646676
  misc_feature (1)..(126): Homolog of NCBI NO: 15228892 NR Description: cyclophilin, putative; protein id: At3g22920.1
  misc_feature (1)..(65): Homolog of NCBI NO: 18076088 NR Description: cyclophilin [Ricinus communis]
  misc_feature (1)..(65): Homolog of NCBI NO: 6014890 NR Description: Peptidyl-prolyl cis-trans isomerase (PPIase)
  misc_feature (1)..(65): Homolog of NCBI NO: 15227259 NR Description: cytosolic cyclophilin (ROC3); protein id: supported by cDNA: 23995., supported by cDNA: gi_1305454, by cDNA: gi_15081645, supported by cDNA: gi_20147152 [Arabidopsis
  misc_feature (1)..(64): Homolog of NCBI NO: 118103 NR Description: Peptidyl-prolyl cis-trans isomerase (PPIase)
  misc_feature (1)..(65): Homolog of NCBI NO: 15234781 NR Description: peptidylprolyl isomerase ROC1; protein id: supported by cDNA: 41363. [Arabidopsis thaliana]
  misc_feature (1)..(64): Homolog of NCBI NO: 68406 NR Description: peptidylprolyl isomerase (EC 5.2.1.8) - tomato
  misc_feature (1)..(65): Homolog of NCBI NO: 29124975 NR Description: cyclophilin [Populus tremuloides]
  misc_feature (1)..(65): Homolog of NCBI NO: 18146786 NR Description: CYP1 [Vigna radiata]
  misc_feature (1)..(64): Homolog of NCBI NO: 13925734 NR Description: cyclophilin A-2 [Triticum aestivum]
MADSNGSQFQIHMKDYGLQVDGDHVVIGKVVEGLDLMRNIEKEVITTTTRTPSKPVVIADCGELSDYRSERCYLMKNIEKEVIIKTAKDNKPVVIADCGGLSDDRSERYYLINIVVACMVLMCFWSCSVLSKKSYMNDGSLNYKQKKRTEFFGPHKMFMICIFRDFFFIKKFSISISQMSKTSFRFHKCPTA

SEQ ID NO: 78899 - DNA, 1988 bp, Arabidopsis thaliana
  misc_feature (1)..(1988): Ceres Seq. ID no. 12646688
  misc_feature: MA Experiment ID: 108434 Result: Up-regulated in Transcription
  misc_feature: MA Experiment 108434 PARAMETER Experiment Name: At_Root_Tips_cDNA_P Parameter: Tissue Value: Root Tips
  misc_feature: MA Experiment ID: 108488 Result: Up-regulated in Transcription
  misc_feature: MA Experiment ID: 108595 Result: Down-regulated in Transcription
  misc_feature: MA Experiment 108595 PARAMETER Experiment Name: At_Ler-pi_Ovule_cDNA_P Parameter: Plant Line Value: null
  misc_feature: MA Experiment ID: 20000113 Result: Down-regulated in Transcription
  misc_feature: MA Experiment 20000113 PARAMETER Experiment Name: At_42deg_Heat_cDNA_P Parameter: Temperature (deg C) Value: 42 vs. 22
  misc_feature: MA Experiment 20000113 PARAMETER Experiment Name: At_42deg_Heat_cDNA_P Parameter: Timepoint (hr) Value: 8
  misc_feature: MA Experiment 20000113 PARAMETER Experiment Name: At_42deg_Heat_cDNA_P Parameter: Tissue Value: Aerial
  misc_feature: MA Experiment ID: 20000179 Result: Up-regulated in Transcription
  misc_feature: MA Experiment 20000179 PARAMETER Experiment Name: At_Germinating_Seeds_P Parameter: Age (hr) Value: 6 vs. 0
  misc_feature: MA Experiment 20000179 PARAMETER Experiment Name: At_Germinating_Seeds_P Parameter: Tissue Value: Germinating Seeds
  misc_feature: MA Experiment ID: 20000214 Result: Down-regulated in Transcription
  misc_feature: MA Experiment 20000214 PARAMETER Experiment Name: At_4deg_Cold_P Parameter: Timepoint (hr) Value: 6
  misc_feature: MA Experiment ID: 20000224 Result: Down-regulated in Transcription
  misc_feature: MA Experiment ID: 20000234 Result: Down-regulated in Transcription
  misc_feature: MA Experiment 20000234 PARAMETER Experiment Name: At_Siliques_P Parameter: Age (day) Value: 21
  misc_feature: MA Experiment 20000234 PARAMETER Experiment Name: At_Siliques_P Parameter: Organism Value: A. thaliana
  misc_feature: MA Experiment 20000234 PARAMETER Experiment Name: At_Siliques_P Parameter: Plant Line Value: WS
  misc_feature: MA Experiment 20000234 PARAMETER Experiment Name: At_Siliques_P Parameter: Tissue Value: Less Than 5mm Siliques vs. Whole Plant
  misc_feature: MA Experiment ID: 20000264 Result: Down-regulated in Transcription
  misc_feature: MA Experiment 20000264 PARAMETER Experiment Name: At_Open_Flower_P Parameter: Age (day) Value: 21
  misc_feature: MA Experiment 20000264 PARAMETER Experiment Name: At_Open_Flower_P Parameter: Plant Line Value: WS
  misc_feature: MA Experiment 20000264 PARAMETER Experiment Name: At_Open_Flower_P Parameter: Tissue Value: Open Flower vs. Whole Plant
  misc_feature: MA Experiment ID: 20000265 Result: Down-regulated in Transcription
  misc_feature: MA Experiment 20000265 PARAMETER Experiment Name: At_Open_Flower_P Parameter: Age (day) Value: 21
  misc_feature: MA Experiment 20000265 PARAMETER Experiment Name: At_Open_Flower_P Parameter: Plant Line Value: WS
  misc_feature: MA Experiment 20000265 PARAMETER Experiment Name: At_Open_Flower_P Parameter: Tissue Value: Closed Flower vs. Whole Plant
  misc_feature: MA Experiment ID: 20000286 Result: Down-regulated in Transcription
  misc_feature: MA Experiment 20000286 PARAMETER Experiment Name: At_Open_Flower_P Parameter: Age (day) Value: 21
  misc_feature: MA Experiment 20000286 PARAMETER Experiment Name: At_Open_Flower_P Parameter: Plant Line Value: WS
  misc_feature: MA Experiment 20000286 PARAMETER Experiment Name: At_Open_Flower_P Parameter: Tissue Value: Half Open vs. Whole Plant
  misc_feature: MA Experiment ID: 20000794 Result: Down-regulated in Transcription
  misc_feature: MA Experiment 20000794 PARAMETER Experiment Name: At_Petals_P Parameter: Age (day) Value: 23-25 days
  misc_feature: MA Experiment 20000794 PARAMETER Experiment Name: At_Petals_P Parameter: Plant Line Value: WS
  misc_feature: MA Experiment 20000794 PARAMETER Experiment Name: At_Petals_P Parameter: Tissue Value: Petals vs. Whole plant
  misc_feature: MA Experiment ID: 20001248 Result: Up-regulated in Transcription
  misc_feature: MA Experiment 20001248 PARAMETER Experiment Name: At_Far-red-induction_P Parameter: Age (day) Value: 7
  misc_feature: MA Experiment 20001248 PARAMETER Experiment Name: At_Far-red-induction_P Parameter: Light Value: Far-red vs. White
  misc_feature: MA Experiment 20001248 PARAMETER Experiment Name: At_Far-red-induction_P Parameter: Organism Value: A. thaliana
  misc_feature: MA Experiment 20001248 PARAMETER Experiment Name: At_Far-red-induction_P Parameter: Plant Line Value: Columbia
  misc_feature: MA Experiment 20001248 PARAMETER Experiment Name: At_Far-red-induction_P Parameter: Timepoint (hr) Value: 4
  misc_feature: MA Experiment 20001248 PARAMETER Experiment Name: At_Far-red-induction_P Parameter: Tissue Value: Whole Plant
  misc_feature: MA Experiment ID: 20001450 Result: Up-regulated in Transcription
  misc_feature: MA Experiment 20001450 PARAMETER Experiment Name: At_Far-red-induction_P Parameter: Age (day) Value: 7
  misc_feature: MA Experiment 20001450 PARAMETER Experiment Name: At_Far-red-induction_P Parameter: Light Value: Far-red vs. White
  misc_feature: MA Experiment 20001450 PARAMETER Experiment Name: At_Far-red-induction_P Parameter: Organism Value: A. thaliana
  misc_feature: MA Experiment 20001450 PARAMETER Experiment Name: At_Far-red-induction_P Parameter: Plant Line Value: Columbia
  misc_feature: MA Experiment 20001450 PARAMETER Experiment Name: At_Far-red-induction_P Parameter: Timepoint (hr) Value: 8
  misc_feature: MA Experiment 20001450 PARAMETER Experiment Name: At_Far-red-induction_P Parameter: Tissue Value: Whole Plant
atgtctcagtctattcaattctccactccttcacacactcctcaccttctccatctccctcactcacaattcaaccgtcctctctcctctatctccttccgtcgcttccctctaacaaccatcaaatacacttccatcagagcctcctcgtcatcatctccttcaccggatctcgattcatcgtcctcatcatcatcctcgcaagtacttctctcacctaacggtactggtgctgtgaagtctgatgagagatccgttgtcgctacggcggttacgactgatacgtctgggattgaggttgatactgtgacggaagctgagcttaaggagaatggatttagaagtacgaggaggacgaagctgatctgtacgatcggaccggcgacttgtggatttgagcagcttgaggcgcttgctgtgggaggtatgaatgtggcaaggcttaatatgtgtcacggtacgcgtgattggcaccgcggtgtgattcgtagtgttcggaggcttaatgaggagaaaggctttgcggttgctattatgatggatactgaaggtagtgagattcatatgggagatcttggtggtgaagcttcagctaaagcagaggatggtgaggtttggactttcactgttagagcttttgattcttctcgtcctgaacgtaccattagtgttagctacgatggtttcgctgaagatgtaagagttggggatgaacttttggttgatggtgggatggtgagatttgaagtgattgagaagattggtcctgatgttaagtgtctatgtaccgatcctggattgttgcttcctcgagctaacttgacgttttggagagatggaagtcttgtacgagagcgtaatgccatgcttccaacaatttcttccaaggactggttggatattgattttggaattgctgaaggtgtggatttcattgctgtatcgtttgtcaagtcggctgaagtcattaatcaccttaaaagttatcttgctgctcgttcccgtggaggggaaattggagtgattgcaaagatcgagagtatcgattcactgaccaatttggaagaaattattctagcatcagatggggccatggttgcaagaggagatctgggagctcagatacctcttgagcaagttccagcagctcaacagagaatcgtccaagtatgcagagctcttaacaaacccgtcattgtcgcttcacagctattggagtccatgattgagtacccaactccaaccagagcagaagttgccgacgtgtctgaagcagtaagacaaagatcagatgcattgatgctctctggagaatcagctatgggacaattcccagacaaggcgctcacggttctaaggactgtcagtttaagaatcgagagatggtggagggaagagaaacgccatgagtctgtaccgcttcaagccataggctcttcattttcagacaaaatctcagaagagatctgtaactcagctgctaaaatggctaacaatcttggagtggacgcggttttcgtttacacaacgagcggacacatggcatcactggtctcccgatgtcgcccggactgcccgatctttgctttcacaaccacaacctcagtgagaagacgcttaaacctacaatggggacttatcccattccgtctcagcttctcagacgacatggaaagcaacttgaacaaaacattctcgttactgaaatcaagaggtatgatcaaatctggtgacctcgtgatcgcagtctcggacatgctgcaatcaatccaggtaatgaacgtcccgtaattctctctctttatacaatttcgcaatcccgcaaaagagtgttttgtttcctacttttgttactgtttttagactactcttacattagattccagaggcatcatcatcttcggtttgttaacaacagtaatgtgtaagctttgtttgtagtgtgtactgtttgtttttggttttcaataatatcagtaatcttattc

SEQ ID NO: 78900 - protein, 596 aa, Arabidopsis thaliana; identical to SEQ ID NO: 29225
  peptide (1)..(596): Ceres Seq. ID no. 12646689
  misc_feature (486)..(596): Pfam Name: Pyruvate kinase, alpha/beta domain Pfam Description: Pyruvate kinase, alpha/beta domain
  misc_feature (1)..(596): Homolog of NCBI NO: 18403597 NR Description: pyruvate kinase, putative; protein id: supported by cDNA: 13351., supported by cDNA: gi_15983774, by cDNA: gi_16604371 [Arabidopsis thaliana]
  misc_feature (1)..(596): Homolog of NCBI NO: 21537361 NR Description: pyruvate kinase, putative [Arabidopsis thaliana]
  misc_feature (1)..(596): Homolog of NCBI NO: 2497539 NR Description: Pyruvate kinase isozyme A, chloroplast precursor
  misc_feature (1)..(596): Homolog of NCBI NO: 2497541 NR Description: Pyruvate kinase isozyme A, chloroplast precursor
  misc_feature (1)..(596): Homolog of NCBI NO: 2129963 NR Description: pyruvate kinase (EC 2.7.1.40) A, chloroplast -
  misc_feature (140)..(596): Homolog of NCBI NO: 7434450 NR Description: pyruvate kinase (EC 2.7.1.40) isoform beta -
  misc_feature (143)..(596): Homolog of NCBI NO: 34393488 NR Description: putative Pyruvate kinase isozyme A, chloroplast
  misc_feature (273)..(596): Homolog of NCBI NO: 21954080 NR Description: putative pyruvate kinase [Arabidopsis thaliana]
  misc_feature (60)..(585): Homolog of NCBI NO: 29788835 NR Description: putative pyruvate kinase [Oryza sativa (japonica
  misc_feature (115)..(590): Homolog of NCBI NO: 37537030 NR Description: putative pyruvate kinase [Oryza sativa (japonica group)] >gi|19225011|gb|AAL86487.1| putative pyruvate kinase

SEQ ID NO: 78901 - protein, 454 aa, Arabidopsis thaliana; identical to SEQ ID NO: 29226
  peptide (1)..(454): Ceres Seq. ID no. 12646690
  misc_feature (344)..(454): Pfam Name: Pyruvate kinase, alpha/beta domain Pfam Description: Pyruvate kinase, alpha/beta domain
  misc_feature (1)..(454): Homolog of NCBI NO: 18403597 NR Description: pyruvate kinase, putative; protein id: supported by cDNA: 13351., supported by cDNA: gi_15983774, by cDNA: gi_16604371 [Arabidopsis thaliana]
  misc_feature (1)..(454): Homolog of NCBI NO: 21537361 NR Description: pyruvate kinase, putative [Arabidopsis thaliana]
  misc_feature (1)..(454): Homolog of NCBI NO: 2497539 NR Description: Pyruvate kinase isozyme A, chloroplast precursor
  misc_feature (1)..(454): Homolog of NCBI NO: 2497541 NR Description: Pyruvate kinase isozyme A, chloroplast precursor
  misc_feature (1)..(454): Homolog of NCBI NO: 2129963 NR Description: pyruvate kinase (EC 2.7.1.40) A, chloroplast -
  misc_feature (1)..(454): Homolog of NCBI NO: 7434450 NR Description: pyruvate kinase (EC 2.7.1.40) isoform beta -
  misc_feature (1)..(454): Homolog of NCBI NO: 34393488 NR Description: putative Pyruvate kinase isozyme A, chloroplast
  misc_feature (131)..(454): Homolog of NCBI NO: 21954080 NR Description: putative pyruvate kinase [Arabidopsis thaliana]
  misc_feature (1)..(443): Homolog of NCBI NO: 29788835 NR Description: putative pyruvate kinase [Oryza sativa (japonica
  misc_feature (1)..(448): Homolog of NCBI NO: 37537030 NR Description: putative pyruvate kinase [Oryza sativa (japonica group)] >gi|19225011|gb|AAL86487.1| putative pyruvate kinase

SEQ ID NO: 78902 - protein, 447 aa, Arabidopsis thaliana; identical to SEQ ID NO: 29227
  peptide (1)..(447): Ceres Seq. ID no. 12646691
  misc_feature (337)..(447): Pfam Name: Pyruvate kinase, alpha/beta domain Pfam Description: Pyruvate kinase, alpha/beta domain
  misc_feature (1)..(447): Homolog of NCBI NO: 18403597 NR Description: pyruvate kinase, putative; protein id: supported by cDNA: 13351., supported by cDNA: gi_15983774, by cDNA: gi_16604371 [Arabidopsis thaliana]
  misc_feature (1)..(447): Homolog of NCBI NO: 21537361 NR Description: pyruvate kinase, putative [Arabidopsis thaliana]
  misc_feature (1)..(447): Homolog of NCBI NO: 2497539 NR Description: Pyruvate kinase isozyme A, chloroplast precursor
  misc_feature (1)..(447): Homolog of NCBI NO: 2497541 NR Description: Pyruvate kinase isozyme A, chloroplast precursor
  misc_feature (1)..(447): Homolog of NCBI NO: 2129963 NR Description: pyruvate kinase (EC 2.7.1.40) A, chloroplast -
  misc_feature (1)..(447): Homolog of NCBI NO: 7434450 NR Description: pyruvate kinase (EC 2.7.1.40) isoform beta -
  misc_feature (1)..(447): Homolog of NCBI NO: 34393488 NR Description: putative Pyruvate kinase isozyme A, chloroplast
  misc_feature (124)..(447): Homolog of NCBI NO: 21954080 NR Description: putative pyruvate kinase [Arabidopsis thaliana]
  misc_feature (1)..(436): Homolog of NCBI NO: 29788835 NR Description: putative pyruvate kinase [Oryza sativa (japonica
  misc_feature (1)..(441): Homolog of NCBI NO: 37537030 NR Description: putative pyruvate kinase [Oryza sativa (japonica group)] >gi|19225011|gb|AAL86487.1| putative pyruvate kinase

SEQ ID NO: 78903 - DNA, 1380 bp, Arabidopsis thaliana
  misc_feature (1)..(1380): Ceres Seq. ID no. 12646714
  misc_feature: MA Experiment ID: 20000355 Result: Up-regulated in Transcription
  misc_feature: MA Experiment 20000355 PARAMETER Experiment Name: At_Siliques_Sub_P Parameter: Age (day) Value: 21
  misc_feature: MA Experiment 20000355 PARAMETER Experiment Name: At_Siliques_Sub_P Parameter: Organism Value: A. thaliana
  misc_feature: MA Experiment 20000355 PARAMETER Experiment Name: At_Siliques_Sub_P Parameter: Plant Line Value: WS
  misc_feature: MA Experiment 20000355 PARAMETER Experiment Name: At_Siliques_Sub_P Parameter: Tissue Value: Less Than 5mm Siliques vs. Whole Plant
  misc_feature: MA Experiment ID: 20000440 Result: Up-regulated in Transcription
  misc_feature: MA Experiment 20000440 PARAMETER Experiment Name: At_Closed-Flower__Sub_P Parameter: Tissue Value: Closed Flower vs. Whole Plant
atggaacctgatcgccttttcgaatgtcttccgagtaatcttcgaccatcatcagaaggtgaaggtggtggtggaaagactcatgatccccatcacaagagcttagaaaacgctatttttactgtcccaactgtcattcctccaagggttctgcctctgcttcatgacttagctcaacaaatggttcaagctggtcatcagcaacaacttttcaaatcttacagggatactcgagctgcggtgttggaacagagtttgaggaaattaggagtggagaggcttagcaaagatgatgttcagagaatgcaatgggaggtgaaactgttattcgccgcggaaaagaaaatctgcgaccaaattcttgatggtgttgagtctctcagagatcaatgttttggtgaggtcactgtaaatagtgtagctgtgctgcttagtttcggggaggctattgctaaaagcaagagatcacctgaaaaactgtttgttctgttagatatgtatgaaataatgagagagcttcagcctgagattgagttgctctttggaagcaaaccatgtgctgagatgaaagaatccgcgctgaatctgacaaagcggttagctcagacagctcaagaaacttttgctgattttgaagaagcggttgaaaaggatgctacgaaaaccgcggttatggatggaaccgttcatccacttactagctacgttataaattatgtcaagttcttgttcgattaccaaacgacgttgaggctactttttcaagagtttgatagtaaagatcctgatagcgagcttggagctgtaacaacgaggatcatgcacgctttacagaataatctggatggtaaatcgaagcagtacaaagatgtagcattaactcaacttttcctaatgaacaatgttcactatatagtgagatctgttaggaggtcagaagcaaaagatttattaggtgatgattgggttcaaatacatcgaagaattgtacaacaacatgcaaatcagtacaagagagtttcttgggcaaagattttgcagtgtctcacggttcagtcgagtgggagcggtccgatagaaaactcaaatatatcaagagcatcagtaaaagacagattcaagactttcaattctcagtttgaagagcttcaccaaagacaatgccaatggacagttccggacagcgagttgcgtgaatctcttagacttgctgttgcggaagttcttttacctgctttcagatcgtttcttaaacgttttgggccgatgatagagagtggtaagaacccccagaagtatataaggtttagtcctgaagatcttgagagaatgcttaacgagttctttgaaggcaagacatggagtgagccaaagagataa

SEQ ID NO: 78904 - protein, 459 aa, Arabidopsis thaliana
  peptide (1)..(459): Ceres Seq. ID no. 12646715
  misc_feature (1)..(286): Pfam Name: Exo70 exocyst complex subunit Pfam Description: Exo70 exocyst complex subunit
  misc_feature (1)..(286): Homolog of NCBI NO: 15242972 NR Description: putative protein; protein id: At5g52340.1 thaliana] >gi|10177400|dbj|BAB10531.1|
  misc_feature (335)..(459): Homolog of NCBI NO: 15242972 NR Description: putative protein; protein id: At5g52340.1 thaliana] >gi|10177400|dbj|BAB10531.1|
  misc_feature (1)..(459): Homolog of NCBI NO: 22326587 NR Description: putative protein; protein id: At5g03540.1, by cDNA: gi_18176063 [Arabidopsis thaliana]
  misc_feature (2)..(306): Homolog of NCBI NO: 15242974 NR Description: putative protein; protein id: At5g52350.1 thaliana] >gi|10177401|dbj|BAB10532.1|
  misc_feature (345)..(459): Homolog of NCBI NO: 15242974 NR Description: putative protein; protein id: At5g52350.1 thaliana] >gi|10177401|dbj|BAB10532.1|
  misc_feature (106)..(453): Homolog of NCBI NO: 23270388 NR Description: unknown protein [Arabidopsis thaliana]
  misc_feature (22)..(144): Homolog of NCBI NO: 23270388 NR Description: unknown protein [Arabidopsis thaliana]
  misc_feature (106)..(453): Homolog of NCBI NO: 30682979 NR Description: exocyst subunit EXO70 family [Arabidopsis >gi|9294634|dbj|BAB02973.1| gb|AAD25781.1~gene_id:MAG2.5~strong
  misc_feature (22)..(144): Homolog of NCBI NO: 30682979 NR Description: exocyst subunit EXO70 family [Arabidopsis >gi|9294634|dbj|BAB02973.1| gb|AAD25781.1~gene_id:MAG2.5~strong
  misc_feature (16)..(277): Homolog of NCBI NO: 15221040 NR Description: hypothetical protein; protein id: At1g54090.1, by cDNA: gi_20260593 [Arabidopsis thaliana]
MEPDRLFECLPSNLRPSSEGEGGGGKTHDPHHKSLENAIFTVPTVIPPRVLPLLHDLAQQMVQAGHQQQLFKSYRDTRAAVLEQSLRKLGVERLSKDDVQRMQWEVKLLFAAEKKICDQILDGVESLRDQCFGEVTVNSVAVLLSFGEAIAKSKRSPEKLFVLLDMYEIMRELQPEIELLFGSKPCAEMKESALNLTKRLAQTAQETFADFEEAVEKDATKTAVMDGTVHPLTSYVINYVKFLFDYQTTLRLLFQEFDSKDPDSELGAVTTRIMHALQNNLDGKSKQYKDVALTQLFLMNNVHYIVRSVRRSEAKDLLGDDWVQIHRRIVQQHANQYKRVSWAKILQCLTVQSSGSGPIENSNISRASVKDRFKTFNSQFEELHQRQCQWTVPDSELRESLRLAVAEVLLPAFRSFLKRFGPMIESGKNPQKYIRFSPEDLERMLNEFFEGKTWSEPKR

SEQ ID NO: 78905 - protein, 399 aa, Arabidopsis thaliana
  peptide (1)..(399): Ceres Seq. ID no. 12646716
  misc_feature (1)..(226): Pfam Name: Exo70 exocyst complex subunit Pfam Description: Exo70 exocyst complex subunit
  misc_feature (1)..(226): Homolog of NCBI NO: 15242972 NR Description: putative protein; protein id: At5g52340.1 thaliana] >gi|10177400|dbj|BAB10531.1|
  misc_feature (275)..(399): Homolog of NCBI NO: 15242972 NR Description: putative protein; protein id: At5g52340.1 thaliana] >gi|10177400|dbj|BAB10531.1|
  misc_feature (1)..(399): Homolog of NCBI NO: 22326587 NR Description: putative protein; protein id: At5g03540.1, by cDNA: gi_18176063 [Arabidopsis thaliana]
  misc_feature (1)..(246): Homolog of NCBI NO: 15242974 NR Description: putative protein; protein id: At5g52350.1 thaliana] >gi|10177401|dbj|BAB10532.1|
  misc_feature (285)..(399): Homolog of NCBI NO: 15242974 NR Description: putative protein; protein id: At5g52350.1 thaliana] >gi|10177401|dbj|BAB10532.1|
  misc_feature (46)..(393): Homolog of NCBI NO: 23270388 NR Description: unknown protein [Arabidopsis thaliana]
  misc_feature (1)..(84): Homolog of NCBI NO: 23270388 NR Description: unknown protein [Arabidopsis thaliana]
  misc_feature (46)..(393): Homolog of NCBI NO: 30682979 NR Description: exocyst subunit EXO70 family [Arabidopsis >gi|9294634|dbj|BAB02973.1| gb|AAD25781.1~gene_id:MAG2.5~strong
  misc_feature (1)..(84): Homolog of NCBI NO: 30682979 NR Description: exocyst subunit EXO70 family [Arabidopsis >gi|9294634|dbj|BAB02973.1| gb|AAD25781.1~gene_id:MAG2.5~strong
  misc_feature (1)..(217): Homolog of NCBI NO: 15221040 NR Description: hypothetical protein; protein id: At1g54090.1, by cDNA: gi_20260593 [Arabidopsis thaliana]
MVQAGHQQQLFKSYRDTRAAVLEQSLRKLGVERLSKDDVQRMQWEVKLLFAAEKKICDQILDGVESLRDQCFGEVTVNSVAVLLSFGEAIAKSKRSPEKLFVLLDMYEIMRELQPEIELLFGSKPCAEMKESALNLTKRLAQTAQETFADFEEAVEKDATKTAVMDGTVHPLTSYVINYVKFLFDYQTTLRLLFQEFDSKDPDSELGAVTTRIMHALQNNLDGKSKQYKDVALTQLFLMNNVHYIVRSVRRSEAKDLLGDDWVQIHRRIVQQHANQYKRVSWAKILQCLTVQSSGSGPIENSNISRASVKDRFKTFNSQFEELHQRQCQWTVPDSELRESLRLAVAEVLLPAFRSFLKRFGPMIESGKNPQKYIRFSPEDLERMLNEFFEGKTWSEPKR

SEQ ID NO: 78906 - protein, 358 aa, Arabidopsis thaliana
  peptide (1)..(358): Ceres Seq. ID no. 12646717
  misc_feature (1)..(185): Pfam Name: Exo70 exocyst complex subunit Pfam Description: Exo70 exocyst complex subunit
  misc_feature (1)..(185): Homolog of NCBI NO: 15242972 NR Description: putative protein; protein id: At5g52340.1 thaliana] >gi|10177400|dbj|BAB10531.1|
  misc_feature (234)..(358): Homolog of NCBI NO: 15242972 NR Description: putative protein; protein id: At5g52340.1 thaliana] >gi|10177400|dbj|BAB10531.1|
  misc_feature (1)..(358): Homolog of NCBI NO: 22326587 NR Description: putative protein; protein id: At5g03540.1, by cDNA: gi_18176063 [Arabidopsis thaliana]
  misc_feature (1)..(205): Homolog of NCBI NO: 15242974 NR Description: putative protein; protein id: At5g52350.1 thaliana] >gi|10177401|dbj|BAB10532.1|
  misc_feature (244)..(358): Homolog of NCBI NO: 15242974 NR Description: putative protein; protein id: At5g52350.1 thaliana] >gi|10177401|dbj|BAB10532.1|
  misc_feature (5)..(352): Homolog of NCBI NO: 23270388 NR Description: unknown protein [Arabidopsis thaliana]
  misc_feature (1)..(43): Homolog of NCBI NO: 23270388 NR Description: unknown protein [Arabidopsis thaliana]
  misc_feature (5)..(352): Homolog of NCBI NO: 30682979 NR Description: exocyst subunit EXO70 family [Arabidopsis >gi|9294634|dbj|BAB02973.1| gb|AAD25781.1~gene_id:MAG2.5~strong
  misc_feature (1)..(43): Homolog of NCBI NO: 30682979 NR Description: exocyst subunit EXO70 family [Arabidopsis >gi|9294634|dbj|BAB02973.1| gb|AAD25781.1~gene_id:MAG2.5~strong
  misc_feature (1)..(176): Homolog of NCBI NO: 15221040 NR Description: hypothetical protein; protein id: At1g54090.1, by cDNA: gi_20260593 [Arabidopsis thaliana]
MQWEVKLLFAAEKKICDQILDGVESLRDQCFGEVTVNSVAVLLSFGEAIAKSKRSPEKLFVLLDMYEIMRELQPEIELLFGSKPCAEMKESALNLTKRLAQTAQETFADFEEAVEKDATKTAVMDGTVHPLTSYVINYVKFLFDYQTTLRLLFQEFDSKDPDSELGAVTTRIMHALQNNLDGKSKQYKDVALTQLFLMNNVHYIVRSVRRSEAKDLLGDDWVQIHRRIVQQHANQYKRVSWAKILQCLTVQSSGSGPIENSNISRASVKDRFKTFNSQFEELHQRQCQWTVPDSELRESLRLAVAEVLLPAFRSFLKRFGPMIESGKNPQKYIRFSPEDLERMLNEFFEGKTWSEPKR

SEQ ID NO: 78907 - DNA, 658 bp, Arabidopsis thaliana
  misc_feature (1)..(658): Ceres Seq. ID no. 12646722
  misc_feature: MA Experiment ID: 20000307 Result: Up-regulated in Transcription
  misc_feature: MA Experiment 20000307 PARAMETER Experiment Name: At_Germinating_Seeds_Sub_P Parameter: Age (hr) Value: 24 vs. 0
  misc_feature: MA Experiment 20000307 PARAMETER Experiment Name: At_Germinating_Seeds_Sub_P Parameter: Organism Value: A. thaliana
  misc_feature: MA Experiment 20000307 PARAMETER Experiment Name: At_Germinating_Seeds_Sub_P Parameter: Plant Line Value: WS
  misc_feature: MA Experiment 20000307 PARAMETER Experiment Name: At_Germinating_Seeds_Sub_P Parameter: Tissue Value: Germinating Seeds
  misc_feature: MA Experiment ID: 20000355 Result: Up-regulated in Transcription
  misc_feature: MA Experiment 20000355 PARAMETER Experiment Name: At_Siliques_Sub_P Parameter: Age (day) Value: 21
  misc_feature: MA Experiment 20000355 PARAMETER Experiment Name: At_Siliques_Sub_P Parameter: Organism Value: A. thaliana
  misc_feature: MA Experiment 20000355 PARAMETER Experiment Name: At_Siliques_Sub_P Parameter: Plant Line Value: WS
  misc_feature: MA Experiment 20000355 PARAMETER Experiment Name: At_Siliques_Sub_P Parameter: Tissue Value: Less Than 5mm Siliques vs. Whole Plant
  misc_feature: MA Experiment ID: 20000440 Result: Up-regulated in Transcription
  misc_feature: MA Experiment 20000440 PARAMETER Experiment Name: At_Closed-Flower__Sub_P Parameter: Tissue Value: Closed Flower vs. Whole Plant
ctctttttcttcattcttcatctctcgtcccacaaaagaggacaaaaaaccaaataacgagaagtcccatttctctttgttgtcttaggtgttaccttcatcaaccaaacgcaatggcgaacgcggcgtcggggatggcggtggaggacgagtgtaagctgaagtttttggagctaaaagcgaagagaaactataggttcataatattcaggatagatggacaacaagtggtggtagaaaagctgggaagcccccaagagaactacgacgatttcaccaattacctaccgccaaatgaatgccgctacgccgtttatgacttcgacttcaccactgctgagaatatccagaagagcaagatcttcttcatagcatggtcaccggattcatctagagtaaggatgaagatggtgtatgcgagctcaaaggacaggttcaagagggaattggatggtattcaggtggagttacaagccactgacccgagcgagatgagtctcgacatcatcaaaagtcgagctctctagatctccttgcttttctaattatatatccataatcattgtcattcaaacaatttcctcatcttatgtaactttcgatcttggtttcattcattcttgttcttgactgtttttttctattttatttacatttt

SEQ ID NO: 78908 - protein, 174 aa, Arabidopsis thaliana
  peptide (1)..(174): Ceres Seq. ID no. 12646723
  misc_feature (49)..(174): Pfam Name: Cofilin/tropomyosin-type actin-binding protein Pfam Description: Cofilin/tropomyosin-type actin-binding protein
  misc_feature (38)..(174): Homolog of NCBI NO: 18423381 NR Description: actin depolymerizing factor-like; protein id:
  misc_feature (38)..(174): Homolog of NCBI NO: 21537061 NR Description: actin depolymerizing factor-like [Arabidopsis
  misc_feature (45)..(174): Homolog of NCBI NO: 10177402 NR Description: actin depolymerizing factor-like [Arabidopsis
  misc_feature (38)..(174): Homolog of NCBI NO: 22857914 NR Description: pollen specific actin-depolymerizing factor 2
  misc_feature (45)..(174): Homolog of NCBI NO: 15235159 NR Description: actin depolymerizing factor-like protein; protein
  misc_feature (38)..(173): Homolog of NCBI NO: 22857912 NR Description: pollen specific actin-depolymerizing factor 1
  misc_feature (38)..(173): Homolog of NCBI NO: 231509 NR Description: Actin-depolymerizing factor (ADF)
  misc_feature (38)..(172): Homolog of NCBI NO: 15223471 NR Description: actin depolymerizing factor, putative; protein At1g01750.1, supported by cDNA: 545., supported by cDNA:
  misc_feature (38)..(172): Homolog of NCBI NO: 18411410 NR Description: putative actin-depolymerizing factor; protein id:
  misc_feature (48)..(174): Homolog of NCBI NO: 231508 NR Description: ACTIN DEPOLYMERIZING FACTOR (ADF)
LFLHSSSLVPQKRTKNQITRSPISLCCLRCYLHQPNAMANAASGMAVEDECKLKFLELKAKRNYRFIIFRIDGQQVVVEKLGSPQENYDDFTNYLPPNECRYAVYDFDFTTAENIQKSKIFFIAWSPDSSRVRMKMVYASSKDRFKRELDGIQVELQATDPSEMSLDIIKSRAL

SEQ ID NO: 78909 - protein, 137 aa, Arabidopsis thaliana
  peptide (1)..(137): Ceres Seq. ID no. 12646724
  misc_feature (12)..(137): Pfam Name: Cofilin/tropomyosin-type actin-binding protein Pfam Description: Cofilin/tropomyosin-type actin-binding protein
  misc_feature (1)..(137): Homolog of NCBI NO: 18423381 NR Description: actin depolymerizing factor-like; protein id:
  misc_feature (1)..(137): Homolog of NCBI NO: 21537061 NR Description: actin depolymerizing factor-like [Arabidopsis
  misc_feature (8)..(137): Homolog of NCBI NO: 10177402 NR Description: actin depolymerizing factor-like [Arabidopsis
  misc_feature (1)..(137): Homolog of NCBI NO: 22857914 NR Description: pollen specific actin-depolymerizing factor 2
  misc_feature (8)..(137): Homolog of NCBI NO: 15235159 NR Description: actin depolymerizing factor-like protein; protein
  misc_feature (1)..(136): Homolog of NCBI NO: 22857912 NR Description: pollen specific actin-depolymerizing factor 1
  misc_feature (1)..(136): Homolog of NCBI NO: 231509 NR Description: Actin-depolymerizing factor (ADF)
  misc_feature (1)..(135): Homolog of NCBI NO: 15223471 NR Description: actin depolymerizing factor, putative; protein At1g01750.1, supported by cDNA: 545., supported by cDNA:
  misc_feature (1)..(135): Homolog of NCBI NO: 18411410 NR Description: putative actin-depolymerizing factor; protein id:
  misc_feature (11)..(137): Homolog of NCBI NO: 231508 NR Description: ACTIN DEPOLYMERIZING FACTOR (ADF)
MANAASGMAVEDECKLKFLELKAKRNYRFIIFRIDGQQVVVEKLGSPQENYDDFTNYLPPNECRYAVYDFDFTTAENIQKSKIFFIAWSPDSSRVRMKMVYASSKDRFKRELDGIQVELQATDPSEMSLDIIKSRAL

SEQ ID NO: 78910 - protein, 130 aa, Arabidopsis thaliana
  peptide (1)..(130): Ceres Seq. ID no. 12646725
  misc_feature (5)..(130): Pfam Name: Cofilin/tropomyosin-type actin-binding protein Pfam Description: Cofilin/tropomyosin-type actin-binding protein
  misc_feature (1)..(130): Homolog of NCBI NO: 18423381 NR Description: actin depolymerizing factor-like; protein id:
  misc_feature (1)..(130): Homolog of NCBI NO: 21537061 NR Description: actin depolymerizing factor-like [Arabidopsis
  misc_feature (1)..(130): Homolog of NCBI NO: 10177402 NR Description: actin depolymerizing factor-like [Arabidopsis
  misc_feature (1)..(130): Homolog of NCBI NO: 22857914 NR Description: pollen specific actin-depolymerizing factor 2
  misc_feature (1)..(130): Homolog of NCBI NO: 15235159 NR Description: actin depolymerizing factor-like protein; protein
  misc_feature (1)..(129): Homolog of NCBI NO: 22857912 NR Description: pollen specific actin-depolymerizing factor 1
  misc_feature (1)..(129): Homolog of NCBI NO: 231509 NR Description: Actin-depolymerizing factor (ADF)
  misc_feature (1)..(128): Homolog of NCBI NO: 15223471 NR Description: actin depolymerizing factor, putative; protein At1g01750.1, supported by cDNA: 545., supported by cDNA:
  misc_feature (1)..(128): Homolog of NCBI NO: 18411410 NR Description: putative actin-depolymerizing factor; protein id:
  misc_feature (4)..(130): Homolog of NCBI NO: 231508 NR Description: ACTIN DEPOLYMERIZING FACTOR (ADF)
MAVEDECKLKFLELKAKRNYRFIIFRIDGQQVVVEKLGSPQENYDDFTNYLPPNECRYAVYDFDFTTAENIQKSKIFFIAWSPDSSRVRMKMVYASSKDRFKRELDGIQVELQATDPSEMSLDIIKSRAL

SEQ ID NO: 78911 - DNA, 949 bp, Arabidopsis thaliana
  misc_feature (1)..(949): Ceres Seq. ID no. 12646726
  misc_feature: MA Experiment ID: 108434 Result: Down-regulated in Transcription
  misc_feature: MA Experiment 108434 PARAMETER Experiment Name: At_Root_Tips_cDNA_P Parameter: Tissue Value: Root Tips
  misc_feature: MA Experiment ID: 108473 Result: Up-regulated in Transcription
  misc_feature: MA Experiment 108473 PARAMETER Experiment Name: At_Drought_Flowers_cDNA_P Parameter: Timepoint (hr) Value: 7 d
  misc_feature: MA Experiment 108473 PARAMETER Experiment Name: At_Drought_Flowers_cDNA_P Parameter: Tissue Value: Flower
  misc_feature: MA Experiment 108473 PARAMETER Experiment Name: At_Drought_Flowers_cDNA_P Parameter: Treatment Value: Drought vs. No Drought
  misc_feature: MA Experiment ID: 108474 Result: Up-regulated in Transcription
  misc_feature: MA Experiment 108474 PARAMETER Experiment Name: At_Drought_Flowers_cDNA_P Parameter: Timepoint (hr) Value: null
  misc_feature: MA Experiment 108474 PARAMETER Experiment Name: At_Drought_Flowers_cDNA_P Parameter: Treatment Value: Drought vs. No Drought
  misc_feature: MA Experiment ID: 108489 Result: Up-regulated in Transcription
  misc_feature: MA Experiment ID: 108501 Result: Down-regulated in Transcription
  misc_feature: MA Experiment 108501 PARAMETER Experiment Name: At_ap2_floral_buds_cDNA_P Parameter: Plant Line Value: ap2 (Ler.)
  misc_feature: MA Experiment 108501 PARAMETER Experiment Name: At_ap2_floral_buds_cDNA_P Parameter: Tissue Value: Closed Flower
  misc_feature: MA Experiment ID: 108595 Result: Up-regulated in Transcription
  misc_feature: MA Experiment 108595 PARAMETER Experiment Name: At_Ler-pi_Ovule_cDNA_P Parameter: Plant Line Value: null
  misc_feature: MA Experiment ID: 108609 Result: Up-regulated in Transcription
  misc_feature: MA Experiment 108609 PARAMETER Experiment Name: At_100uM_ABA_cDNA_P Parameter: Timepoint (hr) Value: 24
  misc_feature: MA Experiment 108609 PARAMETER Experiment Name: At_100uM_ABA_cDNA_P Parameter: Tissue Value: Aerial
  misc_feature: MA Experiment 108609 PARAMETER Experiment Name: At_100uM_ABA_cDNA_P Parameter: Treatment Value: 100uM ABA vs. No Treatment
  misc_feature: MA Experiment ID: 20000069 Result: Up-regulated in Transcription
  misc_feature: MA Experiment 20000069 PARAMETER Experiment Name: At_100uM_ABA_Mutants_cDNA_P Parameter: Plant Line Value: CS23
  misc_feature: MA Experiment 20000069 PARAMETER Experiment Name: At_100uM_ABA_Mutants_cDNA_P Parameter: Timepoint (hr) Value: 6
  misc_feature: MA Experiment 20000069 PARAMETER Experiment Name: At_100uM_ABA_Mutants_cDNA_P Parameter: Tissue Value: Aerial
  misc_feature: MA Experiment 20000069 PARAMETER Experiment Name: At_100uM_ABA_Mutants_cDNA_P Parameter: Treatment Value: 100uM ABA vs. No Treatment
  misc_feature: MA Experiment ID: 20000070 Result: Up-regulated in Transcription
  misc_feature: MA Experiment 20000070 PARAMETER Experiment Name: At_100uM_ABA_Mutants_cDNA_P Parameter: Plant Line Value: CS24
  misc_feature: MA Experiment 20000070 PARAMETER Experiment Name: At_100uM_ABA_Mutants_cDNA_P Parameter: Timepoint (hr) Value: 6
  misc_feature: MA Experiment 20000070 PARAMETER Experiment Name: At_100uM_ABA_Mutants_cDNA_P Parameter: Tissue Value: Aerial
  misc_feature: MA Experiment 20000070 PARAMETER Experiment Name: At_100uM_ABA_Mutants_cDNA_P Parameter: Treatment Value: 100uM ABA vs. No Treatment
  misc_feature: MA Experiment ID: 20000071 Result: Up-regulated in Transcription
  misc_feature: MA Experiment 20000071 PARAMETER Experiment Name: At_100uM_ABA_Mutants_cDNA_P Parameter: Plant Line Value: CS8104
  misc_feature: MA Experiment 20000071 PARAMETER Experiment Name: At_100uM_ABA_Mutants_cDNA_P Parameter: Timepoint (hr) Value: 6
  misc_feature: MA Experiment 20000071 PARAMETER Experiment Name: At_100uM_ABA_Mutants_cDNA_P Parameter: Tissue Value: Aerial
  misc_feature: MA Experiment 20000071 PARAMETER Experiment Name: At_100uM_ABA_Mutants_cDNA_P Parameter: Treatment Value: 100uM ABA vs. No Treatment
  misc_feature: MA Experiment ID: 20000072 Result: Up-regulated in Transcription
  misc_feature: MA Experiment 20000072 PARAMETER Experiment Name: At_100uM_ABA_Mutants_cDNA_P Parameter: Plant Line Value: CS8105
  misc_feature: MA Experiment 20000072 PARAMETER Experiment Name: At_100uM_ABA_Mutants_cDNA_P Parameter: Timepoint (hr) Value: 6
  misc_feature: MA Experiment 20000072 PARAMETER Experiment Name: At_100uM_ABA_Mutants_cDNA_P Parameter: Tissue Value: Aerial
  misc_feature: MA Experiment 20000072 PARAMETER Experiment Name: At_100uM_ABA_Mutants_cDNA_P Parameter: Treatment Value: 100uM ABA vs. No Treatment
  misc_feature: MA Experiment ID: 20000117 Result: Up-regulated in Transcription
  misc_feature: MA Experiment 20000117 PARAMETER Experiment Name: At_100uM_ABA_Mutants_cDNA_P Parameter: Plant Line Value: Columbia
  misc_feature: MA Experiment 20000117 PARAMETER Experiment Name: At_100uM_ABA_Mutants_cDNA_P Parameter: Timepoint (hr) Value: 6
  misc_feature: MA Experiment 20000117 PARAMETER Experiment Name: At_100uM_ABA_Mutants_cDNA_P Parameter: Tissue Value: Aerial
  misc_feature: MA Experiment 20000117 PARAMETER Experiment Name: At_100uM_ABA_Mutants_cDNA_P Parameter: Treatment Value: 100uM ABA vs. No Treatment
  misc_feature: MA Experiment ID: 20000185 Result: Down-regulated in Transcription
  misc_feature: MA Experiment 20000185 PARAMETER Experiment Name: At_Roots__P Parameter: Age (day) Value: 7 vs. 21
  misc_feature: MA Experiment 20000185 PARAMETER Experiment Name: At_Roots__P Parameter: Organism Value: A. thaliana
  misc_feature: MA Experiment 20000185 PARAMETER Experiment Name: At_Roots__P Parameter: Tissue Value: Roots vs. Whole Plant
  misc_feature: MA Experiment ID: 20000227 Result: Down-regulated in Transcription
  misc_feature: MA Experiment 20000227 PARAMETER Experiment Name: At_Root-Tips-vs-Tops_P Parameter: Tissue Value: Root Tips vs. Root Tops
  misc_feature: MA Experiment ID: 20000234 Result: Up-regulated in Transcription
  misc_feature: MA Experiment 20000234 PARAMETER Experiment Name: At_Siliques_P Parameter: Age (day) Value: 21
  misc_feature: MA Experiment 20000234 PARAMETER Experiment Name: At_Siliques_P Parameter: Organism Value: A. thaliana
  misc_feature: MA Experiment 20000234 PARAMETER Experiment Name: At_Siliques_P Parameter: Plant Line Value: WS
  misc_feature: MA Experiment 20000234 PARAMETER Experiment Name: At_Siliques_P Parameter: Tissue Value: Less Than 5mm Siliques vs. Whole Plant
  misc_feature: MA Experiment ID: 20000265 Result: Up-regulated in Transcription
  misc_feature: MA Experiment 20000265 PARAMETER Experiment Name: At_Open_Flower_P Parameter: Age (day) Value: 21
  misc_feature: MA Experiment 20000265 PARAMETER Experiment Name: At_Open_Flower_P Parameter: Plant Line Value: WS
  misc_feature: MA Experiment 20000265 PARAMETER Experiment Name: At_Open_Flower_P Parameter: Tissue Value: Closed Flower vs. Whole Plant
  misc_feature: MA Experiment ID: 20000267 Result: Up-regulated in Transcription
  misc_feature: MA Experiment 20000267 PARAMETER Experiment Name: At_Drought_P Parameter: Age (day) Value: 7
  misc_feature: MA Experiment 20000267 PARAMETER Experiment Name: At_Drought_P Parameter: Organism Value: A. thaliana
  misc_feature: MA Experiment 20000267 PARAMETER Experiment Name: At_Drought_P Parameter: Plant Line Value: WS
  misc_feature: MA Experiment 20000267 PARAMETER Experiment Name: At_Drought_P Parameter: Timepoint (hr) Value: 6
  misc_feature: MA Experiment 20000267 PARAMETER Experiment Name: At_Drought_P Parameter: Tissue Value: Whole Plant
  misc_feature: MA Experiment 20000267 PARAMETER Experiment Name: At_Drought_P Parameter: Treatment Value: Drought vs. No Drought
  misc_feature: MA Experiment ID: 20000268 Result: Up-regulated in Transcription
  misc_feature: MA Experiment 20000268 PARAMETER Experiment Name: At_100mM_NaCl__P Parameter: Age (day) Value: 14
  misc_feature: MA Experiment 20000268 PARAMETER Experiment Name: At_100mM_NaCl__P Parameter: Organism Value: A. thaliana
  misc_feature: MA Experiment 20000268 PARAMETER Experiment Name: At_100mM_NaCl__P Parameter: Plant Line Value: WS
  misc_feature: MA Experiment 20000268 PARAMETER Experiment Name: At_100mM_NaCl__P Parameter: Timepoint (hr) Value: 6
  misc_feature: MA Experiment 20000268 PARAMETER Experiment Name: At_100mM_NaCl__P Parameter: Tissue Value: Whole Plant
  misc_feature: MA Experiment 20000268 PARAMETER Experiment Name: At_100mM_NaCl__P Parameter: Treatment Value: 100mM NaCl vs. No Treatment
  misc_feature: MA Experiment ID: 20000436 Result: Up-regulated in Transcription
  misc_feature: MA Experiment 20000436 PARAMETER Experiment Name: At_Drought_P Parameter: Age (day) Value: 7
  misc_feature: MA Experiment 20000436 PARAMETER Experiment Name: At_Drought_P Parameter: Organism Value: A. thaliana
  misc_feature: MA Experiment 20000436 PARAMETER Experiment Name: At_Drought_P Parameter: Plant Line Value: WS
  misc_feature: MA Experiment 20000436 PARAMETER Experiment Name: At_Drought_P Parameter: Timepoint (hr) Value: 12
  misc_feature: MA Experiment 20000436 PARAMETER Experiment Name: At_Drought_P Parameter: Tissue Value: Whole Plant
  misc_feature: MA Experiment 20000436 PARAMETER Experiment Name: At_Drought_P Parameter: Treatment Value: Drought vs. No Drought
  misc_feature: MA Experiment ID: 20000437 Result: Up-regulated in Transcription
  misc_feature: MA Experiment 20000437 PARAMETER Experiment Name: At_Drought_P Parameter: Age (day) Value: 8
  misc_feature: MA Experiment 20000437 PARAMETER Experiment Name: At_Drought_P Parameter: Organism Value: A. thaliana
  misc_feature: MA Experiment 20000437 PARAMETER Experiment Name: At_Drought_P Parameter: Plant Line Value: WS
  misc_feature: MA Experiment 20000437 PARAMETER Experiment Name: At_Drought_P Parameter: Timepoint (hr) Value: 24
  misc_feature: MA Experiment 20000437 PARAMETER Experiment Name: At_Drought_P Parameter: Tissue Value: Whole Plant
  misc_feature: MA Experiment 20000437 PARAMETER Experiment Name: At_Drought_P Parameter: Treatment Value: Drought vs. No Drought
  misc_feature: MA Experiment ID: 20000441 Result: Down-regulated in Transcription
  misc_feature: MA Experiment 20000441 PARAMETER Experiment Name: At_1uM_BR-BRZ__P Parameter: Tissue Value: Shoot Apices
  misc_feature: MA Experiment 20000441 PARAMETER Experiment Name: At_1uM_BR-BRZ__P Parameter: Treatment Value: 1uM BR vs. No Treatment
  misc_feature: MA Experiment ID: 20000443 Result: Down-regulated in Transcription
  misc_feature: MA Experiment 20000443 PARAMETER Experiment Name: At_1uM_BR-BRZ__P Parameter: Tissue Value: Shoot Apices
  misc_feature: MA Experiment 20000443 PARAMETER Experiment Name: At_1uM_BR-BRZ__P Parameter: Treatment Value: 1uM BRZ vs. No Treatment
  misc_feature: MA Experiment ID: 20000453 Result: Up-regulated in Transcription
  misc_feature: MA Experiment 20000453 PARAMETER Experiment Name: At_100uM_ABA_P Parameter: Age (day) Value: 15
  misc_feature: MA Experiment 20000453 PARAMETER Experiment Name: At_100uM_ABA_P Parameter: Organism Value: A. thaliana
  misc_feature: MA Experiment 20000453 PARAMETER Experiment Name: At_100uM_ABA_P Parameter: Plant Line Value: WS
  misc_feature: MA Experiment 20000453 PARAMETER Experiment Name: At_100uM_ABA_P Parameter: Timepoint (hr) Value: 24
  misc_feature: MA Experiment 20000453 PARAMETER Experiment Name: At_100uM_ABA_P Parameter: Tissue Value: Aerial
  misc_feature: MA Experiment 20000453 PARAMETER Experiment Name: At_100uM_ABA_P Parameter: Treatment Value: 100uM ABA vs. No Treatment
  misc_feature: MA Experiment ID: 20000709 Result: Down-regulated in Transcription
  misc_feature: MA Experiment 20000709 PARAMETER Experiment Name: At_15mM_NH4NO3_L-to-H_P Parameter: Age (hr) Value: 14
  misc_feature: MA Experiment 20000709 PARAMETER Experiment Name: At_15mM_NH4NO3_L-to-H_P Parameter: Organism Value: A. thaliana
  misc_feature: MA Experiment 20000709 PARAMETER Experiment Name: At_15mM_NH4NO3_L-to-H_P Parameter: Plant Line Value: WS
  misc_feature: MA Experiment 20000709 PARAMETER Experiment Name: At_15mM_NH4NO3_L-to-H_P Parameter: Timepoint (hr) Value: 4
  misc_feature: MA Experiment 20000709 PARAMETER Experiment Name: At_15mM_NH4NO3_L-to-H_P Parameter: Tissue Value: Aerial
  misc_feature: MA Experiment 20000709 PARAMETER Experiment Name: At_15mM_NH4NO3_L-to-H_P Parameter: Treatment Value: 15mM NH4NO3 vs. 30mM Mannitol
  misc_feature: MA Experiment ID: 20001554 Result: Up-regulated in Transcription
  misc_feature: MA Experiment 20001554 PARAMETER Experiment Name: At_Drought_Soil_Dry_P Parameter: Age (day) Value: 21
  misc_feature: MA Experiment 20001554 PARAMETER Experiment Name: At_Drought_Soil_Dry_P Parameter: Organism Value: A. thaliana
  misc_feature: MA Experiment 20001554 PARAMETER Experiment Name: At_Drought_Soil_Dry_P Parameter: Plant Line Value: WS
  misc_feature: MA Experiment 20001554 PARAMETER Experiment Name: At_Drought_Soil_Dry_P Parameter: Post Timepoint (hr) Value: None
  misc_feature: MA Experiment 20001554 PARAMETER Experiment Name: At_Drought_Soil_Dry_P Parameter: Post-Treatment Value: None
  misc_feature: MA Experiment 20001554 PARAMETER Experiment Name: At_Drought_Soil_Dry_P Parameter: Timepoint (day) Value: 7
  misc_feature: MA Experiment 20001554 PARAMETER Experiment Name: At_Drought_Soil_Dry_P Parameter: Treatment Value: Drought vs. No Drought
  misc_feature: MA Experiment ID: 20001555 Result: Up-regulated in Transcription
  misc_feature: MA Experiment 20001555 PARAMETER Experiment Name: At_Drought_Soil_Dry_P Parameter: Age (day) Value: 24
  misc_feature: MA Experiment 20001555 PARAMETER Experiment Name: At_Drought_Soil_Dry_P Parameter: Organism Value: A. thaliana
  misc_feature: MA Experiment 20001555 PARAMETER Experiment Name: At_Drought_Soil_Dry_P Parameter: Plant Line Value: WS
  misc_feature: MA Experiment 20001555 PARAMETER Experiment Name: At_Drought_Soil_Dry_P Parameter: Post Timepoint (hr) Value: None
  misc_feature: MA Experiment 20001555 PARAMETER Experiment Name: At_Drought_Soil_Dry_P Parameter: Post-Treatment Value: None
  misc_feature: MA Experiment 20001555 PARAMETER Experiment Name: At_Drought_Soil_Dry_P Parameter: Timepoint (day) Value: 10
  misc_feature: MA Experiment 20001555 PARAMETER Experiment Name: At_Drought_Soil_Dry_P Parameter: Treatment Value: Drought vs. No Drought
  misc_feature: MA Experiment ID: 20001556 Result: Up-regulated in Transcription
  misc_feature: MA Experiment 20001556 PARAMETER Experiment Name: At_Drought_Soil_Dry_P Parameter: Age (day) Value: 26
  misc_feature: MA Experiment 20001556 PARAMETER Experiment Name: At_Drought_Soil_Dry_P Parameter: Organism Value: A. thaliana
  misc_feature: MA Experiment 20001556 PARAMETER Experiment Name: At_Drought_Soil_Dry_P Parameter: Plant Line Value: WS
  misc_feature: MA Experiment 20001556 PARAMETER Experiment Name: At_Drought_Soil_Dry_P Parameter: Post Timepoint (hr) Value: None
  misc_feature: MA Experiment 20001556 PARAMETER Experiment Name: At_Drought_Soil_Dry_P Parameter: Post-Treatment Value: None
  misc_feature: MA Experiment 20001556 PARAMETER Experiment Name: At_Drought_Soil_Dry_P Parameter: Timepoint (day) Value: 12
  misc_feature: MA Experiment 20001556 PARAMETER Experiment Name: At_Drought_Soil_Dry_P Parameter: Treatment Value: Drought vs. No Drought
  misc_feature: MA Experiment ID: 20001905 Result: Up-regulated in Transcription
  misc_feature: MA Experiment 20001905 PARAMETER Experiment Name: At_Drought_Reproduction_P Parameter: Age (day) Value: 40
  misc_feature: MA Experiment 20001905 PARAMETER Experiment Name: At_Drought_Reproduction_P Parameter: Organism Value: A. thaliana
  misc_feature: MA Experiment 20001905 PARAMETER Experiment Name: At_Drought_Reproduction_P Parameter: Plant Line Value: WS
  misc_feature: MA Experiment 20001905 PARAMETER Experiment Name: At_Drought_Reproduction_P Parameter: Timepoint (day) Value: 10
  misc_feature: MA Experiment 20001905 PARAMETER Experiment Name: At_Drought_Reproduction_P Parameter: Tissue Value: Rosettes
  misc_feature: MA Experiment 20001905 PARAMETER Experiment Name: At_Drought_Reproduction_P Parameter: Treatment Value: Drought vs. No Drought
  misc_feature: MA Experiment ID: 20001906 Result: Up-regulated in Transcription
  misc_feature: MA Experiment 20001906 PARAMETER Experiment Name: At_Drought_Reproduction_P Parameter: Age (day) Value: 35
  misc_feature: MA Experiment 20001906 PARAMETER Experiment Name: At_Drought_Reproduction_P Parameter: Organism Value: A. thaliana
  misc_feature: MA Experiment 20001906 PARAMETER Experiment Name: At_Drought_Reproduction_P Parameter: Plant Line Value: WS
  misc_feature: MA Experiment 20001906 PARAMETER Experiment Name: At_Drought_Reproduction_P Parameter: Timepoint (day) Value: 5
  misc_feature: MA Experiment 20001906 PARAMETER Experiment Name: At_Drought_Reproduction_P Parameter: Tissue Value: Siliques
  misc_feature: MA Experiment 20001906 PARAMETER Experiment Name: At_Drought_Reproduction_P Parameter: Treatment Value: Drought vs. No Drought
  misc_feature: MA Experiment ID: 20001910 Result: Up-regulated in Transcription
  misc_feature: MA Experiment 20001910 PARAMETER Experiment Name: At_Drought_Reproduction_P Parameter: Age (day) Value: 37
  misc_feature: MA Experiment 20001910 PARAMETER Experiment Name: At_Drought_Reproduction_P Parameter: Organism Value: A. thaliana
  misc_feature: MA Experiment 20001910 PARAMETER Experiment Name: At_Drought_Reproduction_P Parameter: Plant Line Value: WS
  misc_feature: MA Experiment 20001910 PARAMETER Experiment Name: At_Drought_Reproduction_P Parameter: Timepoint (day) Value: 7
  misc_feature: MA Experiment 20001910 PARAMETER Experiment Name: At_Drought_Reproduction_P Parameter: Tissue Value: Flowers
  misc_feature: MA Experiment 20001910 PARAMETER Experiment Name: At_Drought_Reproduction_P Parameter: Treatment Value: Drought vs. No Drought
  misc_feature: MA Experiment ID: 20001911 Result: Up-regulated in Transcription
  misc_feature: MA Experiment 20001911 PARAMETER Experiment Name: At_Drought_Reproduction_P Parameter: Age (day) Value: 40
  misc_feature: MA Experiment 20001911 PARAMETER Experiment Name: At_Drought_Reproduction_P Parameter: Organism Value: A. thaliana
  misc_feature: MA Experiment 20001911 PARAMETER Experiment Name: At_Drought_Reproduction_P Parameter: Plant Line Value: WS
  misc_feature: MA Experiment 20001911 PARAMETER Experiment Name: At_Drought_Reproduction_P Parameter: Timepoint (day) Value: 10
  misc_feature: MA Experiment 20001911 PARAMETER Experiment Name: At_Drought_Reproduction_P Parameter: Tissue Value: Flowers
  misc_feature: MA Experiment 20001911 PARAMETER Experiment Name: At_Drought_Reproduction_P Parameter: Treatment Value: Drought vs. No Drought
actacacccaaaagaacatctttccttcgaattttctttcaattaacatttcttttacttgtctccttgtgtcttcacttcacatcacaacatggctttgaagacagttttcgtagcttttatgattctccttgccatctattcgcaaacgacgtttggggacgatgtgaagtgcgagaatctggatgaaaacacgtgtgccttcgcggtctcgtccactggaaaacgttgcgttttggagaagagcatgaagaggagcgggatcgaggtgtacacatgtcgatcatcggagatagaagctaacaaggtcacaaacattattgaatcggacgagtgcattaaagcgtgtggtctagaccggaaagctttaggtatatcttcggacgcattgttggaatctcagttcacacataaactctgctcggttaaatgcttaaaccaatgtcctaacgtagtcgatctctacttcaaccttgctgctggtgaaggagtgtatttaccaaagctatgtgaatcacaagaagggaagtcaagaagagcaatgtcggaaattaggagctcgggaattgcaatggacactcttgcaccggttggaccagtcatgttgggcgagatagcacctgagccggctacttcaatggacaacatgccttacgtgccggcaccttcaccgtattaattaaggcaagggaaaatggagaggacacgtatgatatcatgagttttcgacgagaataattaagagatttatgtttagttcgacggttttagtattacatcgtttattgcgtccttatatatatgtacttcataaaaacacaccacgacacattaagagatggtgaaagtaggctgcgttctggtgtaacttttacacaagtaacgtcttataatatatatgattcgaataaaatgttgagttttggtgaaaatatataatatgtttctg

SEQ ID NO: 78912 - protein, 195 aa, Arabidopsis thaliana; identical to SEQ ID NO: 30470
  peptide (1)..(195): Ceres Seq. ID no. 12646727
  misc_feature (1)..(195): Homolog of NCBI NO: 15237149 NR Description: photoassimilate-responsive protein PAR-like protein id: At5g52390.1, supported by cDNA: 17872., supported by gi_20268724 [Arabidopsis thaliana] >gi|10177405|dbj|BAB10536.1|
  misc_feature (1)..(195): Homolog of NCBI NO: 21553901 NR Description: photoassimilate-responsive protein PAR-like
  misc_feature (2)..(169): Homolog of NCBI NO: 2129956 NR Description: photoassimilate-responsive protein PAR-1c - common tobacco >gi|871489|emb|CAA58732.1| mRNA inducible by
  misc_feature (1)..(194): Homolog of NCBI NO: 2129955 NR Description: photoassimilate-responsive protein PAR-1b - common tobacco >gi|871487|emb|CAA58731.1| mRNA inducible by
  misc_feature (1)..(194): Homolog of NCBI NO: 2129957 NR Description: photoassimilate-responsive protein precursor
  misc_feature (1)..(194): Homolog of NCBI NO: 1362109 NR Description: PAR-1a protein - common tobacco mRNA inducible by sucrose and salicylic acid and potato virus Y
  misc_feature (1)..(193): Homolog of NCBI NO: 15232407 NR Description: photoassimilate-responsive protein PAR-1b -like protein id: At3g54040.1, supported by cDNA: gi_18252938
  misc_feature (3)..(165): Homolog of NCBI NO: 10798750 NR Description: Elicitor inducible gene product Nt-SubE80

SEQ ID NO: 78913 - protein, 185 aa, Arabidopsis thaliana; identical to SEQ ID NO: 30471
  peptide (1)..(185): Ceres Seq. ID no. 12646728
  misc_feature (1)..(185): Homolog of NCBI NO: 15237149 NR Description: photoassimilate-responsive protein PAR-like protein id: At5g52390.1, supported by cDNA: 17872., supported by gi_20268724 [Arabidopsis thaliana] >gi|10177405|dbj|BAB10536.1|
  misc_feature (1)..(185): Homolog of NCBI NO: 21553901 NR Description: photoassimilate-responsive protein PAR-like
  misc_feature (1)..(159): Homolog of NCBI NO: 2129956 NR Description: photoassimilate-responsive protein PAR-1c - common tobacco >gi|871489|emb|CAA58732.1| mRNA inducible by
  misc_feature (1)..(184): Homolog of NCBI NO: 2129955 NR Description: photoassimilate-responsive protein PAR-1b - common tobacco >gi|871487|emb|CAA58731.1| mRNA inducible by
  misc_feature (1)..(184): Homolog of NCBI NO: 2129957 NR Description: photoassimilate-responsive protein precursor
  misc_feature (1)..(184): Homolog of NCBI NO: 1362109 NR Description: PAR-1a protein - common tobacco mRNA inducible by sucrose and salicylic acid and potato virus Y
  misc_feature (1)..(183): Homolog of NCBI NO: 15232407 NR Description: photoassimilate-responsive protein PAR-1b -like protein id: At3g54040.1, supported by cDNA: gi_18252938
  misc_feature (1)..(155): Homolog of NCBI NO: 10798750 NR Description: Elicitor inducible gene product Nt-SubE80

SEQ ID NO: 78914 - protein, 143 aa, Arabidopsis thaliana; identical to SEQ ID NO: 30472
  peptide (1)..(143): Ceres Seq. ID no. 12646729
  misc_feature (1)..(143): Homolog of NCBI NO: 15237149 NR Description: photoassimilate-responsive protein PAR-like protein id: At5g52390.1, supported by cDNA: 17872., supported by gi_20268724 [Arabidopsis thaliana] >gi|10177405|dbj|BAB10536.1|
  misc_feature (1)..(143): Homolog of NCBI NO: 21553901 NR Description: photoassimilate-responsive protein PAR-like
  misc_feature (1)..(117): Homolog of NCBI NO: 2129956 NR Description: photoassimilate-responsive protein PAR-1c - common tobacco >gi|871489|emb|CAA58732.1| mRNA inducible by
  misc_feature (1)..(142): Homolog of NCBI NO: 2129955 NR Description: photoassimilate-responsive protein PAR-1b - common tobacco >gi|871487|emb|CAA58731.1| mRNA inducible by
  misc_feature (1)..(142): Homolog of NCBI NO: 2129957 NR Description: photoassimilate-responsive protein precursor
  misc_feature (1)..(142): Homolog of NCBI NO: 1362109 NR Description: PAR-1a protein - common tobacco mRNA inducible by sucrose and salicylic acid and potato virus Y
  misc_feature (1)..(141): Homolog of NCBI NO: 15232407 NR Description: photoassimilate-responsive protein PAR-1b -like protein id: At3g54040.1, supported by cDNA: gi_18252938
  misc_feature (1)..(113): Homolog of NCBI NO: 10798750 NR Description: Elicitor inducible gene product Nt-SubE80

SEQ ID NO: 78915 - DNA, 1176 bp, Arabidopsis thaliana
  misc_feature (1)..(1176): Ceres Seq. ID no. 12646738
  misc_feature: MA Experiment ID: 108434 Result: Up-regulated in Transcription
  misc_feature: MA Experiment 108434 PARAMETER Experiment Name: At_Root_Tips_cDNA_P Parameter: Tissue Value: Root Tips
  misc_feature: MA Experiment ID: 108461 Result: Down-regulated in Transcription
  misc_feature: MA Experiment 108461 PARAMETER Experiment Name: At_Germinating_Seeds_cDNA_P Parameter: Age (day) Value: 1 vs. 0
  misc_feature: MA Experiment 108461 PARAMETER Experiment Name: At_Germinating_Seeds_cDNA_P Parameter: Tissue Value: Germinating Seeds
  misc_feature: MA Experiment ID: 108462 Result: Down-regulated in Transcription
  misc_feature: MA Experiment 108462 PARAMETER Experiment Name: At_Germinating_Seeds_cDNA_P Parameter: Age (day) Value: 2 vs. 0
  misc_feature: MA Experiment 108462 PARAMETER Experiment Name: At_Germinating_Seeds_cDNA_P Parameter: Tissue Value: Germinating Seeds
  misc_feature: MA Experiment ID: 108463 Result: Down-regulated in Transcription
  misc_feature: MA Experiment 108463 PARAMETER Experiment Name: At_Germinating_Seeds_cDNA_P Parameter: Age (day) Value: 3 vs. 0
  misc_feature: MA Experiment 108463 PARAMETER Experiment Name: At_Germinating_Seeds_cDNA_P Parameter: Tissue Value: Germinating Seeds
  misc_feature: MA Experiment ID: 108464 Result: Down-regulated in Transcription
  misc_feature: MA Experiment 108464 PARAMETER Experiment Name: At_Germinating_Seeds_cDNA_P Parameter: Age (day) Value: 4 vs. 0
  misc_feature: MA Experiment 108464 PARAMETER Experiment Name: At_Germinating_Seeds_cDNA_P Parameter: Tissue Value: Germinating Seeds
  misc_feature: MA Experiment ID: 108607 Result: Down-regulated in Transcription
  misc_feature: MA Experiment 108607 PARAMETER Experiment Name: At_100uM_ABA_cDNA_P Parameter: Timepoint (hr) Value: 4
  misc_feature: MA Experiment 108607 PARAMETER Experiment Name: At_100uM_ABA_cDNA_P Parameter: Tissue Value: Aerial
  misc_feature: MA Experiment 108607 PARAMETER Experiment Name: At_100uM_ABA_cDNA_P Parameter: Treatment Value: 100uM ABA vs. No Treatment
  misc_feature: MA Experiment ID: 20000111 Result: Up-regulated in Transcription
  misc_feature: MA Experiment 20000111 PARAMETER Experiment Name: At_42deg_Heat_cDNA_P Parameter: Temperature (deg C) Value: 42 vs. 22
  misc_feature: MA Experiment 20000111 PARAMETER Experiment Name: At_42deg_Heat_cDNA_P Parameter: Timepoint (hr) Value: 6
  misc_feature: MA Experiment 20000111 PARAMETER Experiment Name: At_42deg_Heat_cDNA_P Parameter: Tissue Value: Aerial
  misc_feature: MA Experiment ID: 20000173 Result: Up-regulated in Transcription
  misc_feature: MA Experiment 20000173 PARAMETER Experiment Name: At_42deg_Heat_P Parameter: Age (day) Value: 14
  misc_feature: MA Experiment 20000173 PARAMETER Experiment Name: At_42deg_Heat_P Parameter: Organism Value: A. thaliana
  misc_feature: MA Experiment 20000173 PARAMETER Experiment Name: At_42deg_Heat_P Parameter: Plant Line Value: WS
  misc_feature: MA Experiment 20000173 PARAMETER Experiment Name: At_42deg_Heat_P Parameter: Temperature (deg C) Value: 42 vs. 22
  misc_feature: MA Experiment 20000173 PARAMETER Experiment Name: At_42deg_Heat_P Parameter: Timepoint (hr) Value: 6
  misc_feature: MA Experiment 20000173 PARAMETER Experiment Name: At_42deg_Heat_P Parameter: Tissue Value: Aerial
  misc_feature: MA Experiment ID: 20000180 Result: Down-regulated in Transcription
  misc_feature: MA Experiment 20000180 PARAMETER Experiment Name: At_Germinating_Seeds_P Parameter: Age (hr) Value: 24 vs. 0
  misc_feature: MA Experiment 20000180 PARAMETER Experiment Name: At_Germinating_Seeds_P Parameter: Tissue Value: Germinating Seeds
  misc_feature: MA Experiment ID: 20000456 Result: Up-regulated in Transcription
  misc_feature: MA Experiment 20000456 PARAMETER Experiment Name: At_100uM_BA_P Parameter: Age (day) Value: 14
  misc_feature: MA Experiment 20000456 PARAMETER Experiment Name: At_100uM_BA_P Parameter: Organism Value: A. thaliana
  misc_feature: MA Experiment 20000456 PARAMETER Experiment Name: At_100uM_BA_P Parameter: Plant Line Value: WS
  misc_feature: MA Experiment 20000456 PARAMETER Experiment Name: At_100uM_BA_P Parameter: Timepoint (hr) Value: 6
  misc_feature: MA Experiment 20000456 PARAMETER Experiment Name: At_100uM_BA_P Parameter: Tissue Value: Aerial
  misc_feature: MA Experiment 20000456 PARAMETER Experiment Name: At_100uM_BA_P Parameter: Treatment Value: 100uM BA vs. No Treatment
  misc_feature: MA Experiment ID: 20000794 Result: Down-regulated in Transcription
  misc_feature: MA Experiment 20000794 PARAMETER Experiment Name: At_Petals_P Parameter: Age (day) Value: 23-25 days
  misc_feature: MA Experiment 20000794 PARAMETER Experiment Name: At_Petals_P Parameter: Plant Line Value: WS
  misc_feature: MA Experiment 20000794 PARAMETER Experiment Name: At_Petals_P Parameter: Tissue Value: Petals vs. Whole plant
  misc_feature: MA Experiment ID: 20001248 Result: Up-regulated in Transcription
  misc_feature: MA Experiment 20001248 PARAMETER Experiment Name: At_Far-red-induction_P Parameter: Age (day) Value: 7
  misc_feature: MA Experiment 20001248 PARAMETER Experiment Name: At_Far-red-induction_P Parameter: Light Value: Far-red vs. White
  misc_feature: MA Experiment 20001248 PARAMETER Experiment Name: At_Far-red-induction_P Parameter: Organism Value: A. thaliana
  misc_feature: MA Experiment 20001248 PARAMETER Experiment Name: At_Far-red-induction_P Parameter: Plant Line Value: Columbia
  misc_feature: MA Experiment 20001248 PARAMETER Experiment Name: At_Far-red-induction_P Parameter: Timepoint (hr) Value: 4
  misc_feature: MA Experiment 20001248 PARAMETER Experiment Name: At_Far-red-induction_P Parameter: Tissue Value: Whole Plant
  misc_feature: MA Experiment ID: 20001558 Result: Up-regulated in Transcription
  misc_feature: MA Experiment 20001558 PARAMETER Experiment Name: At_Drought_Soil_Dry_P Parameter: Age (day) Value: 27
  misc_feature: MA Experiment 20001558 PARAMETER Experiment Name: At_Drought_Soil_Dry_P Parameter: Organism Value: A. thaliana
  misc_feature: MA Experiment 20001558 PARAMETER Experiment Name: At_Drought_Soil_Dry_P Parameter: Plant Line Value: WS
  misc_feature: MA Experiment 20001558 PARAMETER Experiment Name: At_Drought_Soil_Dry_P Parameter: Post Timepoint (hr) Value: 6
  misc_feature: MA Experiment 20001558 PARAMETER Experiment Name: At_Drought_Soil_Dry_P Parameter: Post-Treatment Value: Re-Water vs. No Drought
  misc_feature: MA Experiment 20001558 PARAMETER Experiment Name: At_Drought_Soil_Dry_P Parameter: Timepoint (day) Value: 13
  misc_feature: MA Experiment 20001558 PARAMETER Experiment Name: At_Drought_Soil_Dry_P Parameter: Treatment Value: Drought vs. No Drought
  misc_feature: MA Experiment ID: 20001757 Result: Up-regulated in Transcription
  misc_feature: MA Experiment 20001757 PARAMETER Experiment Name: At_50mM_NH4NO3_L-to-H_P Parameter: Timepoint (hr) Value: 6
  misc_feature: MA Experiment 20001757 PARAMETER Experiment Name: At_50mM_NH4NO3_L-to-H_P Parameter: Tissue Value: Leaf
  misc_feature: MA Experiment 20001757 PARAMETER Experiment Name: At_50mM_NH4NO3_L-to-H_P Parameter: Treatment Value: 50mM NH4NO3 vs 100mM Mannitol
agccaccaccgcacatctctctcctttgccctcgttttttttcggttctcgtctttcgttcttcacttttagacaagcaaatatgagacccccagttacaggaggacgtggtggtggaggattcagaggtggaagagatggtggtggaagaggttttggaggtggaagaagctttggaggaggccgtagtggtgacagaggccgtagtgggcctcgcggcagaggacgtggtgcgcctcgtggtcgtggaggaccacctcgtggaggaatgaaaggaggaagcaaagtgattgttgagcctcacagacatgcgggagtgtttattgctaagggtaaagaagatgctcttgtcactaagaatttggttcctggtgaagctgtttacaatgagaagagaatctctgttcagaatgaagatggaactaaggttgaatacagagtttggaatccgtttagatctaagttagctgctgcaattcttggtggtgtcgacaacatttggatcaaacctggtgccaaagttctttacttgggtgctgcttctgggaccactgtctctcatgtttctgacctcgttggccctgagggatgtgtttatgctgttgagttttctcatagaagtggtagagatttggtgaacatggccaagaagagaactaacgttattccaatcattgaagatgctagacatccggctaagtacagaatgctcgtgggcatggttgatgtcatattctctgatgttgctcagccagatcaggcaagaatcttggccctgaatgcctcatttttcctcaaaactggtggacactttgttatctcaatcaaggccaactgtatcgactctacagttgcagcagaagcagtcttccagagcgaggtgaagaagctgcaacaagagcagtttaagccagcagaacaggtgactctcgagccgtttgagcgtgaccatgcctgtgttgttggtggttaccgcatgccgaagaaacaaaagaccccagcctcatagaggaactgtggacagtagtgcctgtgtattaagacttatttactgggttttgtttttatctccttgcttgttgtattaagctagagatggataatgcttttatgtctcatttggaaaattttatcctcgttttagaactaatatatattgatgcaacattttcgtcc

SEQ ID NO: 78916 - protein, 335 aa, Arabidopsis thaliana
  peptide (1)..(335): Ceres Seq. ID no. 12646739
  misc_feature (94)..(326): Pfam Name: Fibrillarin Pfam Description: Fibrillarin
  misc_feature (28)..(335): Homolog of NCBI NO: 30696189 NR Description: fibrillarin 1 (Fib1) (SKIP7) [Arabidopsis >gi|9965653|gb|AAG10103.1|AF233443_1 fibrillarin 1 [Arabidopsis
  misc_feature (28)..(335): Homolog of NCBI NO: 6003681 NR Description: fibrillarin homolog [Arabidopsis thaliana]
  misc_feature (28)..(331): Homolog of NCBI NO: 18416588 NR Description: fibrillarin 2 (AtFib2); protein id: At4g25630.1, by cDNA: 11319., supported by cDNA: gi_15028154, supported by
  misc_feature (28)..(331): Homolog of NCBI NO: 15028155 NR Description: putative fibrillarin 2 protein AtFib2
  misc_feature (34)..(331): Homolog of NCBI NO: 38566188 NR Description: Fibrillarin [Silurana tropicalis]
  misc_feature (34)..(331): Homolog of NCBI NO: 30353806 NR Description: Unknown (protein for MGC:56145) [Danio rerio]
  misc_feature (34)..(331): Homolog of NCBI NO: 27924365 NR Description: Unknown (protein for IMAGE:5543421) [Xenopus
  misc_feature (34)..(331): Homolog of NCBI NO: 34855407 NR Description: similar to fibrillarin [Rattus norvegicus]
  misc_feature (34)..(331): Homolog of NCBI NO: 119856 NR Description: Fibrillarin >gi|2134062|pir||I51417 fibrillarin -
  misc_feature (34)..(331): Homolog of NCBI NO: 30583881 NR Description: Homo sapiens fibrillarin [synthetic construct]
ATTAHLSPLPSFFFGSRLSFFTFRQANMRPPVTGGRGGGGFRGGRDGGGRGFGGGRSFGGGRSGDRGRSGPRGRGRGAPRGRGGPPRGGMKGGSKVIVEPHRHAGVFIAKGKEDALVTKNLVPGEAVYNEKRISVQNEDGTKVEYRVWNPFRSKLAAAILGGVDNIWIKPGAKVLYLGAASGTTVSHVSDLVGPEGCVYAVEFSHRSGRDLVNMAKKRTNVIPIIEDARHPAKYRMLVGMVDVIFSDVAQPDQARILALNASFFLKTGGHFVISIKANCIDSTVAAEAVFQSEVKKLQQEQFKPAEQVTLEPFERDHACVVGGYRMPKKQKTPAS

SEQ ID NO: 78917 - protein, 308 aa, Arabidopsis thaliana; identical to SEQ ID NO: 76710
  peptide (1)..(308): Ceres Seq. ID no. 12646740
  misc_feature (67)..(299): Pfam Name: Fibrillarin Pfam Description: Fibrillarin
  misc_feature (1)..(308): Homolog of NCBI NO: 30696189 NR Description: fibrillarin 1 (Fib1) (SKIP7) [Arabidopsis >gi|9965653|gb|AAG10103.1|AF233443_1 fibrillarin 1 [Arabidopsis
  misc_feature (1)..(308): Homolog of NCBI NO: 6003681 NR Description: fibrillarin homolog [Arabidopsis thaliana]
  misc_feature (1)..(304): Homolog of NCBI NO: 18416588 NR Description: fibrillarin 2 (AtFib2); protein id: At4g25630.1, by cDNA: 11319., supported by cDNA: gi_15028154, supported by
  misc_feature (1)..(304): Homolog of NCBI NO: 15028155 NR Description: putative fibrillarin 2 protein AtFib2
  misc_feature (7)..(304): Homolog of NCBI NO: 38566188 NR Description: Fibrillarin [Silurana tropicalis]
  misc_feature (7)..(304): Homolog of NCBI NO: 30353806 NR Description: Unknown (protein for MGC:56145) [Danio rerio]
  misc_feature (7)..(304): Homolog of NCBI NO: 27924365 NR Description: Unknown (protein for IMAGE:5543421) [Xenopus
  misc_feature (7)..(304): Homolog of NCBI NO: 34855407 NR Description: similar to fibrillarin [Rattus norvegicus]
  misc_feature (7)..(304): Homolog of NCBI NO: 119856 NR Description: Fibrillarin >gi|2134062|pir||I51417 fibrillarin -
  misc_feature (7)..(304): Homolog of NCBI NO: 30583881 NR Description: Homo sapiens fibrillarin [synthetic construct]

SEQ ID NO: 78918 - protein, 246 aa, Arabidopsis thaliana; identical to SEQ ID NO: 76711
  peptide (1)..(246): Ceres Seq. ID no. 12646741
  misc_feature (5)..(237): Pfam Name: Fibrillarin Pfam Description: Fibrillarin
  misc_feature (1)..(246): Homolog of NCBI NO: 30696189 NR Description: fibrillarin 1 (Fib1) (SKIP7) [Arabidopsis >gi|9965653|gb|AAG10103.1|AF233443_1 fibrillarin 1 [Arabidopsis
  misc_feature (1)..(246): Homolog of NCBI NO: 6003681 NR Description: fibrillarin homolog [Arabidopsis thaliana]
  misc_feature (1)..(242): Homolog of NCBI NO: 18416588 NR Description: fibrillarin 2 (AtFib2); protein id: At4g25630.1, by cDNA: 11319., supported by cDNA: gi_15028154, supported by
  misc_feature (1)..(242): Homolog of NCBI NO: 15028155 NR Description: putative fibrillarin 2 protein AtFib2
  misc_feature (1)..(242): Homolog of NCBI NO: 38566188 NR Description: Fibrillarin [Silurana tropicalis]
  misc_feature (1)..(242): Homolog of NCBI NO: 30353806 NR Description: Unknown (protein for MGC:56145) [Danio rerio]
  misc_feature (1)..(242): Homolog of NCBI NO: 27924365 NR Description: Unknown (protein for IMAGE:5543421) [Xenopus
  misc_feature (1)..(242): Homolog of NCBI NO: 34855407 NR Description: similar to fibrillarin [Rattus norvegicus]
  misc_feature (1)..(242): Homolog of NCBI NO: 119856 NR Description: Fibrillarin >gi|2134062|pir||I51417 fibrillarin -
  misc_feature (1)..(242): Homolog of NCBI NO: 30583881 NR Description: Homo sapiens fibrillarin [synthetic construct]

SEQ ID NO: 78919 - DNA, 1566 bp, Arabidopsis thaliana
  misc_feature (1)..(1566): Ceres Seq. ID no. 12646782
  misc_feature: MA Experiment ID: 20000184 Result: Up-regulated in Transcription
  misc_feature: MA Experiment 20000184 PARAMETER Experiment Name: At_Shoots__P Parameter: Age (day) Value: 7
  misc_feature: MA Experiment 20000184 PARAMETER Experiment Name: At_Shoots__P Parameter: Tissue Value: Shoots vs. Whole Plant
  misc_feature: MA Experiment ID: 20000185 Result: Up-regulated in Transcription
  misc_feature: MA Experiment 20000185 PARAMETER Experiment Name: At_Roots__P Parameter: Age (day) Value: 7 vs. 21
  misc_feature: MA Experiment 20000185 PARAMETER Experiment Name: At_Roots__P Parameter: Organism Value: A. thaliana
  misc_feature: MA Experiment 20000185 PARAMETER Experiment Name: At_Roots__P Parameter: Tissue Value: Roots vs. Whole Plant
  misc_feature: MA Experiment ID: 20000439 Result: Up-regulated in Transcription
  misc_feature: MA Experiment 20000439 PARAMETER Experiment Name: At_Roots__P Parameter: Age (day) Value: 14 vs. 21
  misc_feature: MA Experiment 20000439 PARAMETER Experiment Name: At_Roots__P Parameter: Organism Value: A. thaliana
  misc_feature: MA Experiment 20000439 PARAMETER Experiment Name: At_Roots__P Parameter: Tissue Value: Roots vs. Whole Plant
  misc_feature: MA Experiment ID: 20000460 Result: Down-regulated in Transcription
  misc_feature: MA Experiment 20000460 PARAMETER Experiment Name: At_10percent_PEG_P Parameter: Age (day) Value: 12
  misc_feature: MA Experiment 20000460 PARAMETER Experiment Name: At_10percent_PEG_P Parameter: Organism Value: A. thaliana
  misc_feature: MA Experiment 20000460 PARAMETER Experiment Name: At_10percent_PEG_P Parameter: Plant Line Value: WS
  misc_feature: MA Experiment 20000460 PARAMETER Experiment Name: At_10percent_PEG_P Parameter: Timepoint (day) Value: 12
  misc_feature: MA Experiment 20000460 PARAMETER Experiment Name: At_10percent_PEG_P Parameter: Tissue Value: Whole Plant
  misc_feature: MA Experiment 20000460 PARAMETER Experiment Name: At_10percent_PEG_P Parameter: Treatment Value: 10percent PEG vs. No Treatment
atggctgcaaatgatgtcccttgctgtgagactatgttctgggtgtacctactcgtatgtgttgctctagtggttttcgcaggtttgatgtcaggactgactcttgggctcatgtcccttagtattgtcgagctcgaggtcatgatcaaagccggtgaaccccatgaccgcaaaaatgcagagaagattctgcccctcgttaaaaaccagcaccttctcttgtgtacactccttataggcaatgctttggcaatggaggctctaccgatctttgtcgattccctgcttccagcctggggtgctattctgatatccgtcactctcatacttgcctttggcgagattatacctcaagctgtatgctctagatacggactgagcatcggggcaaagctatcatttttggttcggttgattattatagtcttcttcccattatcttatccaatcagcaagctactcgatttgttgcttggaaaaagacattccacactcttaggacgagcagagctcaagtcacttgtgtatatgcacggaaacgaggcaggaaaaggcggggaactaactcacgatgaaacaacaatcatatcaggagctctggacatgtcacagaaaagtgctaaagacgcaatgacaccagtctctcagatcttttcactcgatataaattttaagctcgacgagtatgttcttctcttggaattcctctttcttcttcttttagacaatatccagttagttattcttatcatcctctttgggcttcacagaaagacaatgggattaatagcaagtgcaggccatagccgaatacctatatactctgtaaatcctaatgttatcattggatttattctggtaaagaacttgatcaaagtccgtcctgaagatgagacatcgatcagagatctccctatcagaagaatgcccaaggtcgatttgaatttacctctctacgacatcctcaacatcttccaaacaggtcgaagccacatggctgctgtcgttgggaccaagaaccacactaataccaacactccagtccatgaaaagagcatcaatggatcgcctaataaagacgccaacgtttttctgagtattcccgcgttgaactccagcgaaactagtcatcaaagtccaatccgatacattgatagtatttctgatgaagatgaagaagtcattgggattataactctggaagatgttatggaggaacttatacaggaagaaatatatgatgagacggaccagtacgtcgaacttcataaaaggataacaataaacatgccaatgtcgggaaattcgccggaaactgccacttgggcttcggagctggcatctcctatctcgccgtatcgctcaagtcttctgtcgccgagcatcatgatctctacgctgctgcggtcaccaataaattcaccttaccgtcactctctgttactccgaccaacactccacgcttctccaccagcgcaatctccttccatactctctccggacagtaataatgagcgttattattacttgtctcctagtaggtatctttcttgcgctggaagttaa

SEQ ID NO: 78920 - protein, 521 aa, Arabidopsis thaliana
  peptide (1)..(521): Ceres Seq. ID no. 12646783
  misc_feature (15)..(192): Pfam Name: Domain of unknown function DUF21 Pfam Description: Domain of unknown function DUF21
  misc_feature (245)..(514): Homolog of NCBI NO: 15237264 NR Description: putative protein; protein id: At5g52790.1 thaliana] >gi|8953734|dbj|BAA98097.1|
  misc_feature (1)..(228): Homolog of NCBI NO: 15237264 NR Description: putative protein; protein id: At5g52790.1 thaliana] >gi|8953734|dbj|BAA98097.1|
  misc_feature (3)..(227): Homolog of NCBI NO: 22330087 NR Description: unknown protein; protein id: At1g47330.1, by cDNA: gi_19715639 [Arabidopsis thaliana] At1g47330/T3F24_2 [Arabidopsis thaliana]
  misc_feature (391)..(494): Homolog of NCBI NO: 22330087 NR Description: unknown protein; protein id: At1g47330.1, by cDNA: gi_19715639 [Arabidopsis thaliana] At1g47330/T3F24_2 [Arabidopsis thaliana]
  misc_feature (255)..(359): Homolog of NCBI NO: 22330087 NR Description: unknown protein; protein id: At1g47330.1, by cDNA: gi_19715639 [Arabidopsis thaliana] At1g47330/T3F24_2 [Arabidopsis thaliana]
  misc_feature (8)..(227): Homolog of NCBI NO: 40538933 NR Description: expressed protein [Oryza sativa (japonica
  misc_feature (255)..(345): Homolog of NCBI NO: 40538933 NR Description: expressed protein [Oryza sativa (japonica
  misc_feature (377)..(421): Homolog of NCBI NO: 40538933 NR Description: expressed protein [Oryza sativa (japonica
  misc_feature (1)..(234): Homolog of NCBI NO: 22329131 NR Description: putative protein; protein id: At4g33700.1, by cDNA: gi_17381275, supported by cDNA: gi_20856057 [Arabidopsis >gi|17381276|gb|AAL36056.1| AT4g33700/T16L1_190 [Arabidopsis
  misc_feature (255)..(363): Homolog of NCBI NO: 22329131 NR Description: putative protein; protein id: At4g33700.1, by cDNA: gi_17381275, supported by cDNA: gi_20856057 [Arabidopsis >gi|17381276|gb|AAL36056.1| AT4g33700/T16L1_190 [Arabidopsis
MAANDVPCCETMFWVYLLVCVALVVFAGLMSGLTLGLMSLSIVELEVMIKAGEPHDRKNAEKILPLVKNQHLLLCTLLIGNALAMEALPIFVDSLLPAWGAILISVTLILAFGEIIPQAVCSRYGLSIGAKLSFLVRLIIIVFFPLSYPISKLLDLLLGKRHSTLLGRAELKSLVYMHGNEAGKGGELTHDETTIISGALDMSQKSAKDAMTPVSQIFSLDINFKLDEYVLLLEFLFLLLLDNIQLVILIILFGLHRKTMGLIASAGHSRIPIYSVNPNVIIGFILVKNLIKVRPEDETSIRDLPIRRMPKVDLNLPLYDILNIFQTGRSHMAAVVGTKNHTNTNTPVHEKSINGSPNKDANVFLSIPALNSSETSHQSPIRYIDSISDEDEEVIGIITLEDVMEELIQEEIYDETDQYVELHKRITINMPMSGNSPETATWASELASPISPYRSSLLSPSIMISTLLRSPINSPYRHSLLLRPTLHASPPAQSPSILSPDSNNERYYYLSPSRYLSCAGS

SEQ ID NO: 78921 - protein, 510 aa, Arabidopsis thaliana
  peptide (1)..(510): Ceres Seq. ID no. 12646784
  misc_feature (4)..(181): Pfam Name: Domain of unknown function DUF21 Pfam Description: Domain of unknown function DUF21
  misc_feature (234)..(503): Homolog of NCBI NO: 15237264 NR Description: putative protein; protein id: At5g52790.1 thaliana] >gi|8953734|dbj|BAA98097.1|
  misc_feature (1)..(217): Homolog of NCBI NO: 15237264 NR Description: putative protein; protein id: At5g52790.1 thaliana] >gi|8953734|dbj|BAA98097.1|
  misc_feature (1)..(216): Homolog of NCBI NO: 22330087 NR Description: unknown protein; protein id: At1g47330.1, by cDNA: gi_19715639 [Arabidopsis thaliana] At1g47330/T3F24_2 [Arabidopsis thaliana]
  misc_feature (380)..(483): Homolog of NCBI NO: 22330087 NR Description: unknown protein; protein id: At1g47330.1, by cDNA: gi_19715639 [Arabidopsis thaliana] At1g47330/T3F24_2 [Arabidopsis thaliana]
  misc_feature (244)..(348): Homolog of NCBI NO: 22330087 NR Description: unknown protein; protein id: At1g47330.1, by cDNA: gi_19715639 [Arabidopsis thaliana] At1g47330/T3F24_2 [Arabidopsis thaliana]
  misc_feature (1)..(216): Homolog of NCBI NO: 40538933 NR Description: expressed protein [Oryza sativa (japonica
  misc_feature (244)..(334): Homolog of NCBI NO: 40538933 NR Description: expressed protein [Oryza sativa (japonica
  misc_feature (366)..(410): Homolog of NCBI NO: 40538933 NR Description: expressed protein [Oryza sativa (japonica
  misc_feature (1)..(223): Homolog of NCBI NO: 22329131 NR Description: putative protein; protein id: At4g33700.1, by cDNA: gi_17381275, supported by cDNA: gi_20856057 [Arabidopsis >gi|17381276|gb|AAL36056.1| AT4g33700/T16L1_190 [Arabidopsis
  misc_feature (244)..(352): Homolog of NCBI NO: 22329131 NR Description: putative protein; protein id: At4g33700.1, by cDNA: gi_17381275, supported by cDNA: gi_20856057 [Arabidopsis >gi|17381276|gb|AAL36056.1| AT4g33700/T16L1_190 [Arabidopsis
MFWVYLLVCVALVVFAGLMSGLTLGLMSLSIVELEVMIKAGEPHDRKNAEKILPLVKNQHLLLCTLLIGNALAMEALPIFVDSLLPAWGAILISVTLILAFGEIIPQAVCSRYGLSIGAKLSFLVRLIIIVFFPLSYPISKLLDLLLGKRHSTLLGRAELKSLVYMHGNEAGKGGELTHDETTIISGALDMSQKSAKDAMTPVSQIFSLDINFKLDEYVLLLEFLFLLLLDNIQLVILIILFGLHRKTMGLIASAGHSRIPIYSVNPNVIIGFILVKNLIKVRPEDETSIRDLPIRRMPKVDLNLPLYDILNIFQTGRSHMAAVVGTKNHTNTNTPVHEKSINGSPNKDANVFLSIPALNSSETSHQSPIRYIDSISDEDEEVIGIITLEDVMEELIQEEIYDETDQYVELHKRITINMPMSGNSPETATWASELASPISPYRSSLLSPSIMISTLLRSPINSPYRHSLLLRPTLHASPPAQSPSILSPDSNNERYYYLSPSRYLSCAGS

SEQ ID NO: 78922 - protein, 492 aa, Arabidopsis thaliana
  peptide (1)..(492): Ceres Seq. ID no. 12646785
  misc_feature (1)..(163): Pfam Name: Domain of unknown function DUF21 Pfam Description: Domain of unknown function DUF21
  misc_feature (216)..(485): Homolog of NCBI NO: 15237264 NR Description: putative protein; protein id: At5g52790.1 thaliana] >gi|8953734|dbj|BAA98097.1|
  misc_feature (1)..(199): Homolog of NCBI NO: 15237264 NR Description: putative protein; protein id: At5g52790.1 thaliana] >gi|8953734|dbj|BAA98097.1|
  misc_feature (1)..(198): Homolog of NCBI NO: 22330087 NR Description: unknown protein; protein id: At1g47330.1, by cDNA: gi_19715639 [Arabidopsis thaliana] At1g47330/T3F24_2 [Arabidopsis thaliana]
  misc_feature (362)..(465): Homolog of NCBI NO: 22330087 NR Description: unknown protein; protein id: At1g47330.1, by cDNA: gi_19715639 [Arabidopsis thaliana] At1g47330/T3F24_2 [Arabidopsis thaliana]
  misc_feature (226)..(330): Homolog of NCBI NO: 22330087 NR Description: unknown protein; protein id: At1g47330.1, by cDNA: gi_19715639 [Arabidopsis thaliana] At1g47330/T3F24_2 [Arabidopsis thaliana]
  misc_feature (1)..(198): Homolog of NCBI NO: 40538933 NR Description: expressed protein [Oryza sativa (japonica
  misc_feature (226)..(316): Homolog of NCBI NO: 40538933 NR Description: expressed protein [Oryza sativa (japonica
  misc_feature (348)..(392): Homolog of NCBI NO: 40538933 NR Description: expressed protein [Oryza sativa (japonica
  misc_feature (1)..(205): Homolog of NCBI NO: 22329131 NR Description: putative protein; protein id: At4g33700.1, by cDNA: gi_17381275, supported by cDNA: gi_20856057 [Arabidopsis >gi|17381276|gb|AAL36056.1| AT4g33700/T16L1_190 [Arabidopsis
  misc_feature (226)..(334): Homolog of NCBI NO: 22329131 NR Description: putative protein; protein id: At4g33700.1, by cDNA: gi_17381275, supported by cDNA: gi_20856057 [Arabidopsis >gi|17381276|gb|AAL36056.1| AT4g33700/T16L1_190 [Arabidopsis
MSGLTLGLMSLSIVELEVMIKAGEPHDRKNAEKILPLVKNQHLLLCTLLIGNALAMEALPIFVDSLLPAWGAILISVTLILAFGEIIPQAVCSRYGLSIGAKLSFLVRLIIIVFFPLSYPISKLLDLLLGKRHSTLLGRAELKSLVYMHGNEAGKGGELTHDETTIISGALDMSQKSAKDAMTPVSQIFSLDINFKLDEYVLLLEFLFLLLLDNIQLVILIILFGLHRKTMGLIASAGHSRIPIYSVNPNVIIGFILVKNLIKVRPEDETSIRDLPIRRMPKVDLNLPLYDILNIFQTGRSHMAAVVGTKNHTNTNTPVHEKSINGSPNKDANVFLSIPALNSSETSHQSPIRYIDSISDEDEEVIGIITLEDVMEELIQEEIYDETDQYVELHKRITINMPMSGNSPETATWASELASPISPYRSSLLSPSIMISTLLRSPINSPYRHSLLLRPTLHASPPAQSPSILSPDSNNERYYYLSPSRYLSCAGS

SEQ ID NO: 78923 - DNA, 2082 bp, Arabidopsis thaliana
  misc_feature (1)..(2082): Ceres Seq. ID no. 12646813
  misc_feature: MA Experiment ID: 108434 Result: Up-regulated in Transcription
  misc_feature: MA Experiment 108434 PARAMETER Experiment Name: At_Root_Tips_cDNA_P Parameter: Tissue Value: Root Tips
  misc_feature: MA Experiment ID: 20000227 Result: Up-regulated in Transcription
  misc_feature: MA Experiment 20000227 PARAMETER Experiment Name: At_Root-Tips-vs-Tops_P Parameter: Tissue Value: Root Tips vs. Root Tops
  misc_feature: MA Experiment ID: 20001248 Result: Up-regulated in Transcription
  misc_feature: MA Experiment 20001248 PARAMETER Experiment Name: At_Far-red-induction_P Parameter: Age (day) Value: 7
  misc_feature: MA Experiment 20001248 PARAMETER Experiment Name: At_Far-red-induction_P Parameter: Light Value: Far-red vs. White
  misc_feature: MA Experiment 20001248 PARAMETER Experiment Name: At_Far-red-induction_P Parameter: Organism Value: A. thaliana
  misc_feature: MA Experiment 20001248 PARAMETER Experiment Name: At_Far-red-induction_P Parameter: Plant Line Value: Columbia
  misc_feature: MA Experiment 20001248 PARAMETER Experiment Name: At_Far-red-induction_P Parameter: Timepoint (hr) Value: 4
  misc_feature: MA Experiment 20001248 PARAMETER Experiment Name: At_Far-red-induction_P Parameter: Tissue Value: Whole Plant
  misc_feature: MA Experiment ID: 20001450 Result: Up-regulated in Transcription
  misc_feature: MA Experiment 20001450 PARAMETER Experiment Name: At_Far-red-induction_P Parameter: Age (day) Value: 7
  misc_feature: MA Experiment 20001450 PARAMETER Experiment Name: At_Far-red-induction_P Parameter: Light Value: Far-red vs. White
  misc_feature: MA Experiment 20001450 PARAMETER Experiment Name: At_Far-red-induction_P Parameter: Organism Value: A. thaliana
  misc_feature: MA Experiment 20001450 PARAMETER Experiment Name: At_Far-red-induction_P Parameter: Plant Line Value: Columbia
  misc_feature: MA Experiment 20001450 PARAMETER Experiment Name: At_Far-red-induction_P Parameter: Timepoint (hr) Value: 8
  misc_feature: MA Experiment 20001450 PARAMETER Experiment Name: At_Far-red-induction_P Parameter: Tissue Value: Whole Plant
  misc_feature: MA Experiment ID: 20001905 Result: Down-regulated in Transcription
  misc_feature: MA Experiment 20001905 PARAMETER Experiment Name: At_Drought_Reproduction_P Parameter: Age (day) Value: 40
  misc_feature: MA Experiment 20001905 PARAMETER Experiment Name: At_Drought_Reproduction_P Parameter: Organism Value: A. thaliana
  misc_feature: MA Experiment 20001905 PARAMETER Experiment Name: At_Drought_Reproduction_P Parameter: Plant Line Value: WS
  misc_feature: MA Experiment 20001905 PARAMETER Experiment Name: At_Drought_Reproduction_P Parameter: Timepoint (day) Value: 10
  misc_feature: MA Experiment 20001905 PARAMETER Experiment Name: At_Drought_Reproduction_P Parameter: Tissue Value: Rosettes
  misc_feature: MA Experiment 20001905 PARAMETER Experiment Name: At_Drought_Reproduction_P Parameter: Treatment Value: Drought vs. No Drought
aagcacttcttctccgccttcgtaagttccgccgaaaagaaccaaatccttcactactctgtctcagctttcgacctctctcttctcattcctttgcaacttctcacttctcgaattccttctcttcaaaatcagaaatggctcaagtggttgctaccaggtcaattcaaggctcgatgttatctcccaacggtggatctgtgtctacaagatccgagaagctattgaaaccagcgagttttgcagtgaaggttcttggcaacgaagcaaagagaagtggaagagtctctgtaagaagcagaagagtggttgatactactgtgagatccgctcgtgttgagactgaagtcattcctgtttctcctgaagatgtgcctaacagagaggagcagcttgagaggttgttggaaatgcagcagtttggtgatacatcggtagggatgtggtcgaagccgacagtgaggaggaagacaaagattgtttgcaccgttggtccgtcgaccaacacacgagaaatgatatggaaattggctgaagctgggatgaatgttgctaggatgaatatgtctcatggagatcatgcttcacataagaaggttattgatttggttaaagaatacaatgcacaaactaaagacaacactattgctatcatgcttgacaccaagggtccggaagttaggagtggagatttacctcagccaattatgttagatcctggtcaagagtttacctttacaattgagagaggagtcagcacaccaagttgtgtcagtgttaactatgatgatttcgttaatgacgtggaagcgggtgacatgcttcttgttgatggtggtatgatgtcgtttatggtgaagtcaaagaccaaagactctgtcaaatgtgaagttgttgatggtggagaacttaagtcaaggagacacctgaatgtccgaggaaagagtgcaactttaccttcaatcactgagaaggactgggaggatattaaatttggagtggagaacaaagttgacttttatgcagtttcctttgtcaaagatgctcaagttgtacacgagttgaagaaataccttcaaaatagtggtgctgatatacacgtgatagtgaaaattgagagtgcagactccatacctaacttgcactccattatcacagcatcagatggggcaatggttgcaagaggtgatcttggtgcagagcttccaattgaagaagtccccattcttcaggaggagatcattaacctgtgccgtagtatgggaaaagctgttattgttgcgactaacatgcttgagagtatgatagttcatccaactccaacccgggcagaggtctcagacattgctatcgctgttagagaaggtgctgatgcggtaatgctttcaggagaaactgctcacggaaagttcccattgaaagctgctggagtgatgcacactgttgcattgcgaacagaagcaaccattactagcggtgaaatgccacctaatcttggtcaagccttcaagaaccatatgagtgagatgtttgcataccatgcaaccatgatgtcaaacacacttggaacttcaactgttgtcttcaccagaaccggtttcatggccatattgttaagtcactatcgtccttccggcacaatctatgccttcacaaatgagaaaaaaatacaacaaagattagctttgtatcaaggtgtatgccccatatatatggagttcacagatgatgcagaagaaacttttgctaatgctttggctacattactgaaacaaggaatggtgaagaagggagaggaaatagcaatcgtacagagcggtacacagccaatctggcgatctcaatcgacacataacatccaagtccgcaaggtttaaagcttcttttaagatgggatgtctttaatatgtagaacctcgtttttggttataattttcgttgcatgtctctcttctcttgtactattcacacttgttgtttgctgtatcttcttcttcagtttgctttgctacgattgtggtttttggagacattatagctcattaactgtttgtgagaccaaatgtgtcagaatccgctatt

SEQ ID NO: 78924 - protein, 624 aa, Arabidopsis thaliana
  peptide (1)..(624): Ceres Seq. ID no. 12646814
  misc_feature (507)..(623): Pfam Name: Pyruvate kinase, alpha/beta domain Pfam Description: Pyruvate kinase, alpha/beta domain
  misc_feature (46)..(624): Homolog of NCBI NO: 15237303 NR Description: pyruvate kinase; protein id: At5g52920.1, by cDNA: 109919., supported by cDNA: gi_15081611, supported by gi_20147128 [Arabidopsis thaliana] >gi|10177106|dbj|BAB10440.1|
  misc_feature (46)..(624): Homolog of NCBI NO: 15081612 NR Description: AT5g52920/MXC20_15 [Arabidopsis thaliana]
  misc_feature (46)..(620): Homolog of NCBI NO: 34912028 NR Description: putative pyruvate kinase [Oryza sativa (japonica group)] >gi|18844807|dbj|BAB85277.1| putative pyruvate kinase
  misc_feature (154)..(624): Homolog of NCBI NO: 37537030 NR Description: putative pyruvate kinase [Oryza sativa (japonica group)] >gi|19225011|gb|AAL86487.1| putative pyruvate kinase
  misc_feature (155)..(624): Homolog of NCBI NO: 2497542 NR Description: Pyruvate kinase isozyme G, chloroplast precursor
  misc_feature (154)..(624): Homolog of NCBI NO: 18398434 NR Description: pyruvate kinase, plastid isozyme, putative; id: At1g32440.1, supported by cDNA: gi_16648690 [Arabidopsis >gi|16648691|gb|AAL25538.1| At1g32440/F5D14_7 [Arabidopsis
  misc_feature (154)..(624): Homolog of NCBI NO: 25287763 NR Description: hypothetical protein F5D14.22 - Arabidopsis >gi|8920620|gb|AAF81342.1|AC007767_22 Strong similarity to a kinase isozyme G, chloroplast precursor from Nicotiana EST
  misc_feature (207)..(624): Homolog of NCBI NO: 2497540 NR Description: PYRUVATE KINASE ISOZYME G, CHLOROPLAST
  misc_feature (147)..(624): Homolog of NCBI NO: 24217414 NR Description: pyruvate kinase [Leptospira interrogans serovar str. 56601] >gi|24202500|gb|AAN51912.1|AE011621_1 pyruvate kinase
  misc_feature (155)..(610): Homolog of NCBI NO: 18403597 NR Description: pyruvate kinase, putative; protein id: supported by cDNA: 13351., supported by cDNA: gi_15983774, by cDNA: gi_16604371 [Arabidopsis thaliana]
ALLLRLRKFRRKEPNPSLLCLSFRPLSSHSFATSHFSNSFSSKSEMAQVVATRSIQGSMLSPNGGSVSTRSEKLLKPASFAVKVLGNEAKRSGRVSVRSRRVVDTTVRSARVETEVIPVSPEDVPNREEQLERLLEMQQFGDTSVGMWSKPTVRRKTKIVCTVGPSTNTREMIWKLAEAGMNVARMNMSHGDHASHKKVIDLVKEYNAQTKDNTIAIMLDTKGPEVRSGDLPQPIMLDPGQEFTFTIERGVSTPSCVSVNYDDFVNDVEAGDMLLVDGGMMSFMVKSKTKDSVKCEVVDGGELKSRRHLNVRGKSATLPSITEKDWEDIKFGVENKVDFYAVSFVKDAQVVHELKKYLQNSGADIHVIVKIESADSIPNLHSIITASDGAMVARGDLGAELPIEEVPILQEEIINLCRSMGKAVIVATNMLESMIVHPTPTRAEVSDIAIAVREGADAVMLSGETAHGKFPLKAAGVMHTVALRTEATITSGEMPPNLGQAFKNHMSEMFAYHATMMSNTLGTSTVVFTRTGFMAILLSHYRPSGTIYAFTNEKKIQQRLALYQGVCPIYMEFTDDAEETFANALATLLKQGMVKKGEEIAIVQSGTQPIWRSQSTHNIQVRKV

SEQ ID NO: 78925 - protein, 579 aa, Arabidopsis thaliana
  peptide (1)..(579): Ceres Seq. ID no. 12646815
  misc_feature (462)..(578): Pfam Name: Pyruvate kinase, alpha/beta domain Pfam Description: Pyruvate kinase, alpha/beta domain
  misc_feature (1)..(579): Homolog of NCBI NO: 15237303 NR Description: pyruvate kinase; protein id: At5g52920.1, by cDNA: 109919., supported by cDNA: gi_15081611, supported by gi_20147128 [Arabidopsis thaliana] >gi|10177106|dbj|BAB10440.1|
  misc_feature (1)..(579): Homolog of NCBI NO: 15081612 NR Description: AT5g52920/MXC20_15 [Arabidopsis thaliana]
  misc_feature (1)..(575): Homolog of NCBI NO: 34912028 NR Description: putative pyruvate kinase [Oryza sativa (japonica group)] >gi|18844807|dbj|BAB85277.1| putative pyruvate kinase
  misc_feature (109)..(579): Homolog of NCBI NO: 37537030 NR Description: putative pyruvate kinase [Oryza sativa (japonica group)] >gi|19225011|gb|AAL86487.1| putative pyruvate kinase
  misc_feature (110)..(579): Homolog of NCBI NO: 2497542 NR Description: Pyruvate kinase isozyme G, chloroplast precursor
  misc_feature (109)..(579): Homolog of NCBI NO: 18398434 NR Description: pyruvate kinase, plastid isozyme, putative; id: At1g32440.1, supported by cDNA: gi_16648690 [Arabidopsis >gi|16648691|gb|AAL25538.1| At1g32440/F5D14_7 [Arabidopsis
  misc_feature (109)..(579): Homolog of NCBI NO: 25287763 NR Description: hypothetical protein F5D14.22 - Arabidopsis >gi|8920620|gb|AAF81342.1|AC007767_22 Strong similarity to a kinase isozyme G, chloroplast precursor from Nicotiana EST
  misc_feature (162)..(579): Homolog of NCBI NO: 2497540 NR Description: PYRUVATE KINASE ISOZYME G, CHLOROPLAST
  misc_feature (102)..(579): Homolog of NCBI NO: 24217414 NR Description: pyruvate kinase [Leptospira interrogans serovar str. 56601] >gi|24202500|gb|AAN51912.1|AE011621_1 pyruvate kinase
  misc_feature (110)..(565): Homolog of NCBI NO: 18403597 NR Description: pyruvate kinase, putative; protein id: supported by cDNA: 13351., supported by cDNA: gi_15983774, by cDNA: gi_16604371 [Arabidopsis thaliana]
MAQVVATRSIQGSMLSPNGGSVSTRSEKLLKPASFAVKVLGNEAKRSGRVSVRSRRVVDTTVRSARVETEVIPVSPEDVPNREEQLERLLEMQQFGDTSVGMWSKPTVRRKTKIVCTVGPSTNTREMIWKLAEAGMNVARMNMSHGDHASHKKVIDLVKEYNAQTKDNTIAIMLDTKGPEVRSGDLPQPIMLDPGQEFTFTIERGVSTPSCVSVNYDDFVNDVEAGDMLLVDGGMMSFMVKSKTKDSVKCEVVDGGELKSRRHLNVRGKSATLPSITEKDWEDIKFGVENKVDFYAVSFVKDAQVVHELKKYLQNSGADIHVIVKIESADSIPNLHSIITASDGAMVARGDLGAELPIEEVPILQEEIINLCRSMGKAVIVATNMLESMIVHPTPTRAEVSDIAIAVREGADAVMLSGETAHGKFPLKAAGVMHTVALRTEATITSGEMPPNLGQAFKNHMSEMFAYHATMMSNTLGTSTVVFTRTGFMAILLSHYRPSGTIYAFTNEKKIQQRLALYQGVCPIYMEFTDDAEETFANALATLLKQGMVKKGEEIAIVQSGTQPIWRSQSTHNIQVRKV

SEQ ID NO: 78926 - protein, 566 aa, Arabidopsis thaliana
  peptide (1)..(566): Ceres Seq. ID no. 12646816
  misc_feature (449)..(565): Pfam Name: Pyruvate kinase, alpha/beta domain Pfam Description: Pyruvate kinase, alpha/beta domain
  misc_feature (1)..(566): Homolog of NCBI NO: 15237303 NR Description: pyruvate kinase; protein id: At5g52920.1, by cDNA: 109919., supported by cDNA: gi_15081611, supported by gi_20147128 [Arabidopsis thaliana] >gi|10177106|dbj|BAB10440.1|
  misc_feature (1)..(566): Homolog of NCBI NO: 15081612 NR Description: AT5g52920/MXC20_15 [Arabidopsis thaliana]
  misc_feature (1)..(562): Homolog of NCBI NO: 34912028 NR Description: putative pyruvate kinase [Oryza sativa (japonica group)] >gi|18844807|dbj|BAB85277.1| putative pyruvate kinase
  misc_feature (96)..(566): Homolog of NCBI NO: 37537030 NR Description: putative pyruvate kinase [Oryza sativa (japonica group)] >gi|19225011|gb|AAL86487.1| putative pyruvate kinase
  misc_feature (97)..(566): Homolog of NCBI NO: 2497542 NR Description: Pyruvate kinase isozyme G, chloroplast precursor
  misc_feature (96)..(566): Homolog of NCBI NO: 18398434 NR Description: pyruvate kinase, plastid isozyme, putative; id: At1g32440.1, supported by cDNA: gi_16648690 [Arabidopsis >gi|16648691|gb|AAL25538.1| At1g32440/F5D14_7 [Arabidopsis
  misc_feature (96)..(566): Homolog of NCBI NO: 25287763 NR Description: hypothetical protein F5D14.22 - Arabidopsis >gi|8920620|gb|AAF81342.1|AC007767_22 Strong similarity to a kinase isozyme G, chloroplast precursor from Nicotiana EST
  misc_feature (149)..(566): Homolog of NCBI NO: 2497540 NR Description: PYRUVATE KINASE ISOZYME G, CHLOROPLAST
  misc_feature (89)..(566): Homolog of NCBI NO: 24217414 NR Description: pyruvate kinase [Leptospira interrogans serovar str. 56601] >gi|24202500|gb|AAN51912.1|AE011621_1 pyruvate kinase
  misc_feature (97)..(552): Homolog of NCBI NO: 18403597 NR Description: pyruvate kinase, putative; protein id: supported by cDNA: 13351., supported by cDNA: gi_15983774, by cDNA: gi_16604371 [Arabidopsis thaliana]
MLSPNGGSVSTRSEKLLKPASFAVKVLGNEAKRSGRVSVRSRRVVDTTVRSARVETEVIPVSPEDVPNREEQLERLLEMQQFGDTSVGMWSKPTVRRKTKIVCTVGPSTNTREMIWKLAEAGMNVARMNMSHGDHASHKKVIDLVKEYNAQTKDNTIAIMLDTKGPEVRSGDLPQPIMLDPGQEFTFTIERGVSTPSCVSVNYDDFVNDVEAGDMLLVDGGMMSFMVKSKTKDSVKCEVVDGGELKSRRHLNVRGKSATLPSITEKDWEDIKFGVENKVDFYAVSFVKDAQVVHELKKYLQNSGADIHVIVKIESADSIPNLHSIITASDGAMVARGDLGAELPIEEVPILQEEIINLCRSMGKAVIVATNMLESMIVHPTPTRAEVSDIAIAVREGADAVMLSGETAHGKFPLKAAGVMHTVALRTEATITSGEMPPNLGQAFKNHMSEMFAYHATMMSNTLGTSTVVFTRTGFMAILLSHYRPSGTIYAFTNEKKIQQRLALYQGVCPIYMEFTDDAEETFANALATLLKQGMVKKGEEIAIVQSGTQPIWRSQSTHNIQVRKV

SEQ ID NO: 78927 - DNA, 792 bp, Arabidopsis thaliana
  misc_feature (1)..(792): Ceres Seq. ID no. 12646871
  misc_feature: MA Experiment ID: 20000173 Result: Up-regulated in Transcription
  misc_feature: MA Experiment 20000173 PARAMETER Experiment Name: At_42deg_Heat_P Parameter: Age (day) Value: 14
  misc_feature: MA Experiment 20000173 PARAMETER Experiment Name: At_42deg_Heat_P Parameter: Organism Value: A. thaliana
  misc_feature: MA Experiment 20000173 PARAMETER Experiment Name: At_42deg_Heat_P Parameter: Plant Line Value: WS
  misc_feature: MA Experiment 20000173 PARAMETER Experiment Name: At_42deg_Heat_P Parameter: Temperature (deg C) Value: 42 vs. 22
  misc_feature: MA Experiment 20000173 PARAMETER Experiment Name: At_42deg_Heat_P Parameter: Timepoint (hr) Value: 6
  misc_feature: MA Experiment 20000173 PARAMETER Experiment Name: At_42deg_Heat_P Parameter: Tissue Value: Aerial
  misc_feature: MA Experiment ID: 20000185 Result: Up-regulated in Transcription
  misc_feature: MA Experiment 20000185 PARAMETER Experiment Name: At_Roots__P Parameter: Age (day) Value: 7 vs. 21
  misc_feature: MA Experiment 20000185 PARAMETER Experiment Name: At_Roots__P Parameter: Organism Value: A. thaliana
  misc_feature: MA Experiment 20000185 PARAMETER Experiment Name: At_Roots__P Parameter: Tissue Value: Roots vs. Whole Plant
  misc_feature: MA Experiment ID: 20000265 Result: Up-regulated in Transcription
  misc_feature: MA Experiment 20000265 PARAMETER Experiment Name: At_Open_Flower_P Parameter: Age (day) Value: 21
  misc_feature: MA Experiment 20000265 PARAMETER Experiment Name: At_Open_Flower_P Parameter: Plant Line Value: WS
  misc_feature: MA Experiment 20000265 PARAMETER Experiment Name: At_Open_Flower_P Parameter: Tissue Value: Closed Flower vs. Whole Plant
  misc_feature: MA Experiment ID: 20000286 Result: Up-regulated in Transcription
  misc_feature: MA Experiment 20000286 PARAMETER Experiment Name: At_Open_Flower_P Parameter: Age (day) Value: 21
  misc_feature: MA Experiment 20000286 PARAMETER Experiment Name: At_Open_Flower_P Parameter: Plant Line Value: WS
  misc_feature: MA Experiment 20000286 PARAMETER Experiment Name: At_Open_Flower_P Parameter: Tissue Value: Half Open vs. Whole Plant
  misc_feature: MA Experiment ID: 20000439 Result: Up-regulated in Transcription
  misc_feature: MA Experiment 20000439 PARAMETER Experiment Name: At_Roots__P Parameter: Age (day) Value: 14 vs. 21
  misc_feature: MA Experiment 20000439 PARAMETER Experiment Name: At_Roots__P Parameter: Organism Value: A. thaliana
  misc_feature: MA Experiment 20000439 PARAMETER Experiment Name: At_Roots__P Parameter: Tissue Value: Roots vs. Whole Plant
  misc_feature: MA Experiment ID: 20000451 Result: Down-regulated in Transcription
  misc_feature: MA Experiment 20000451 PARAMETER Experiment Name: At_CS6879_Shoots-Roots_P Parameter: Age (day) Value: 14
  misc_feature: MA Experiment 20000451 PARAMETER Experiment Name: At_CS6879_Shoots-Roots_P Parameter: Organism Value: A. thaliana
  misc_feature: MA Experiment 20000451 PARAMETER Experiment Name: At_CS6879_Shoots-Roots_P Parameter: Plant Line Value: CS6879 vs. WS
  misc_feature: MA Experiment 20000451 PARAMETER Experiment Name: At_CS6879_Shoots-Roots_P Parameter: Tissue Value: Roots
  misc_feature: MA Experiment ID: 20001910 Result: Down-regulated in Transcription
  misc_feature: MA Experiment 20001910 PARAMETER Experiment Name: At_Drought_Reproduction_P Parameter: Age (day) Value: 37
  misc_feature: MA Experiment 20001910 PARAMETER Experiment Name: At_Drought_Reproduction_P Parameter: Organism Value: A. thaliana
  misc_feature: MA Experiment 20001910 PARAMETER Experiment Name: At_Drought_Reproduction_P Parameter: Plant Line Value: WS
  misc_feature: MA Experiment 20001910 PARAMETER Experiment Name: At_Drought_Reproduction_P Parameter: Timepoint (day) Value: 7
  misc_feature: MA Experiment 20001910 PARAMETER Experiment Name: At_Drought_Reproduction_P Parameter: Tissue Value: Flowers
  misc_feature: MA Experiment 20001910 PARAMETER Experiment Name: At_Drought_Reproduction_P Parameter: Treatment Value: Drought vs. No Drought
atgggtgataaacttcgattatccatcggaattttgggaaacggagcttctctgttgctatatacagctccaatagtaacattttcaagggtgtttaagaagaaaagcacagaggaattctcatgttttccttacgttatgacactctttaactgtttgatatatacttggtacggtttaccgattgtgagtcatctttgggagaatcttcctctcgtcaccattaatggagtcggcatccttctcgaatctatcttcattttcatatatttctactacgcatcaccaaaagaaaagattaaggttggtgttacatttgttccggtgatcgttgggttcggcttaacgacagcaatctcagccttggtatttgacgaccatcgtcaccgaaaatcattcgtcggaagtgttggcctcgtggcttccatctctatgtatggttctcctctcgtcgttatgaagaaagtgatagagacaagaagtgtggaatacatgccgttttacttgtccttcttctcatttctggctagttccctttggttggcatatggcttactcagccatgatctctttcttgcgtcacctaatatggttgcgactccattgggaattctccaacttatcctctacttcaagtacaagaataagaaggatttagcaccaacaacaatggtgatcaccaaacgaaatgatcatgatgacaagaacaaagccacacttgagtttgttgttgacgttgatcgtaatagtgataccaatgagaagaattctaacaatgcctcatcgatctaa

SEQ ID NO: 78928 - protein, 263 aa, Arabidopsis thaliana
  peptide (1)..(263): Ceres Seq. ID no. 12646872
  misc_feature (7)..(98): Pfam Name: MtN3/saliva family Pfam Description: MtN3/saliva family
  misc_feature (1)..(263): Homolog of NCBI NO: 34146818 NR Description: At5g53190 [Arabidopsis thaliana]
  misc_feature (1)..(263): Homolog of NCBI NO: 15238678 NR Description: MtN3 protein-like; protein id: At5g53190.1
  misc_feature (1)..(218): Homolog of NCBI NO: 34904086 NR Description: unnamed protein product [Oryza sativa (japonica group)] >gi|8096648|dbj|BAA96219.1| unnamed protein product
  misc_feature (10)..(217): Homolog of NCBI NO: 18394992 NR Description: expressed protein; protein id: At1g21460.1, by cDNA: 6411. [Arabidopsis thaliana] >gi|21594011|gb|AAM65929.1| [Arabidopsis thaliana] >gi|28393568|gb|AAO42204.1| unknown
  misc_feature (6)..(221): Homolog of NCBI NO: 34907420 NR Description: P0018C10.36 [Oryza sativa (japonica
  misc_feature (10)..(213): Homolog of NCBI NO: 18405611 NR Description: Expressed protein; protein id: At3g28007.1, by cDNA: 22745., supported by cDNA: gi_16226221 [Arabidopsis >gi|16226222|gb|AAL16107.1|AF428275_1 unknown protein
  misc_feature (10)..(213): Homolog of NCBI NO: 21592355 NR Description: contains similarity to nodulin MtN3 protein
  misc_feature (9)..(217): Homolog of NCBI NO: 27754697 NR Description: putative cytochrome c oxidoreductase [Arabidopsis
  misc_feature (1)..(219): Homolog of NCBI NO: 30684193 NR Description: nodulin MtN3 family protein [Arabidopsis thaliana]
  misc_feature (9)..(217): Homolog of NCBI NO: 30683457 NR Description: nodulin MtN3 family protein [Arabidopsis thaliana]
MGDKLRLSIGILGNGASLLLYTAPIVTFSRVFKKKSTEEFSCFPYVMTLFNCLIYTWYGLPIVSHLWENLPLVTINGVGILLESIFIFIYFYYASPKEKIKVGVTFVPVIVGFGLTTAISALVFDDHRHRKSFVGSVGLVASISMYGSPLVVMKKVIETRSVEYMPFYLSFFSFLASSLWLAYGLLSHDLFLASPNMVATPLGILQLILYFKYKNKKDLAPTTMVITKRNDHDDKNKATLEFVVDVDRNSDTNEKNSNNASSI

SEQ ID NO: 78929 - protein, 217 aa, Arabidopsis thaliana
  peptide (1)..(217): Ceres Seq. ID no. 12646873
  misc_feature (1)..(52): Pfam Name: MtN3/saliva family Pfam Description: MtN3/saliva family
  misc_feature (1)..(217): Homolog of NCBI NO: 34146818 NR Description: At5g53190 [Arabidopsis thaliana]
  misc_feature (1)..(217): Homolog of NCBI NO: 15238678 NR Description: MtN3 protein-like; protein id: At5g53190.1
  misc_feature (1)..(172): Homolog of NCBI NO: 34904086 NR Description: unnamed protein product [Oryza sativa (japonica group)] >gi|8096648|dbj|BAA96219.1| unnamed protein product
  misc_feature (1)..(171): Homolog of NCBI NO: 18394992 NR Description: expressed protein; protein id: At1g21460.1, by cDNA: 6411. [Arabidopsis thaliana] >gi|21594011|gb|AAM65929.1| [Arabidopsis thaliana] >gi|28393568|gb|AAO42204.1| unknown
  misc_feature (1)..(175): Homolog of NCBI NO: 34907420 NR Description: P0018C10.36 [Oryza sativa (japonica
  misc_feature (1)..(167): Homolog of NCBI NO: 18405611 NR Description: Expressed protein; protein id: At3g28007.1, by cDNA: 22745., supported by cDNA: gi_16226221 [Arabidopsis >gi|16226222|gb|AAL16107.1|AF428275_1 unknown protein
  misc_feature (1)..(167): Homolog of NCBI NO: 21592355 NR Description: contains similarity to nodulin MtN3 protein
  misc_feature (1)..(171): Homolog of NCBI NO: 27754697 NR Description: putative cytochrome c oxidoreductase [Arabidopsis
  misc_feature (1)..(173): Homolog of NCBI NO: 30684193 NR Description: nodulin MtN3 family protein [Arabidopsis thaliana]
  misc_feature (1)..(171): Homolog of NCBI NO: 30683457 NR Description: nodulin MtN3 family protein [Arabidopsis thaliana]
MTLFNCLIYTWYGLPIVSHLWENLPLVTINGVGILLESIFIFIYFYYASPKEKIKVGVTFVPVIVGFGLTTAISALVFDDHRHRKSFVGSVGLVASISMYGSPLVVMKKVIETRSVEYMPFYLSFFSFLASSLWLAYGLLSHDLFLASPNMVATPLGILQLILYFKYKNKKDLAPTTMVITKRNDHDDKNKATLEFVVDVDRNSDTNEKNSNNASSI

SEQ ID NO: 78930 - DNA, 1095 bp, Arabidopsis thaliana
  misc_feature (1)..(1095): Ceres Seq. ID no. 12646876
  misc_feature: MA Experiment ID: 20000171 Result: Down-regulated in Transcription
  misc_feature: MA Experiment 20000171 PARAMETER Experiment Name: At_42deg_Heat_P Parameter: Age (day) Value: 14
  misc_feature: MA Experiment 20000171 PARAMETER Experiment Name: At_42deg_Heat_P Parameter: Organism Value: A. thaliana
  misc_feature: MA Experiment 20000171 PARAMETER Experiment Name: At_42deg_Heat_P Parameter: Plant Line Value: WS
  misc_feature: MA Experiment 20000171 PARAMETER Experiment Name: At_42deg_Heat_P Parameter: Temperature (deg C) Value: 42 vs. 22
  misc_feature: MA Experiment 20000171 PARAMETER Experiment Name: At_42deg_Heat_P Parameter: Timepoint (hr) Value: 1
  misc_feature: MA Experiment 20000171 PARAMETER Experiment Name: At_42deg_Heat_P Parameter: Tissue Value: Aerial
  misc_feature: MA Experiment ID: 20000436 Result: Down-regulated in Transcription
  misc_feature: MA Experiment 20000436 PARAMETER Experiment Name: At_Drought_P Parameter: Age (day) Value: 7
  misc_feature: MA Experiment 20000436 PARAMETER Experiment Name: At_Drought_P Parameter: Organism Value: A. thaliana
  misc_feature: MA Experiment 20000436 PARAMETER Experiment Name: At_Drought_P Parameter: Plant Line Value: WS
  misc_feature: MA Experiment 20000436 PARAMETER Experiment Name: At_Drought_P Parameter: Timepoint (hr) Value: 12
  misc_feature: MA Experiment 20000436 PARAMETER Experiment Name: At_Drought_P Parameter: Tissue Value: Whole Plant
  misc_feature: MA Experiment 20000436 PARAMETER Experiment Name: At_Drought_P Parameter: Treatment Value: Drought vs. No Drought
  misc_feature: MA Experiment ID: 20000453 Result: Down-regulated in Transcription
  misc_feature: MA Experiment 20000453 PARAMETER Experiment Name: At_100uM_ABA_P Parameter: Age (day) Value: 15
  misc_feature: MA Experiment 20000453 PARAMETER Experiment Name: At_100uM_ABA_P Parameter: Organism Value: A. thaliana
  misc_feature: MA Experiment 20000453 PARAMETER Experiment Name: At_100uM_ABA_P Parameter: Plant Line Value: WS
  misc_feature: MA Experiment 20000453 PARAMETER Experiment Name: At_100uM_ABA_P Parameter: Timepoint (hr) Value: 24
  misc_feature: MA Experiment 20000453 PARAMETER Experiment Name: At_100uM_ABA_P Parameter: Tissue Value: Aerial
  misc_feature: MA Experiment 20000453 PARAMETER Experiment Name: At_100uM_ABA_P Parameter: Treatment Value: 100uM ABA vs. No Treatment
atgcaggagataataccggattttcttgaagagtgtgaatttgtcgacacttcactagccggagatgatctatttgccatcttagagagtcttgaaggtgccggagagatatctccgacagctgcatctacacctaaagatggaaccacaagttccaaggagttagttaaggatcaagattatgaaaactcatctcctaagaggaaaaagcaaagactagaaaccaggaaagaagaggacgaagaagaagaagacggagacggagaagcagaagaagataataagcaagatgggcaacaaaagatgtctcatgtaaccgtggaacgtaaccggagaaagcaaatgaacgagcacttaaccgttttgcgttctcttatgccttgtttctacgtcaaacggggggaccaagcatcgatcataggaggagttgtggagtacataagcgagttacaacaagttctccaatctttggaagccaagaaacaacgtaaaacctacgccgaagtcctaagcccgagagttgtcccgagccctcgtccttcaccgcctgttctaagcccaagaaaaccgcctcttagcccgcgcatcaaccaccaccagattcaccaccacctacttctccctcccataagtcctcgaacacctcagccaacaagcccataccgggccattccaccgcaactaccactcatcccacagcctccgcttcgctcttacagctcattggccagttgcagcagcttaggagatccacctccatactctcctgcttcatcttcttcatctccttcagttagtagtaaccatgagagtagtgtgatcaatgagcttgttgctaactcaaaatcggctttggctgatgtggaagtgaagttttcaggagctaacgtgctgctcaaaacggtgtcgcataagatcccgggacaagttatgaagataattgctgctcttgaagatttggctcttgagattcttcaggttaatattaacaccgtcgacgaaaccatgcttaattctttcaccatcaagattggaattgagtgccaactaagtgcagaagaactggctcaacaaattcagcaaacattctgctag

SEQ ID NO: 78931 - protein, 364 aa, Arabidopsis thaliana
  peptide (1)..(364): Ceres Seq. ID no. 12646877
  misc_feature (100)..(151): Pfam Name: Helix-loop-helix DNA-binding domain Pfam Description: Helix-loop-helix DNA-binding domain
  misc_feature (1)..(200): Homolog of NCBI NO: 15238680 NR Description: bHLH protein; protein id: At5g53210.1
  misc_feature (251)..(364): Homolog of NCBI NO: 15238680 NR Description: bHLH protein; protein id: At5g53210.1
  misc_feature (102)..(198): Homolog of NCBI NO: 15230639 NR Description: putative helix-loop-helix DNA-binding protein; id: At3g06120.1 [Arabidopsis thaliana]
  misc_feature (271)..(363): Homolog of NCBI NO: 15230639 NR Description: putative helix-loop-helix DNA-binding protein; id: At3g06120.1 [Arabidopsis thaliana]
  misc_feature (57)..(184): Homolog of NCBI NO: 30687365 NR Description: bHLH protein family [Arabidopsis thaliana]
  misc_feature (274)..(363): Homolog of NCBI NO: 30687365 NR Description: bHLH protein family [Arabidopsis thaliana]
  misc_feature (57)..(184): Homolog of NCBI NO: 11994233 NR Description: contains similarity to helix-loop-helix
  misc_feature (274)..(346): Homolog of NCBI NO: 11994233 NR Description: contains similarity to helix-loop-helix
  misc_feature (1)..(163): Homolog of NCBI NO: 15234187 NR Description: bHLH protein; protein id: At4g01460.1, supported cDNA: gi_20127053, supported by cDNA: gi_20466627 [Arabidopsis
  misc_feature (250)..(363): Homolog of NCBI NO: 15234187 NR Description: bHLH protein; protein id: At4g01460.1, supported cDNA: gi_20127053, supported by cDNA: gi_20466627 [Arabidopsis
MQEIIPDFLEECEFVDTSLAGDDLFAILESLEGAGEISPTAASTPKDGTTSSKELVKDQDYENSSPKRKKQRLETRKEEDEEEEDGDGEAEEDNKQDGQQKMSHVTVERNRRKQMNEHLTVLRSLMPCFYVKRGDQASIIGGVVEYISELQQVLQSLEAKKQRKTYAEVLSPRVVPSPRPSPPVLSPRKPPLSPRINHHQIHHHLLLPPISPRTPQPTSPYRAIPPQLPLIPQPPLRSYSSLASCSSLGDPPPYSPASSSSSPSVSSNHESSVINELVANSKSALADVEVKFSGANVLLKTVSHKIPGQVMKIIAALEDLALEILQVNINTVDETMLNSFTIKIGIECQLSAEELAQQIQQTFC

SEQ ID NO: 78932 - protein, 263 aa, Arabidopsis thaliana
  peptide (1)..(263): Ceres Seq. ID no. 12646878
  misc_feature (1)..(50): Pfam Name: Helix-loop-helix DNA-binding domain Pfam Description: Helix-loop-helix DNA-binding domain
  misc_feature (1)..(99): Homolog of NCBI NO: 15238680 NR Description: bHLH protein; protein id: At5g53210.1
  misc_feature (150)..(263): Homolog of NCBI NO: 15238680 NR Description: bHLH protein; protein id: At5g53210.1
  misc_feature (1)..(97): Homolog of NCBI NO: 15230639 NR Description: putative helix-loop-helix DNA-binding protein; id: At3g06120.1 [Arabidopsis thaliana]
  misc_feature (170)..(262): Homolog of NCBI NO: 15230639 NR Description: putative helix-loop-helix DNA-binding protein; id: At3g06120.1 [Arabidopsis thaliana]
  misc_feature (1)..(83): Homolog of NCBI NO: 30687365 NR Description: bHLH protein family [Arabidopsis thaliana]
  misc_feature (173)..(262): Homolog of NCBI NO: 30687365 NR Description: bHLH protein family [Arabidopsis thaliana]
  misc_feature (1)..(83): Homolog of NCBI NO: 11994233 NR Description: contains similarity to helix-loop-helix
  misc_feature (173)..(245): Homolog of NCBI NO: 11994233 NR Description: contains similarity to helix-loop-helix
  misc_feature (1)..(62): Homolog of NCBI NO: 15234187 NR Description: bHLH protein; protein id: At4g01460.1, supported cDNA: gi_20127053, supported by cDNA: gi_20466627 [Arabidopsis
  misc_feature (149)..(262): Homolog of NCBI NO: 15234187 NR Description: bHLH protein; protein id: At4g01460.1, supported cDNA: gi_20127053, supported by cDNA: gi_20466627 [Arabidopsis
MSHVTVERNRRKQMNEHLTVLRSLMPCFYVKRGDQASIIGGVVEYISELQQVLQSLEAKKQRKTYAEVLSPRVVPSPRPSPPVLSPRKPPLSPRINHHQIHHHLLLPPISPRTPQPTSPYRAIPPQLPLIPQPPLRSYSSLASCSSLGDPPPYSPASSSSSPSVSSNHESSVINELVANSKSALADVEVKFSGANVLLKTVSHKIPGQVMKIIAALEDLALEILQVNINTVDETMLNSFTIKIGIECQLSAEELAQQIQQTFC

SEQ ID NO: 78933 - protein, 250 aa, Arabidopsis thaliana
  peptide (1)..(250): Ceres Seq. ID no. 12646879
  misc_feature (1)..(37): Pfam Name: Helix-loop-helix DNA-binding domain Pfam Description: Helix-loop-helix DNA-binding domain
  misc_feature (1)..(86): Homolog of NCBI NO: 15238680 NR Description: bHLH protein; protein id: At5g53210.1
  misc_feature (137)..(250): Homolog of NCBI NO: 15238680 NR Description: bHLH protein; protein id: At5g53210.1
  misc_feature (1)..(84): Homolog of NCBI NO: 15230639 NR Description: putative helix-loop-helix DNA-binding protein; id: At3g06120.1 [Arabidopsis thaliana]
  misc_feature (157)..(249): Homolog of NCBI NO: 15230639 NR Description: putative helix-loop-helix DNA-binding protein; id: At3g06120.1 [Arabidopsis thaliana]
  misc_feature (1)..(70): Homolog of NCBI NO: 30687365 NR Description: bHLH protein family [Arabidopsis thaliana]
  misc_feature (160)..(249): Homolog of NCBI NO: 30687365 NR Description: bHLH protein family [Arabidopsis thaliana]
  misc_feature (1)..(70): Homolog of NCBI NO: 11994233 NR Description: contains similarity to helix-loop-helix
  misc_feature (160)..(232): Homolog of NCBI NO: 11994233 NR Description: contains similarity to helix-loop-helix
  misc_feature (1)..(49): Homolog of NCBI NO: 15234187 NR Description: bHLH protein; protein id: At4g01460.1, supported cDNA: gi_20127053, supported by cDNA: gi_20466627 [Arabidopsis
  misc_feature (136)..(249): Homolog of NCBI NO: 15234187 NR Description: bHLH protein; protein id: At4g01460.1, supported cDNA: gi_20127053, supported by cDNA: gi_20466627 [Arabidopsis
MNEHLTVLRSLMPCFYVKRGDQASIIGGVVEYISELQQVLQSLEAKKQRKTYAEVLSPRVVPSPRPSPPVLSPRKPPLSPRINHHQIHHHLLLPPISPRTPQPTSPYRAIPPQLPLIPQPPLRSYSSLASCSSLGDPPPYSPASSSSSPSVSSNHESSVINELVANSKSALADVEVKFSGANVLLKTVSHKIPGQVMKIIAALEDLALEILQVNINTVDETMLNSFTIKIGIECQLSAEELAQQIQQTFC

SEQ ID NO: 78934 - DNA, 1350 bp, Arabidopsis thaliana
  misc_feature (1)..(1350): Ceres Seq. ID no. 12646880
  misc_feature: MA Experiment ID: 20000437 Result: Up-regulated in Transcription
  misc_feature: MA Experiment 20000437 PARAMETER Experiment Name: At_Drought_P Parameter: Age (day) Value: 8
  misc_feature: MA Experiment 20000437 PARAMETER Experiment Name: At_Drought_P Parameter: Organism Value: A. thaliana
  misc_feature: MA Experiment 20000437 PARAMETER Experiment Name: At_Drought_P Parameter: Plant Line Value: WS
  misc_feature: MA Experiment 20000437 PARAMETER Experiment Name: At_Drought_P Parameter: Timepoint (hr) Value: 24
  misc_feature: MA Experiment 20000437 PARAMETER Experiment Name: At_Drought_P Parameter: Tissue Value: Whole Plant
  misc_feature: MA Experiment 20000437 PARAMETER Experiment Name: At_Drought_P Parameter: Treatment Value: Drought vs. No Drought
  misc_feature: MA Experiment ID: 20001557 Result: Down-regulated in Transcription
  misc_feature: MA Experiment 20001557 PARAMETER Experiment Name: At_Drought_Soil_Dry_P Parameter: Age (day) Value: 27
  misc_feature: MA Experiment 20001557 PARAMETER Experiment Name: At_Drought_Soil_Dry_P Parameter: Organism Value: A. thaliana
  misc_feature: MA Experiment 20001557 PARAMETER Experiment Name: At_Drought_Soil_Dry_P Parameter: Plant Line Value: WS
  misc_feature: MA Experiment 20001557 PARAMETER Experiment Name: At_Drought_Soil_Dry_P Parameter: Post Timepoint (hr) Value: 3
  misc_feature: MA Experiment 20001557 PARAMETER Experiment Name: At_Drought_Soil_Dry_P Parameter: Post-Treatment Value: Re-Water vs. No Drought
  misc_feature: MA Experiment 20001557 PARAMETER Experiment Name: At_Drought_Soil_Dry_P Parameter: Timepoint (day) Value: 13
  misc_feature: MA Experiment 20001557 PARAMETER Experiment Name: At_Drought_Soil_Dry_P Parameter: Treatment Value: Drought vs. No Drought
  misc_feature: MA Experiment ID: 20001558 Result: Down-regulated in Transcription
  misc_feature: MA Experiment 20001558 PARAMETER Experiment Name: At_Drought_Soil_Dry_P Parameter: Age (day) Value: 27
  misc_feature: MA Experiment 20001558 PARAMETER Experiment Name: At_Drought_Soil_Dry_P Parameter: Organism Value: A. thaliana
  misc_feature: MA Experiment 20001558 PARAMETER Experiment Name: At_Drought_Soil_Dry_P Parameter: Plant Line Value: WS
  misc_feature: MA Experiment 20001558 PARAMETER Experiment Name: At_Drought_Soil_Dry_P Parameter: Post Timepoint (hr) Value: 6
  misc_feature: MA Experiment 20001558 PARAMETER Experiment Name: At_Drought_Soil_Dry_P Parameter: Post-Treatment Value: Re-Water vs. No Drought
  misc_feature: MA Experiment 20001558 PARAMETER Experiment Name: At_Drought_Soil_Dry_P Parameter: Timepoint (day) Value: 13
  misc_feature: MA Experiment 20001558 PARAMETER Experiment Name: At_Drought_Soil_Dry_P Parameter: Treatment Value: Drought vs. No Drought
atggaggtgaattcgatgggactaaattgtcggtgtcttgagttagaagaaagggttttaaaaggtgaagaaaggtacactcacttagaaacagagttgcagaaacgaaacaatgagtttgaatcacttgaattgaagtttaaagaattggaatcagagaagttagtagttgaagaagagtcaaggaatcttaaagaatctgaggaagatgatggtgaacagagcattggaggctcaccttgtatgaccacaccggttaaagactatatattagggagagacagagatagagacagagacaccatgtcttctcggagacgagtgaataagatgttgtcgtttgaagatgatggtcacaaattgactgatgtagttgatttatgtgatagtgaaacagagcagagaagtgaggaggaggaatttgctgatgttatggatactatagaggaggcaaatattggtgagaattatgaagatgaagatgtggaagcttgtgatgctaacacaagtagtcctctttctaggcgtaagaggaagcgggttattgccagcgatgatgatgatgatgctgatgatgatgatgaagataatataccgatttcaatactcaagaatttgaaaccaactaaccaagagatgtcagatttgtttgatacacctaacaaaggagagagtgagtctagaagattgagtggacaacgtcgagtgtcgtcaagactgaataaaaagagagtttctgaagaggtatctgcttcaacagagagacttgtgggaatcccaacaaccgataatgccgaggatgatgagacagaagaagaaggttcagagagtgagggtgagagtttagatgggtttattatcgatgatgatgatagtcaggagtctgtcagtgaaaagtctgatgaaatcggggtagaggaatccgatggagaagttggttatgctgatgttatgtcaaggttaaggagggagaagaaacccgagaagcgtaaatgggagtatgaggcagatatgttggcagatttcggtaaagatcctgagctttgtatgagagcggtttgtgttctgtttaggtttcaaacagaagatgaaaaagtggaaagatcaagtcatgtctctaatggtcgcggtttcagcaaggttgacgctgtaaggggcactagcattgcactgtttctgacggatggagattccgcaggcgatatgaagaaatccgttgaggaattgaaagtttttgactttaaaggcgtagagaaatgcgaagaattagcacgcaaatactctaaacaactcttccagatctataacaacagagaagatccattctttactcttcctccatctccatga

SEQ ID NO: 78935 - protein, 449 aa, Arabidopsis thaliana
  peptide (1)..(449): Ceres Seq. ID no. 12646881
  misc_feature (29)..(246): Pfam Name: Nop14-like family Pfam Description: Nop14-like family
  misc_feature (1)..(449): Homolog of NCBI NO: 15238681 NR Description: unknown protein; protein id: At5g53220.1 thaliana] >gi|9759169|dbj|BAB09784.1| gene_id:K19E1.2~unknown
  misc_feature (326)..(443): Homolog of NCBI NO: 21742592 NR Description: OSJNBb0076A22.19 [Oryza sativa (japonica
  misc_feature (14)..(347): Homolog of NCBI NO: 23613492 NR Description: P. falciparum RESA-like protein with DnaJ domain
  misc_feature (23)..(337): Homolog of NCBI NO: 9837385 NR Description: retinitis pigmentosa GTPase regulator-like
  misc_feature (48)..(333): Homolog of NCBI NO: 21309836 NR Description: glutamic acid-rich protein cNBL1700 [Trichinella
  misc_feature (23)..(329): Homolog of NCBI NO: 9837385 NR Description: retinitis pigmentosa GTPase regulator-like
  misc_feature (30)..(347): Homolog of NCBI NO: 26554099 NR Description: DNA topoisomerase IV subunit A [Mycoplasma >gi|26454107|dbj|BAC44437.1| DNA topoisomerase IV subunit A
  misc_feature (16)..(302): Homolog of NCBI NO: 21309836 NR Description: glutamic acid-rich protein cNBL1700 [Trichinella
MEVNSMGLNCRCLELEERVLKGEERYTHLETELQKRNNEFESLELKFKELESEKLVVEEESRNLKESEEDDGEQSIGGSPCMTTPVKDYILGRDRDRDRDTMSSRRRVNKMLSFEDDGHKLTDVVDLCDSETEQRSEEEEFADVMDTIEEANIGENYEDEDVEACDANTSSPLSRRKRKRVIASDDDDDADDDDEDNIPISILKNLKPTNQEMSDLFDTPNKGESESRRLSGQRRVSSRLNKKRVSEEVSASTERLVGIPTTDNAEDDETEEEGSESEGESLDGFIIDDDDSQESVSEKSDEIGVEESDGEVGYADVMSRLRREKKPEKRKWEYEADMLADFGKDPELCMRAVCVLFRFQTEDEKVERSSHVSNGRGFSKVDAVRGTSIALFLTDGDSAGDMKKSVEELKVFDFKGVEKCEELARKYSKQLFQIYNNREDPFFTLPPSP

SEQ ID NO: 78936 - protein, 444 aa, Arabidopsis thaliana
  peptide (1)..(444): Ceres Seq. ID no. 12646882
  misc_feature (24)..(241): Pfam Name: Nop14-like family Pfam Description: Nop14-like family
  misc_feature (1)..(444): Homolog of NCBI NO: 15238681 NR Description: unknown protein; protein id: At5g53220.1 thaliana] >gi|9759169|dbj|BAB09784.1| gene_id:K19E1.2~unknown
  misc_feature (321)..(438): Homolog of NCBI NO: 21742592 NR Description: OSJNBb0076A22.19 [Oryza sativa (japonica
  misc_feature (9)..(342): Homolog of NCBI NO: 23613492 NR Description: P. falciparum RESA-like protein with DnaJ domain
  misc_feature (18)..(332): Homolog of NCBI NO: 9837385 NR Description: retinitis pigmentosa GTPase regulator-like
  misc_feature (43)..(328): Homolog of NCBI NO: 21309836 NR Description: glutamic acid-rich protein cNBL1700 [Trichinella
  misc_feature (18)..(324): Homolog of NCBI NO: 9837385 NR Description: retinitis pigmentosa GTPase regulator-like
  misc_feature (25)..(342): Homolog of NCBI NO: 26554099 NR Description: DNA topoisomerase IV subunit A [Mycoplasma >gi|26454107|dbj|BAC44437.1| DNA topoisomerase IV subunit A
  misc_feature (11)..(297): Homolog of NCBI NO: 21309836 NR Description: glutamic acid-rich protein cNBL1700 [Trichinella
MGLNCRCLELEERVLKGEERYTHLETELQKRNNEFESLELKFKELESEKLVVEEESRNLKESEEDDGEQSIGGSPCMTTPVKDYILGRDRDRDRDTMSSRRRVNKMLSFEDDGHKLTDVVDLCDSETEQRSEEEEFADVMDTIEEANIGENYEDEDVEACDANTSSPLSRRKRKRVIASDDDDDADDDDEDNIPISILKNLKPTNQEMSDLFDTPNKGESESRRLSGQRRVSSRLNKKRVSEEVSASTERLVGIPTTDNAEDDETEEEGSESEGESLDGFIIDDDDSQESVSEKSDEIGVEESDGEVGYADVMSRLRREKKPEKRKWEYEADMLADFGKDPELCMRAVCVLFRFQTEDEKVERSSHVSNGRGFSKVDAVRGTSIALFLTDGDSAGDMKKSVEELKVFDFKGVEKCEELARKYSKQLFQIYNNREDPFFTLPPSP

SEQ ID NO: 78937 - protein, 368 aa, Arabidopsis thaliana; identical to SEQ ID NO: 72933
  peptide (1)..(368): Ceres Seq. ID no. 12646883
  misc_feature (1)..(165): Pfam Name: Nop14-like family Pfam Description: Nop14-like family
  misc_feature (1)..(368): Homolog of NCBI NO: 15238681 NR Description: unknown protein; protein id: At5g53220.1 thaliana] >gi|9759169|dbj|BAB09784.1| gene_id:K19E1.2~unknown
  misc_feature (245)..(362): Homolog of NCBI NO: 21742592 NR Description: OSJNBb0076A22.19 [Oryza sativa (japonica
  misc_feature (1)..(266): Homolog of NCBI NO: 23613492 NR Description: P. falciparum RESA-like protein with DnaJ domain
  misc_feature (1)..(256): Homolog of NCBI NO: 9837385 NR Description: retinitis pigmentosa GTPase regulator-like
  misc_feature (1)..(252): Homolog of NCBI NO: 21309836 NR Description: glutamic acid-rich protein cNBL1700 [Trichinella
  misc_feature (1)..(248): Homolog of NCBI NO: 9837385 NR Description: retinitis pigmentosa GTPase regulator-like
  misc_feature (1)..(266): Homolog of NCBI NO: 26554099 NR Description: DNA topoisomerase IV subunit A [Mycoplasma >gi|26454107|dbj|BAC44437.1| DNA topoisomerase IV subunit A
  misc_feature (1)..(221): Homolog of NCBI NO: 21309836 NR Description: glutamic acid-rich protein cNBL1700 [Trichinella

SEQ ID NO: 78938 - DNA, 1365 bp, Arabidopsis thaliana
  misc_feature (1)..(1365): Ceres Seq. ID no. 12646921
  misc_feature: MA Experiment ID: 108474 Result: Down-regulated in Transcription
  misc_feature: MA Experiment 108474 PARAMETER Experiment Name: At_Drought_Flowers_cDNA_P Parameter: Timepoint (hr) Value: null
  misc_feature: MA Experiment 108474 PARAMETER Experiment Name: At_Drought_Flowers_cDNA_P Parameter: Treatment Value: Drought vs. No Drought
  misc_feature: MA Experiment ID: 20000264 Result: Up-regulated in Transcription
  misc_feature: MA Experiment 20000264 PARAMETER Experiment Name: At_Open_Flower_P Parameter: Age (day) Value: 21
  misc_feature: MA Experiment 20000264 PARAMETER Experiment Name: At_Open_Flower_P Parameter: Plant Line Value: WS
  misc_feature: MA Experiment 20000264 PARAMETER Experiment Name: At_Open_Flower_P Parameter: Tissue Value: Open Flower vs. Whole Plant
  misc_feature: MA Experiment ID: 20000265 Result: Up-regulated in Transcription
  misc_feature: MA Experiment 20000265 PARAMETER Experiment Name: At_Open_Flower_P Parameter: Age (day) Value: 21
  misc_feature: MA Experiment 20000265 PARAMETER Experiment Name: At_Open_Flower_P Parameter: Plant Line Value: WS
  misc_feature: MA Experiment 20000265 PARAMETER Experiment Name: At_Open_Flower_P Parameter: Tissue Value: Closed Flower vs. Whole Plant
  misc_feature: MA Experiment ID: 20000286 Result: Up-regulated in Transcription
  misc_feature: MA Experiment 20000286 PARAMETER Experiment Name: At_Open_Flower_P Parameter: Age (day) Value: 21
  misc_feature: MA Experiment 20000286 PARAMETER Experiment Name: At_Open_Flower_P Parameter: Plant Line Value: WS
  misc_feature: MA Experiment 20000286 PARAMETER Experiment Name: At_Open_Flower_P Parameter: Tissue Value: Half Open vs. Whole Plant
  misc_feature: MA Experiment ID: 20000441 Result: Down-regulated in Transcription
  misc_feature: MA Experiment 20000441 PARAMETER Experiment Name: At_1uM_BR-BRZ__P Parameter: Tissue Value: Shoot Apices
  misc_feature: MA Experiment 20000441 PARAMETER Experiment Name: At_1uM_BR-BRZ__P Parameter: Treatment Value: 1uM BR vs. No Treatment
  misc_feature: MA Experiment ID: 20001911 Result: Down-regulated in Transcription
  misc_feature: MA Experiment 20001911 PARAMETER Experiment Name: At_Drought_Reproduction_P Parameter: Age (day) Value: 40
  misc_feature: MA Experiment 20001911 PARAMETER Experiment Name: At_Drought_Reproduction_P Parameter: Organism Value: A. thaliana
  misc_feature: MA Experiment 20001911 PARAMETER Experiment Name: At_Drought_Reproduction_P Parameter: Plant Line Value: WS
  misc_feature: MA Experiment 20001911 PARAMETER Experiment Name: At_Drought_Reproduction_P Parameter: Timepoint (day) Value: 10
  misc_feature: MA Experiment 20001911 PARAMETER Experiment Name: At_Drought_Reproduction_P Parameter: Tissue Value: Flowers
  misc_feature: MA Experiment 20001911 PARAMETER Experiment Name: At_Drought_Reproduction_P Parameter: Treatment Value: Drought vs. No Drought
atgacatccgtcgtgtgtatgggacgactcggtagccttgagctcgcaggaggagccttagccatcggtttcaccaacatcaccggttactccgtcctctctggtttagccaccggtatggaaccattatgtggtcaagccatcggttctaaaaacccttcactcgcttccttaaccctcaagcgaaccatcttcctccttctcttagcttctcttcccatatcactcctttggctaaacctcgcgcctctaatgctgatgctccgccaacaacatgatatcactcgtgtcgcatctctctattgttccttctctttgcctgatcttctcgctaatagtttccttcatcctttacgtatttacttacgttgtaaaggcaccacttggcctttgatgtggtgcacgttagtctccgtccttcttcatcttcccattactgctttcttcacgttttacatctctctcggagttcccggagtcgccgtctcttcttttcttaccaacttcatctctttgtcgcttctcctttgctacatctacttggaaaacaacaacaacgacaaaaccacttccaagtctctttgtcttgatacgccgttgatgctgtatggttcgagagactccggtgaaaatgatgtgtggtcaacgctggttaaattcgctgttccgagctgtatagcggtttgcttggagtggtggtggtacgagttcatgacggtcctcgctggatatctccccgagccgaaggtggcgctagcagcagccgccatcgtgatacaaacaacctcattgatgtatacaatcccaacggccctctcggccgcggtatccacgagggtaagcaacgagttaggagcaggacggccagagaaagcaaaaacagcggcgactgtggctgtcggagccgccgtggcagtgtcagtgtttggacttgtggggaccaccgtggggagagaagcttggggaaaagttttcaccgccgacaaagttgtcctcgagctgacggcggcggttattccggtgattggagcttgtgagcttgccaactgtcctcagaccattagctgtggaatcttacgtggcagtgcgaggccaggtataggggccaagattaatttctacgccttctatgtagttggagcaccagtggcggttgttttagcgtttgtgtggggtttaggcttcatgggcctatgctatggcttgcttggggcacagctagcttgtgcaatctccattttgaccgttgtttataacacagattggaacaaagagtccttgaaggctcatgacttggtgggcaagaacgtcatttcacctaatgtcgatcaaattattgtcaaatgcgaagaaggcctacactaa

SEQ ID NO: 78939 - protein, 454 aa, Arabidopsis thaliana
  peptide (1)..(454): Ceres Seq. ID no. 12646922
  misc_feature (1)..(454): Homolog of NCBI NO: 15239797 NR Description: putative protein; protein id: At5g49130.1 thaliana] >gi|10176946|dbj|BAB10095.1| similarity to unknown protein [Arabidopsis thaliana]
  misc_feature (1)..(429): Homolog of NCBI NO: 15217599 NR Description: hypothetical protein; protein id: At1g71870.1
  misc_feature (1)..(439): Homolog of NCBI NO: 28376699 NR Description: putative MATE efflux membrane protein [Oryza
  misc_feature (3)..(447): Homolog of NCBI NO: 15233459 NR Description: putative protein; protein id: At4g29140.1
  misc_feature (1)..(435): Homolog of NCBI NO: 18406257 NR Description: expressed protein; protein id: At1g58340.1, by cDNA: gi_6520160 [Arabidopsis thaliana]
  misc_feature (3)..(432): Homolog of NCBI NO: 15241158 NR Description: putative protein; protein id: At5g19700.1
  misc_feature (1)..(451): Homolog of NCBI NO: 38567909 NR Description: OSJNBa0088I22.5 [Oryza sativa (japonica
  misc_feature (3)..(429): Homolog of NCBI NO: 15242265 NR Description: integral membrane protein-like; protein id:
  misc_feature (3)..(429): Homolog of NCBI NO: 39104576 NR Description: putative integral membrane protein [Arabidopsis
  misc_feature (1)..(434): Homolog of NCBI NO: 37536202 NR Description: putative membrane protein [Oryza sativa (japonica group)] >gi|27311284|gb|AAO00710.1| putative membrane protein
MTSVVCMGRLGSLELAGGALAIGFTNITGYSVLSGLATGMEPLCGQAIGSKNPSLASLTLKRTIFLLLLASLPISLLWLNLAPLMLMLRQQHDITRVASLYCSFSLPDLLANSFLHPLRIYLRCKGTTWPLMWCTLVSVLLHLPITAFFTFYISLGVPGVAVSSFLTNFISLSLLLCYIYLENNNNDKTTSKSLCLDTPLMLYGSRDSGENDVWSTLVKFAVPSCIAVCLEWWWYEFMTVLAGYLPEPKVALAAAAIVIQTTSLMYTIPTALSAAVSTRVSNELGAGRPEKAKTAATVAVGAAVAVSVFGLVGTTVGREAWGKVFTADKVVLELTAAVIPVIGACELANCPQTISCGILRGSARPGIGAKINFYAFYVVGAPVAVVLAFVWGLGFMGLCYGLLGAQLACAISILTVVYNTDWNKESLKAHDLVGKNVISPNVDQIIVKCEEGLH

SEQ ID NO: 78940 - protein, 448 aa, Arabidopsis thaliana
  peptide (1)..(448): Ceres Seq. ID no. 12646923
  misc_feature (1)..(448): Homolog of NCBI NO: 15239797 NR Description: putative protein; protein id: At5g49130.1 thaliana] >gi|10176946|dbj|BAB10095.1| similarity to unknown protein [Arabidopsis thaliana]
  misc_feature (1)..(423): Homolog of NCBI NO: 15217599 NR Description: hypothetical protein; protein id: At1g71870.1
  misc_feature (1)..(433): Homolog of NCBI NO: 28376699 NR Description: putative MATE efflux membrane protein [Oryza
  misc_feature (1)..(441): Homolog of NCBI NO: 15233459 NR Description: putative protein; protein id: At4g29140.1
  misc_feature (1)..(429): Homolog of NCBI NO: 18406257 NR Description: expressed protein; protein id: At1g58340.1, by cDNA: gi_6520160 [Arabidopsis thaliana]
  misc_feature (1)..(426): Homolog of NCBI NO: 15241158 NR Description: putative protein; protein id: At5g19700.1
  misc_feature (1)..(445): Homolog of NCBI NO: 38567909 NR Description: OSJNBa0088I22.5 [Oryza sativa (japonica
  misc_feature (1)..(423): Homolog of NCBI NO: 15242265 NR Description: integral membrane protein-like; protein id:
  misc_feature (1)..(423): Homolog of NCBI NO: 39104576 NR Description: putative integral membrane protein [Arabidopsis
  misc_feature (1)..(428): Homolog of NCBI NO: 37536202 NR Description: putative membrane protein [Oryza sativa (japonica group)] >gi|27311284|gb|AAO00710.1| putative membrane protein
MGRLGSLELAGGALAIGFTNITGYSVLSGLATGMEPLCGQAIGSKNPSLASLTLKRTIFLLLLASLPISLLWLNLAPLMLMLRQQHDITRVASLYCSFSLPDLLANSFLHPLRIYLRCKGTTWPLMWCTLVSVLLHLPITAFFTFYISLGVPGVAVSSFLTNFISLSLLLCYIYLENNNNDKTTSKSLCLDTPLMLYGSRDSGENDVWSTLVKFAVPSCIAVCLEWWWYEFMTVLAGYLPEPKVALAAAAIVIQTTSLMYTIPTALSAAVSTRVSNELGAGRPEKAKTAATVAVGAAVAVSVFGLVGTTVGREAWGKVFTADKVVLELTAAVIPVIGACELANCPQTISCGILRGSARPGIGAKINFYAFYVVGAPVAVVLAFVWGLGFMGLCYGLLGAQLACAISILTVVYNTDWNKESLKAHDLVGKNVISPNVDQIIVKCEEGLH

SEQ ID NO: 78941 - protein, 415 aa, Arabidopsis thaliana
  peptide (1)..(415): Ceres Seq. ID no. 12646924
  misc_feature (1)..(415): Homolog of NCBI NO: 15239797 NR Description: putative protein; protein id: At5g49130.1 thaliana] >gi|10176946|dbj|BAB10095.1| similarity to unknown protein [Arabidopsis thaliana]
  misc_feature (1)..(390): Homolog of NCBI NO: 15217599 NR Description: hypothetical protein; protein id: At1g71870.1
  misc_feature (1)..(400): Homolog of NCBI NO: 28376699 NR Description: putative MATE efflux membrane protein [Oryza
  misc_feature (1)..(408): Homolog of NCBI NO: 15233459 NR Description: putative protein; protein id: At4g29140.1
  misc_feature (1)..(396): Homolog of NCBI NO: 18406257 NR Description: expressed protein; protein id: At1g58340.1, by cDNA: gi_6520160 [Arabidopsis thaliana]
  misc_feature (1)..(393): Homolog of NCBI NO: 15241158 NR Description: putative protein; protein id: At5g19700.1
  misc_feature (1)..(412): Homolog of NCBI NO: 38567909 NR Description: OSJNBa0088I22.5 [Oryza sativa (japonica
  misc_feature (1)..(390): Homolog of NCBI NO: 15242265 NR Description: integral membrane protein-like; protein id:
  misc_feature (1)..(390): Homolog of NCBI NO: 39104576 NR Description: putative integral membrane protein [Arabidopsis
  misc_feature (1)..(395): Homolog of NCBI NO: 37536202 NR Description: putative membrane protein [Oryza sativa (japonica group)] >gi|27311284|gb|AAO00710.1| putative membrane protein
MEPLCGQAIGSKNPSLASLTLKRTIFLLLLASLPISLLWLNLAPLMLMLRQQHDITRVASLYCSFSLPDLLANSFLHPLRIYLRCKGTTWPLMWCTLVSVLLHLPITAFFTFYISLGVPGVAVSSFLTNFISLSLLLCYIYLENNNNDKTTSKSLCLDTPLMLYGSRDSGENDVWSTLVKFAVPSCIAVCLEWWWYEFMTVLAGYLPEPKVALAAAAIVIQTTSLMYTIPTALSAAVSTRVSNELGAGRPEKAKTAATVAVGAAVAVSVFGLVGTTVGREAWGKVFTADKVVLELTAAVIPVIGACELANCPQTISCGILRGSARPGIGAKINFYAFYVVGAPVAVVLAFVWGLGFMGLCYGLLGAQLACAISILTVVYNTDWNKESLKAHDLVGKNVISPNVDQIIVKCEEGLH

SEQ ID NO: 78942 - DNA, 1950 bp, Arabidopsis thaliana
  misc_feature (1)..(1950): Ceres Seq. ID no. 12646933
  misc_feature: MA Experiment ID: 108501 Result: Up-regulated in Transcription
  misc_feature: MA Experiment 108501 PARAMETER Experiment Name: At_ap2_floral_buds_cDNA_P Parameter: Plant Line Value: ap2 (Ler.)
  misc_feature: MA Experiment 108501 PARAMETER Experiment Name: At_ap2_floral_buds_cDNA_P Parameter: Tissue Value: Closed Flower
  misc_feature: MA Experiment ID: 20000111 Result: Up-regulated in Transcription
  misc_feature: MA Experiment 20000111 PARAMETER Experiment Name: At_42deg_Heat_cDNA_P Parameter: Temperature (deg C) Value: 42 vs. 22
  misc_feature: MA Experiment 20000111 PARAMETER Experiment Name: At_42deg_Heat_cDNA_P Parameter: Timepoint (hr) Value: 6
  misc_feature: MA Experiment 20000111 PARAMETER Experiment Name: At_42deg_Heat_cDNA_P Parameter: Tissue Value: Aerial
  misc_feature: MA Experiment ID: 20000184 Result: Down-regulated in Transcription
  misc_feature: MA Experiment 20000184 PARAMETER Experiment Name: At_Shoots__P Parameter: Age (day) Value: 7
  misc_feature: MA Experiment 20000184 PARAMETER Experiment Name: At_Shoots__P Parameter: Tissue Value: Shoots vs. Whole Plant
  misc_feature: MA Experiment ID: 20000234 Result: Up-regulated in Transcription
  misc_feature: MA Experiment 20000234 PARAMETER Experiment Name: At_Siliques_P Parameter: Age (day) Value: 21
  misc_feature: MA Experiment 20000234 PARAMETER Experiment Name: At_Siliques_P Parameter: Organism Value: A. thaliana
  misc_feature: MA Experiment 20000234 PARAMETER Experiment Name: At_Siliques_P Parameter: Plant Line Value: WS
  misc_feature: MA Experiment 20000234 PARAMETER Experiment Name: At_Siliques_P Parameter: Tissue Value: Less Than 5mm Siliques vs. Whole Plant
  misc_feature: MA Experiment ID: 20000235 Result: Up-regulated in Transcription
  misc_feature: MA Experiment 20000235 PARAMETER Experiment Name: At_Siliques_P Parameter: Age (day) Value: 21
  misc_feature: MA Experiment 20000235 PARAMETER Experiment Name: At_Siliques_P Parameter: Organism Value: A. thaliana
  misc_feature: MA Experiment 20000235 PARAMETER Experiment Name: At_Siliques_P Parameter: Plant Line Value: WS
  misc_feature: MA Experiment 20000235 PARAMETER Experiment Name: At_Siliques_P Parameter: Tissue Value: 5-10mm Siliques vs. Whole Plant
  misc_feature: MA Experiment ID: 20000264 Result: Up-regulated in Transcription
  misc_feature: MA Experiment 20000264 PARAMETER Experiment Name: At_Open_Flower_P Parameter: Age (day) Value: 21
  misc_feature: MA Experiment 20000264 PARAMETER Experiment Name: At_Open_Flower_P Parameter: Plant Line Value: WS
  misc_feature: MA Experiment 20000264 PARAMETER Experiment Name: At_Open_Flower_P Parameter: Tissue Value: Open Flower vs. Whole Plant
  misc_feature: MA Experiment ID: 20000286 Result: Up-regulated in Transcription
  misc_feature: MA Experiment 20000286 PARAMETER Experiment Name: At_Open_Flower_P Parameter: Age (day) Value: 21
  misc_feature: MA Experiment 20000286 PARAMETER Experiment Name: At_Open_Flower_P Parameter: Plant Line Value: WS
  misc_feature: MA Experiment 20000286 PARAMETER Experiment Name: At_Open_Flower_P Parameter: Tissue Value: Half Open vs. Whole Plant
  misc_feature: MA Experiment ID: 20000439 Result: Down-regulated in Transcription
  misc_feature: MA Experiment 20000439 PARAMETER Experiment Name: At_Roots__P Parameter: Age (day) Value: 14 vs. 21
  misc_feature: MA Experiment 20000439 PARAMETER Experiment Name: At_Roots__P Parameter: Organism Value: A. thaliana
  misc_feature: MA Experiment 20000439 PARAMETER Experiment Name: At_Roots__P Parameter: Tissue Value: Roots vs. Whole Plant
  misc_feature: MA Experiment ID: 20000794 Result: Down-regulated in Transcription
  misc_feature: MA Experiment 20000794 PARAMETER Experiment Name: At_Petals_P Parameter: Age (day) Value: 23-25 days
  misc_feature: MA Experiment 20000794 PARAMETER Experiment Name: At_Petals_P Parameter: Plant Line Value: WS
  misc_feature: MA Experiment 20000794 PARAMETER Experiment Name: At_Petals_P Parameter: Tissue Value: Petals vs. Whole plant
attatattttgttaagtccactcttctctctcatatcttctaaccaaaacagagtcacaaggggctcttaagcccttccaactaaattcttttcttttgttctcttgaaactgaatccaccagacaaaaaaatgggggttgatggtgaactgaaaaagaagaaatgcatcattgctggggttatcacagccttgctcgttctcatggttgtcgctgttggcatcacaacatcaagaaacaccagtcattcagaaaaaatcgtccctgtgcagattaaaacagccaccacggcagttgaagcagtttgtgcacctactgattacaaagagacttgtgtcaatagtctcatgaaagcttctcctgactctactcagcctcttgatctcattaagcttggcttcaacgtcaccattcgatccatagaagatagcatcaagaaagcttccgtggagctgacagccaaggcagctaatgacaaggataccaaaggggctttggagttgtgtgagaagcttatgaatgatgctacagatgatctgaagaagtgtcttgataactttgatgggttctcaattcctcagattgaggactttgtcgaagatcttcgtgtttggcttagtggctccattgcttatcaacaaacatgtatggatacgtttgaagaaactaactcgaaactttcacaagacatgcagaaaatctttaaaacatctagagaactcactagtaatggccttgccatgattactaacatctctaaccttctcggagagttcaacgtcacaggagtaaccggggatctcggtaaatacgcaagaaaacttttgtcggcggaagacggtataccaagttgggttggaccaaacactagacggctcatggcaacgaaaggaggtgtgaaagctaacgtggtggttgcacacgacggaagtggtcagtacaagactatcaatgaagccttgaatgcagtgcctaaagccaaccaaaagccatttgttatctacattaagcaaggtgtctataacgagaaagttgacgtcaccaagaaaatgactcatgtcactttcatcggtgatggaccaaccaaaactaagatcactggtagtctcaactattacattggcaaggtcaagacataccttactgccactgttgcgatcaatggtgataacttcacggcgaagaacatcgggtttgaaaacactgcaggtcccgaaggacatcaagctgtggccctaagagtctcggcggatttggccgtcttctacaactgccaaatcgatggttaccaagacacactctacgtccattctcatcgtcaattcttccgtgactgcacagtctcgggcaccgttgacttcattttcggcgatggtatagtagtcttacaaaactgtaacattgttgtgagaaaacccatgaaaagtcagtcttgcatgatcacagcccaaggccgctccgataaacgtgaatccaccggactcgtgctacaaaactgccatattaccggagaaccagcgtatattcccgtaaaatctataaacaaagcatatcttggaaggccatggaaagagttttcaagaaccattataatgggaacaaccatagacgacgttattgatccagcgggatggcttccttggaatggtgattttgcacttaatacgctttactatgctgagtatgagaataatgggcctgggtcaaaccaagcccaacgtgttaagtggcctggaattaagaaactatcgcccaagcaagctcttcgatttactcctgctaggtttttacgtggtaacttgtggattccaccaaatcgtgtgccttacatggggaattttcagtagattccaattggtgaattttccactttctgtgtgctctttaaaaaaaaaaatgaaggtgaataatttatatgcgtgtcttgtcttaaagtcctgacttgccgaa

SEQ ID NO: 78943 - protein, 571 aa, Arabidopsis thaliana; identical to SEQ ID NO: 27572
  peptide (1)..(571): Ceres Seq. ID no. 12646934
  misc_feature (259)..(556): Pfam Name: Pectinesterase Pfam Description: Pectinesterase
  misc_feature (1)..(571): Homolog of NCBI NO: 15239814 NR Description: pectinesterase family; protein id: At5g49180.1, by cDNA: 6699., supported by cDNA: gi_18700150 [Arabidopsis >gi|10177147|dbj|BAB10336.1| pectin methylesterase [Arabidopsis
  misc_feature (1)..(566): Homolog of NCBI NO: 22330893 NR Description: pectin methylesterase, putative; protein id: [Arabidopsis thaliana] >gi|26451728|dbj|BAC42959.1| putative
  misc_feature (1)..(566): Homolog of NCBI NO: 39104585 NR Description: putative pectin methylesterase [Arabidopsis
  misc_feature (1)..(566): Homolog of NCBI NO: 7549630 NR Description: pectin methylesterase, putative [Arabidopsis
  misc_feature (232)..(569): Homolog of NCBI NO: 15234768 NR Description: pectinesterase family; protein id: At4g15980.1
  misc_feature (11)..(217): Homolog of NCBI NO: 15234768 NR Description: pectinesterase family; protein id: At4g15980.1
  misc_feature (2)..(570): Homolog of NCBI NO: 15241079 NR Description: pectin methyl-esterase - like protein; protein
  misc_feature (2)..(566): Homolog of NCBI NO: 15230019 NR Description: putative pectinesterase; protein id: At3g05610.1 thaliana] >gi|6714449|gb|AAF26136.1|AC011620_12 putative
  misc_feature (2)..(566): Homolog of NCBI NO: 26451784 NR Description: putative pectinesterase [Arabidopsis thaliana]
  misc_feature (30)..(568): Homolog of NCBI NO: 25313441 NR Description: pectinesterase (EC 3.1.1.11) [imported] - Salix >gi|6714532|dbj|BAA89480.1| pectin methylesterase [Salix

SEQ ID NO: 78944 - protein, 547 aa, Arabidopsis thaliana; identical to SEQ ID NO: 27573
  peptide (1)..(547): Ceres Seq. ID no. 12646935
  misc_feature (235)..(532): Pfam Name: Pectinesterase Pfam Description: Pectinesterase
  misc_feature (1)..(547): Homolog of NCBI NO: 15239814 NR Description: pectinesterase family; protein id: At5g49180.1, by cDNA: 6699., supported by cDNA: gi_18700150 [Arabidopsis >gi|10177147|dbj|BAB10336.1| pectin methylesterase [Arabidopsis
  misc_feature (1)..(542): Homolog of NCBI NO: 22330893 NR Description: pectin methylesterase, putative; protein id: [Arabidopsis thaliana] >gi|26451728|dbj|BAC42959.1| putative
  misc_feature (1)..(542): Homolog of NCBI NO: 39104585 NR Description: putative pectin methylesterase [Arabidopsis
  misc_feature (1)..(542): Homolog of NCBI NO: 7549630 NR Description: pectin methylesterase, putative [Arabidopsis
  misc_feature (208)..(545): Homolog of NCBI NO: 15234768 NR Description: pectinesterase family; protein id: At4g15980.1
  misc_feature (1)..(193): Homolog of NCBI NO: 15234768 NR Description: pectinesterase family; protein id: At4g15980.1
  misc_feature (1)..(546): Homolog of NCBI NO: 15241079 NR Description: pectin methyl-esterase - like protein; protein
  misc_feature (1)..(542): Homolog of NCBI NO: 15230019 NR Description: putative pectinesterase; protein id: At3g05610.1 thaliana] >gi|6714449|gb|AAF26136.1|AC011620_12 putative
  misc_feature (1)..(542): Homolog of NCBI NO: 26451784 NR Description: putative pectinesterase [Arabidopsis thaliana]
  misc_feature (6)..(544): Homolog of NCBI NO: 25313441 NR Description: pectinesterase (EC 3.1.1.11) [imported] - Salix >gi|6714532|dbj|BAA89480.1| pectin methylesterase [Salix

SEQ ID NO: 78945 - protein, 499 aa, Arabidopsis thaliana; identical to SEQ ID NO: 27574
  peptide (1)..(499): Ceres Seq. ID no. 12646936
  misc_feature (187)..(484): Pfam Name: Pectinesterase Pfam Description: Pectinesterase
  misc_feature (1)..(499): Homolog of NCBI NO: 15239814 NR Description: pectinesterase family; protein id: At5g49180.1, by cDNA: 6699., supported by cDNA: gi_18700150 [Arabidopsis >gi|10177147|dbj|BAB10336.1| pectin methylesterase [Arabidopsis
  misc_feature (1)..(494): Homolog of NCBI NO: 22330893 NR Description: pectin methylesterase, putative; protein id: [Arabidopsis thaliana] >gi|26451728|dbj|BAC42959.1| putative
  misc_feature (1)..(494): Homolog of NCBI NO: 39104585 NR Description: putative pectin methylesterase [Arabidopsis
  misc_feature (1)..(494): Homolog of NCBI NO: 7549630 NR Description: pectin methylesterase, putative [Arabidopsis
  misc_feature (160)..(497): Homolog of NCBI NO: 15234768 NR Description: pectinesterase family; protein id: At4g15980.1
  misc_feature (1)..(145): Homolog of NCBI NO: 15234768 NR Description: pectinesterase family; protein id: At4g15980.1
  misc_feature (1)..(498): Homolog of NCBI NO: 15241079 NR Description: pectin methyl-esterase - like protein; protein
  misc_feature (1)..(494): Homolog of NCBI NO: 15230019 NR Description: putative pectinesterase; protein id: At3g05610.1 thaliana] >gi|6714449|gb|AAF26136.1|AC011620_12 putative
  misc_feature (1)..(494): Homolog of NCBI NO: 26451784 NR Description: putative pectinesterase [Arabidopsis thaliana]
  misc_feature (1)..(496): Homolog of NCBI NO: 25313441 NR Description: pectinesterase (EC 3.1.1.11) [imported] - Salix >gi|6714532|dbj|BAA89480.1| pectin methylesterase [Salix

SEQ ID NO: 78946 - DNA, 5076 bp, Arabidopsis thaliana
  misc_feature (1)..(5076): Ceres Seq. ID no. 12646984
  misc_feature: MA Experiment ID: 20000286 Result: Up-regulated in Transcription
  misc_feature: MA Experiment 20000286 PARAMETER Experiment Name: At_Open_Flower_P Parameter: Age (day) Value: 21
  misc_feature: MA Experiment 20000286 PARAMETER Experiment Name: At_Open_Flower_P Parameter: Plant Line Value: WS
  misc_feature: MA Experiment 20000286 PARAMETER Experiment Name: At_Open_Flower_P Parameter: Tissue Value: Half Open vs. Whole Plant
atggcacgtgacccattgaatgaaatcagcaaaacgcagcgttttagagacaatgtgttatggttttggacttctttcgaaacaatcgtttgctctgtgatcgtagttctccttagctcacgcggcatcaccgagattccagaccctgatattgttcaaagtgttgcgcctaacattgatctagacctccgggaagtttactttttgatgctccacttactttcatctgggccgtgccagaaaacttatgcactgttgcggcatgaacttcttgaacatgagcttcttcctagaagatatcatgcttggtactcgaggagtggattgcctagtggggatgagaatgatgatggcaattcctttcctttgaactatactgagttggctaagaggtattctcatgtaaaaaaagatcacctggtggagcttctaaagcaattggtctttgtttcaaataggcctaatccctcacgagggatcggtgatggaaataaaatgattggagctggggttccaacacttttaggcactggctcgttctcccttttgagctctgacaaggaaatagttggaagtgatctcaaaccaccacctattggcatgcgttggcctcatatgcatgctgatcaggttcgtggtattagtttgagggaaattggtggtggttttgccagacatcatcgtgccccatcaattcgagcagcatgttacgtcattgcaaaaccatcgtcaatggtacaaaagatgcagaacatcaagaggctacgtggacacagaaatgctgtgtactgtgctatattagatcgctcaggaaggtatgtaatcactggttcagatgaccgccttgtaaaagtatggtcgatggatactgcatactgcctggccagctgtcgagggcatgaaggtgacataactgatcttgctgtgagttcgaacaacattttcatagcatccgcatcaaatgattgtgtgatccgcgtttggcgattgccagatggcttaccagtttctgttctccgtggacatactggagctgttactgctattgcctttagtcccagacctggatccccgtaccagcttctctcatcgtctgatgatggtacatgtaggatatgggatgcccggggagcccaatttgctccccggatatatgtccctaggcctcctagtcctgatggaaagaacagtggcccttcttctagtaatgctcagcagagtcaccaaatcttttgctgtgcattcaatgctagtggatctgtctttgtcactggcagttctgacactcttgctagagtatactcggtttggagtgctaataagaccaatactgatgatccagagcagccaaatcatgagatggatgttctggctggacatgagaatgatgttaattatgttcagttcagtggttgtgctgcggggtctaaattttctgtaactgactactcaaaagacgagaatgttccaaaatttaagaattcctggttttgtcatgataacatagttacatgctctcgtgatggtagtgcaatcatttggatcccaagattacggagatctcatggaaaaagctgccgatggacacgagcatatcatctcaaggttccacctccgcccatgccccctcaacctcctagaggggggccacgtcaaaggatcctacctacaccccgtggggttaacatgattgcttggagtctggataatcgttttgtccttgccgctattatggattgtagaatatgcgtgtggaatgcctctgatggtagcttggtacattctttgactggtcatacagcatctacatatgttatggacgtccatccattcaatcctcgtatagctatgagtgctggctatgatggaaaaacaatagtgtgggatatatgggaaggcatacctatacaaatatacgacatttcacactacaagttggttgatgggaagttttcaccggatggaacttcaattatactttcagatgatgtgggccaattgtacatattaagtactggccaaggggattctcaaaaagacgctaaatatgatcagttcttcctgggggattatcgtccattaattcaggacacatatggtaatgtccttgaccaggaatctcagcttcaaccttatcgccgaaatatggaggatcctctttgtgattcagggatgattccatatgaagagccatatcagaccacgtttcagaaacggcgactcggcgccttaggcaaagaatggcgaccatcttctttgaagcttgctgtcgggccagatatcactttagatcgagattaccaaatgccacctctggcagatctagacttagccgaaccgttgccagagtttatagatgtaatggagtgggaaccagaagttgatatcttaagtgatgaaaacgactctgaatacaatgtgccagaggagtattcgtctggaaaagagcaagaatgtttaaattcttcaacctctggtgagtcaggttccagttctggtgaaagctatgaggatgatgatcatcagaatagccttagaagatccaaaaggaaaaaacataagaaagaagctgggatcatgacttcttcgggtaggcgtgtcaaaaagaggaactttgatgagcttgagggagctccaagcaacaaaaaacgtaccagaaaatctaggagtggtcgtaaagaatcgaagaggaaatcttcaaaatctaaatcgtctagacctaggcgagcagctgcacgaaatgctctctcttggttttctaagattacaggtacatctaaagatgcagaagaggaggaagtctctgaattgagtgattcatcagaaagtgaatcgacaacacaagactcaggtactggggatagtgaacttgaagtagctttgttaaatgggcatgggaagcaatcgaaggggaaaactatcctcgtatgtgattctgatgatggggctcaacaatgtgatatcagagaaactcatactgctgaaaggaggagattggttcttagatttcctgttaggaattcagataagcttaccttactggagaacctacctggatcatcttgtgatgttccaagtccaactttagggaacggctgtactgaagactcgaggattcctgggaaccaatttgaagggctagatgtaagtaaagtcaaatggggaatggttaaggctcgtacaacaaagcgaataagaggtgaagcaatatcatcgcatgaacttatgggctctgacccggagggaaaggaaaataatgttaaggaagactcaaatcaccgtggaaatggtgttacagcacctagttgtttggaattgaaaacagatatagatgacatggcagttgacactgacacggtgatctctaatggtttgccaaatggtgggaagcgatatccagaactggatgggtcaccaagtcgagtggctgatgacaaggcctctaatagttctcaaaatgtaacccaccggcacgatctaatagatagccttccaccaatctcaacgacattgaagatacgctccaagagagtttcaagggctccggatacatctttgaggcaagaaggaaaatccttatcaatagatcaagagactggtggctctgatgcattaaatgatggttttgaagatgctaaatgtgatttgacattggactgtcaaaaggatggtgtggttgggacagagatatctctgcgaaatgattgtgttctggaattaaatcctcagatctgtgatgcgctctcaattgctaatgatgttcctgtgtcacactcacatcctaaacggatgtttgattttgtctatagacgaaagtcacggaagcataagaacaacttagacagggatgctgctcttactaaagaagtcagtccaggttcttgtagtcaggatcatggtagtggctctaagtcccatgaaggtgcctctaatgggttccatgggactgagttgaatggattagagaagtcggaaggcagtttgacccacatccaagataaaataagtgattcacgtggaaaccaaaactctcaggaagaattgagatccgcttctggagcaacacttcggttgagatccacaagaaatagaaagtctacttatccctttagtgaaactaaacctattgaaacaaagaagcctcagcagttaatagaaaatgtatcctggttgacattatcgatacatgaagagggttctcgttatattccacaaatgggggatgaagttgcgtatttgcgacaggggcatcaagaatacttaaactttagctccctgagggaagtggctccttggacatcaataaaaggaggaaatataaaggctgtagaaatttgtaaagtggaaagtcttgaatatgcaactctgcctggttctggggatagctgctgcaaaatgatacttaaggtcatcgatccaaactccgaagtgttcaacaaagctttcaaacttacgttgcctgaagtggtgacgtttccagattttcttgtggaaagaagtcggtatgaagcagcaatacagaggaactggacttgcagggacaagtgtaaagtttggtggagagacgaaggcgaagaagatggtagttggtgggaaggacggattctagctgtgaaacccaaatcacctgattttcctgatagtccgtgggagaggtacacagttaagtacaagagtgaccctgccgagacacatcttcacagtccctgggagctttttgatgcagataccaagtgggagcagcctcacattgatgatgagcaacgaaaccgtttgctctcggccttaacaaagttagagacttcagacaagagaacccaggattcttttggcctccgaaaactgaaccagaccgtgggaaattccagctactccaacaggttcccagttcctttgtctcttgaagtaatcagatcaaggcttgagaacaactattaccgaagtgtggaagcattacgacacgacgtatcagttatgttgtccaatgcagagactttctttggtcgaaataaaagtgtagcagccaaaatctcaaatctctctaactggttcgaccggacgctaccttcttcgtag

SEQ ID NO: 78947 - protein, 1691 aa, Arabidopsis thaliana
  peptide (1)..(1691): Ceres Seq. ID no. 12646985
  misc_feature (1631)..(1673): Pfam Name: Bromodomain Pfam Description: Bromodomain
  misc_feature (580)..(945): Homolog of NCBI NO: 7487572 NR Description: hypothetical protein T30B22.29 - Arabidopsis
  misc_feature (142)..(439): Homolog of NCBI NO: 7487572 NR Description: hypothetical protein T30B22.29 - Arabidopsis
  misc_feature (1388)..(1688): Homolog of NCBI NO: 7487572 NR Description: hypothetical protein T30B22.29 - Arabidopsis
  misc_feature (46)..(439): Homolog of NCBI NO: 20196881 NR Description: hypothetical protein [Arabidopsis thaliana]
  misc_feature (580)..(705): Homolog of NCBI NO: 20196881 NR Description: hypothetical protein [Arabidopsis thaliana]
  misc_feature (1418)..(1555): Homolog of NCBI NO: 15226044 NR Description: hypothetical protein; protein id: At2g15030.1
  misc_feature (1192)..(1263): Homolog of NCBI NO: 15226044 NR Description: hypothetical protein; protein id: At2g15030.1
  misc_feature (1627)..(1690): Homolog of NCBI NO: 15226044 NR Description: hypothetical protein; protein id: At2g15030.1
  misc_feature (1100)..(1163): Homolog of NCBI NO: 15226044 NR Description: hypothetical protein; protein id: At2g15030.1
  misc_feature (860)..(882): Homolog of NCBI NO: 15226044 NR Description: hypothetical protein; protein id: At2g15030.1
MARDPLNEISKTQRFRDNVLWFWTSFETIVCSVIVVLLSSRGITEIPDPDIVQSVAPNIDLDLREVYFLMLHLLSSGPCQKTYALLRHELLEHELLPRRYHAWYSRSGLPSGDENDDGNSFPLNYTELAKRYSHVKKDHLVELLKQLVFVSNRPNPSRGIGDGNKMIGAGVPTLLGTGSFSLLSSDKEIVGSDLKPPPIGMRWPHMHADQVRGISLREIGGGFARHHRAPSIRAACYVIAKPSSMVQKMQNIKRLRGHRNAVYCAILDRSGRYVITGSDDRLVKVWSMDTAYCLASCRGHEGDITDLAVSSNNIFIASASNDCVIRVWRLPDGLPVSVLRGHTGAVTAIAFSPRPGSPYQLLSSSDDGTCRIWDARGAQFAPRIYVPRPPSPDGKNSGPSSSNAQQSHQIFCCAFNASGSVFVTGSSDTLARVYSVWSANKTNTDDPEQPNHEMDVLAGHENDVNYVQFSGCAAGSKFSVTDYSKDENVPKFKNSWFCHDNIVTCSRDGSAIIWIPRLRRSHGKSCRWTRAYHLKVPPPPMPPQPPRGGPRQRILPTPRGVNMIAWSLDNRFVLAAIMDCRICVWNASDGSLVHSLTGHTASTYVMDVHPFNPRIAMSAGYDGKTIVWDIWEGIPIQIYDISHYKLVDGKFSPDGTSIILSDDVGQLYILSTGQGDSQKDAKYDQFFLGDYRPLIQDTYGNVLDQESQLQPYRRNMEDPLCDSGMIPYEEPYQTTFQKRRLGALGKEWRPSSLKLAVGPDITLDRDYQMPPLADLDLAEPLPEFIDVMEWEPEVDILSDENDSEYNVPEEYSSGKEQECLNSSTSGESGSSSGESYEDDDHQNSLRRSKRKKHKKEAGIMTSSGRRVKKRNFDELEGAPSNKKRTRKSRSGRKESKRKSSKSKSSRPRRAAARNALSWFSKITGTSKDAEEEEVSELSDSSESESTTQDSGTGDSELEVALLNGHGKQSKGKTILVCDSDDGAQQCDIRETHTAERRRLVLRFPVRNSDKLTLLENLPGSSCDVPSPTLGNGCTEDSRIPGNQFEGLDVSKVKWGMVKARTTKRIRGEAISSHELMGSDPEGKENNVKEDSNHRGNGVTAPSCLELKTDIDDMAVDTDTVISNGLPNGGKRYPELDGSPSRVADDKASNSSQNVTHRHDLIDSLPPISTTLKIRSKRVSRAPDTSLRQEGKSLSIDQETGGSDALNDGFEDAKCDLTLDCQKDGVVGTEISLRNDCVLELNPQICDALSIANDVPVSHSHPKRMFDFVYRRKSRKHKNNLDRDAALTKEVSPGSCSQDHGSGSKSHEGASNGFHGTELNGLEKSEGSLTHIQDKISDSRGNQNSQEELRSASGATLRLRSTRNRKSTYPFSETKPIETKKPQQLIENVSWLTLSIHEEGSRYIPQMGDEVAYLRQGHQEYLNFSSLREVAPWTSIKGGNIKAVEICKVESLEYATLPGSGDSCCKMILKVIDPNSEVFNKAFKLTLPEVVTFPDFLVERSRYEAAIQRNWTCRDKCKVWWRDEGEEDGSWWEGRILAVKPKSPDFPDSPWERYTVKYKSDPAETHLHSPWELFDADTKWEQPHIDDEQRNRLLSALTKLETSDKRTQDSFGLRKLNQTVGNSSYSNRFPVPLSLEVIRSRLENNYYRSVEALRHDVSVMLSNAETFFGRNKSVAAKISNLSNWFDRTLPSS

SEQ ID NO: 78948 - protein, 1622 aa, Arabidopsis thaliana
  peptide (1)..(1622): Ceres Seq. ID no. 12646986
  misc_feature (1562)..(1604): Pfam Name: Bromodomain Pfam Description: Bromodomain
  misc_feature (511)..(876): Homolog of NCBI NO: 7487572 NR Description: hypothetical protein T30B22.29 - Arabidopsis
  misc_feature (73)..(370): Homolog of NCBI NO: 7487572 NR Description: hypothetical protein T30B22.29 - Arabidopsis
  misc_feature (1319)..(1619): Homolog of NCBI NO: 7487572 NR Description: hypothetical protein T30B22.29 - Arabidopsis
  misc_feature (1)..(370): Homolog of NCBI NO: 20196881 NR Description: hypothetical protein [Arabidopsis thaliana]
  misc_feature (511)..(636): Homolog of NCBI NO: 20196881 NR Description: hypothetical protein [Arabidopsis thaliana]
  misc_feature (1349)..(1486): Homolog of NCBI NO: 15226044 NR Description: hypothetical protein; protein id: At2g15030.1
  misc_feature (1123)..(1194): Homolog of NCBI NO: 15226044 NR Description: hypothetical protein; protein id: At2g15030.1
  misc_feature (1558)..(1621): Homolog of NCBI NO: 15226044 NR Description: hypothetical protein; protein id: At2g15030.1
  misc_feature (1031)..(1094): Homolog of NCBI NO: 15226044 NR Description: hypothetical protein; protein id: At2g15030.1
  misc_feature (791)..(813): Homolog of NCBI NO: 15226044 NR Description: hypothetical protein; protein id: At2g15030.1
MLHLLSSGPCQKTYALLRHELLEHELLPRRYHAWYSRSGLPSGDENDDGNSFPLNYTELAKRYSHVKKDHLVELLKQLVFVSNRPNPSRGIGDGNKMIGAGVPTLLGTGSFSLLSSDKEIVGSDLKPPPIGMRWPHMHADQVRGISLREIGGGFARHHRAPSIRAACYVIAKPSSMVQKMQNIKRLRGHRNAVYCAILDRSGRYVITGSDDRLVKVWSMDTAYCLASCRGHEGDITDLAVSSNNIFIASASNDCVIRVWRLPDGLPVSVLRGHTGAVTAIAFSPRPGSPYQLLSSSDDGTCRIWDARGAQFAPRIYVPRPPSPDGKNSGPSSSNAQQSHQIFCCAFNASGSVFVTGSSDTLARVYSVWSANKTNTDDPEQPNHEMDVLAGHENDVNYVQFSGCAAGSKFSVTDYSKDENVPKFKNSWFCHDNIVTCSRDGSAIIWIPRLRRSHGKSCRWTRAYHLKVPPPPMPPQPPRGGPRQRILPTPRGVNMIAWSLDNRFVLAAIMDCRICVWNASDGSLVHSLTGHTASTYVMDVHPFNPRIAMSAGYDGKTIVWDIWEGIPIQIYDISHYKLVDGKFSPDGTSIILSDDVGQLYILSTGQGDSQKDAKYDQFFLGDYRPLIQDTYGNVLDQESQLQPYRRNMEDPLCDSGMIPYEEPYQTTFQKRRLGALGKEWRPSSLKLAVGPDITLDRDYQMPPLADLDLAEPLPEFIDVMEWEPEVDILSDENDSEYNVPEEYSSGKEQECLNSSTSGESGSSSGESYEDDDHQNSLRRSKRKKHKKEAGIMTSSGRRVKKRNFDELEGAPSNKKRTRKSRSGRKESKRKSSKSKSSRPRRAAARNALSWFSKITGTSKDAEEEEVSELSDSSESESTTQDSGTGDSELEVALLNGHGKQSKGKTILVCDSDDGAQQCDIRETHTAERRRLVLRFPVRNSDKLTLLENLPGSSCDVPSPTLGNGCTEDSRIPGNQFEGLDVSKVKWGMVKARTTKRIRGEAISSHELMGSDPEGKENNVKEDSNHRGNGVTAPSCLELKTDIDDMAVDTDTVISNGLPNGGKRYPELDGSPSRVADDKASNSSQNVTHRHDLIDSLPPISTTLKIRSKRVSRAPDTSLRQEGKSLSIDQETGGSDALNDGFEDAKCDLTLDCQKDGVVGTEISLRNDCVLELNPQICDALSIANDVPVSHSHPKRMFDFVYRRKSRKHKNNLDRDAALTKEVSPGSCSQDHGSGSKSHEGASNGFHGTELNGLEKSEGSLTHIQDKISDSRGNQNSQEELRSASGATLRLRSTRNRKSTYPFSETKPIETKKPQQLIENVSWLTLSIHEEGSRYIPQMGDEVAYLRQGHQEYLNFSSLREVAPWTSIKGGNIKAVEICKVESLEYATLPGSGDSCCKMILKVIDPNSEVFNKAFKLTLPEVVTFPDFLVERSRYEAAIQRNWTCRDKCKVWWRDEGEEDGSWWEGRILAVKPKSPDFPDSPWERYTVKYKSDPAETHLHSPWELFDADTKWEQPHIDDEQRNRLLSALTKLETSDKRTQDSFGLRKLNQTVGNSSYSNRFPVPLSLEVIRSRLENNYYRSVEALRHDVSVMLSNAETFFGRNKSVAAKISNLSNWFDRTLPSS

SEQ ID NO: 78949 - protein, 1526 aa, Arabidopsis thaliana
  peptide (1)..(1526): Ceres Seq. ID no. 12646987
  misc_feature (1466)..(1508): Pfam Name: Bromodomain Pfam Description: Bromodomain
  misc_feature (415)..(780): Homolog of NCBI NO: 7487572 NR Description: hypothetical protein T30B22.29 - Arabidopsis
  misc_feature (1)..(274): Homolog of NCBI NO: 7487572 NR Description: hypothetical protein T30B22.29 - Arabidopsis
  misc_feature (1223)..(1523): Homolog of NCBI NO: 7487572 NR Description: hypothetical protein T30B22.29 - Arabidopsis
  misc_feature (1)..(274): Homolog of NCBI NO: 20196881 NR Description: hypothetical protein [Arabidopsis thaliana]
  misc_feature (415)..(540): Homolog of NCBI NO: 20196881 NR Description: hypothetical protein [Arabidopsis thaliana]
  misc_feature (1253)..(1390): Homolog of NCBI NO: 15226044 NR Description: hypothetical protein; protein id: At2g15030.1
  misc_feature (1027)..(1098): Homolog of NCBI NO: 15226044 NR Description: hypothetical protein; protein id: At2g15030.1
  misc_feature (1462)..(1525): Homolog of NCBI NO: 15226044 NR Description: hypothetical protein; protein id: At2g15030.1
  misc_feature (935)..(998): Homolog of NCBI NO: 15226044 NR Description: hypothetical protein; protein id: At2g15030.1
  misc_feature (695)..(717): Homolog of NCBI NO: 15226044 NR Description: hypothetical protein; protein id: At2g15030.1
MIGAGVPTLLGTGSFSLLSSDKEIVGSDLKPPPIGMRWPHMHADQVRGISLREIGGGFARHHRAPSIRAACYVIAKPSSMVQKMQNIKRLRGHRNAVYCAILDRSGRYVITGSDDRLVKVWSMDTAYCLASCRGHEGDITDLAVSSNNIFIASASNDCVIRVWRLPDGLPVSVLRGHTGAVTAIAFSPRPGSPYQLLSSSDDGTCRIWDARGAQFAPRIYVPRPPSPDGKNSGPSSSNAQQSHQIFCCAFNASGSVFVTGSSDTLARVYSVWSANKTNTDDPEQPNHEMDVLAGHENDVNYVQFSGCAAGSKFSVTDYSKDENVPKFKNSWFCHDNIVTCSRDGSAIIWIPRLRRSHGKSCRWTRAYHLKVPPPPMPPQPPRGGPRQRILPTPRGVNMIAWSLDNRFVLAAIMDCRICVWNASDGSLVHSLTGHTASTYVMDVHPFNPRIAMSAGYDGKTIVWDIWEGIPIQIYDISHYKLVDGKFSPDGTSIILSDDVGQLYILSTGQGDSQKDAKYDQFFLGDYRPLIQDTYGNVLDQESQLQPYRRNMEDPLCDSGMIPYEEPYQTTFQKRRLGALGKEWRPSSLKLAVGPDITLDRDYQMPPLADLDLAEPLPEFIDVMEWEPEVDILSDENDSEYNVPEEYSSGKEQECLNSSTSGESGSSSGESYEDDDHQNSLRRSKRKKHKKEAGIMTSSGRRVKKRNFDELEGAPSNKKRTRKSRSGRKESKRKSSKSKSSRPRRAAARNALSWFSKITGTSKDAEEEEVSELSDSSESESTTQDSGTGDSELEVALLNGHGKQSKGKTILVCDSDDGAQQCDIRETHTAERRRLVLRFPVRNSDKLTLLENLPGSSCDVPSPTLGNGCTEDSRIPGNQFEGLDVSKVKWGMVKARTTKRIRGEAISSHELMGSDPEGKENNVKEDSNHRGNGVTAPSCLELKTDIDDMAVDTDTVISNGLPNGGKRYPELDGSPSRVADDKASNSSQNVTHRHDLIDSLPPISTTLKIRSKRVSRAPDTSLRQEGKSLSIDQETGGSDALNDGFEDAKCDLTLDCQKDGVVGTEISLRNDCVLELNPQICDALSIANDVPVSHSHPKRMFDFVYRRKSRKHKNNLDRDAALTKEVSPGSCSQDHGSGSKSHEGASNGFHGTELNGLEKSEGSLTHIQDKISDSRGNQNSQEELRSASGATLRLRSTRNRKSTYPFSETKPIETKKPQQLIENVSWLTLSIHEEGSRYIPQMGDEVAYLRQGHQEYLNFSSLREVAPWTSIKGGNIKAVEICKVESLEYATLPGSGDSCCKMILKVIDPNSEVFNKAFKLTLPEVVTFPDFLVERSRYEAAIQRNWTCRDKCKVWWRDEGEEDGSWWEGRILAVKPKSPDFPDSPWERYTVKYKSDPAETHLHSPWELFDADTKWEQPHIDDEQRNRLLSALTKLETSDKRTQDSFGLRKLNQTVGNSSYSNRFPVPLSLEVIRSRLENNYYRSVEALRHDVSVMLSNAETFFGRNKSVAAKISNLSNWFDRTLPSS

SEQ ID NO: 78950 - DNA, 2070 bp, Arabidopsis thaliana
  misc_feature (1)..(2070): Ceres Seq. ID no. 12647000
  misc_feature: MA Experiment ID: 108462 Result: Down-regulated in Transcription
  misc_feature: MA Experiment 108462 PARAMETER Experiment Name: At_Germinating_Seeds_cDNA_P Parameter: Age (day) Value: 2 vs. 0
  misc_feature: MA Experiment 108462 PARAMETER Experiment Name: At_Germinating_Seeds_cDNA_P Parameter: Tissue Value: Germinating Seeds
  misc_feature: MA Experiment ID: 108463 Result: Down-regulated in Transcription
  misc_feature: MA Experiment 108463 PARAMETER Experiment Name: At_Germinating_Seeds_cDNA_P Parameter: Age (day) Value: 3 vs. 0
  misc_feature: MA Experiment 108463 PARAMETER Experiment Name: At_Germinating_Seeds_cDNA_P Parameter: Tissue Value: Germinating Seeds
  misc_feature: MA Experiment ID: 108464 Result: Down-regulated in Transcription
  misc_feature: MA Experiment 108464 PARAMETER Experiment Name: At_Germinating_Seeds_cDNA_P Parameter: Age (day) Value: 4 vs. 0
  misc_feature: MA Experiment 108464 PARAMETER Experiment Name: At_Germinating_Seeds_cDNA_P Parameter: Tissue Value: Germinating Seeds
  misc_feature: MA Experiment ID: 20000180 Result: Down-regulated in Transcription
  misc_feature: MA Experiment 20000180 PARAMETER Experiment Name: At_Germinating_Seeds_P Parameter: Age (hr) Value: 24 vs. 0
  misc_feature: MA Experiment 20000180 PARAMETER Experiment Name: At_Germinating_Seeds_P Parameter: Tissue Value: Germinating Seeds
  misc_feature: MA Experiment ID: 20000184 Result: Down-regulated in Transcription
  misc_feature: MA Experiment 20000184 PARAMETER Experiment Name: At_Shoots__P Parameter: Age (day) Value: 7
  misc_feature: MA Experiment 20000184 PARAMETER Experiment Name: At_Shoots__P Parameter: Tissue Value: Shoots vs. Whole Plant
  misc_feature: MA Experiment ID: 20000437 Result: Up-regulated in Transcription
  misc_feature: MA Experiment 20000437 PARAMETER Experiment Name: At_Drought_P Parameter: Age (day) Value: 8
  misc_feature: MA Experiment 20000437 PARAMETER Experiment Name: At_Drought_P Parameter: Organism Value: A. thaliana
  misc_feature: MA Experiment 20000437 PARAMETER Experiment Name: At_Drought_P Parameter: Plant Line Value: WS
  misc_feature: MA Experiment 20000437 PARAMETER Experiment Name: At_Drought_P Parameter: Timepoint (hr) Value: 24
  misc_feature: MA Experiment 20000437 PARAMETER Experiment Name: At_Drought_P Parameter: Tissue Value: Whole Plant
  misc_feature: MA Experiment 20000437 PARAMETER Experiment Name: At_Drought_P Parameter: Treatment Value: Drought vs. No Drought
  misc_feature: MA Experiment ID: 20001451 Result: Down-regulated in Transcription
  misc_feature: MA Experiment 20001451 PARAMETER Experiment Name: At_Far-red-induction_P Parameter: Age (day) Value: 7
  misc_feature: MA Experiment 20001451 PARAMETER Experiment Name: At_Far-red-induction_P Parameter: Light Value: Far-red vs. White
  misc_feature: MA Experiment 20001451 PARAMETER Experiment Name: At_Far-red-induction_P Parameter: Organism Value: A. thaliana
  misc_feature: MA Experiment 20001451 PARAMETER Experiment Name: At_Far-red-induction_P Parameter: Plant Line Value: Columbia
  misc_feature: MA Experiment 20001451 PARAMETER Experiment Name: At_Far-red-induction_P Parameter: Timepoint (hr) Value: 24
  misc_feature: MA Experiment 20001451 PARAMETER Experiment Name: At_Far-red-induction_P Parameter: Tissue Value: Whole Plant
atggactttgatgatgatgacaaaccaaaagaggttaccaaaacccgtagattcgctcctggccgtgccggaaagtctaaacccaaacctaaaccggaacccactgctgataaaccggtacagccgccgccgcagtcacaaactgagtccgtgagcaagactgagcatgacgttgatgctaaattcgttggcactaaggttgaaactgaggtttgtaatggctctgtgaagatggagatcgattcaaaagtcgataaagagcctgagatcatggaaactgagttgatggaggaagatcagcagcttccattgcaggaggagaaggaggaagaagaagaagaagacgacgttgttgttcgtgaaattgatgttttctttaagccgtctattgatgctaatactcagctttatgttttacaatatcctctaagaccatcttggcgtccatacgaaatggatgaacgttgcgaagaagttagagtgaatccttctacatcgcaagtggaaattgatttgtctatggatgttcattcgaagaactatgactccaattttggactaaatatgactaagcagaccttgaaaacaacatggaagcagcctcctactttggattatgctgttggggttctttcaggtgataagttacacttgaatcctgttcatgctgttgcccagctccggccgtctatgcagtctctttcatccgacaaaaaaaagaaacaagaagaatccactgaagaatctgtgggaacatccaaaaagcagaacaagggagtgcagcaggcttcgacggatcagaaaccaattaatgaagaaacttgggtttcactcaagtatcatggacttcaatccgaatattgctccagatatcttaacgggatgatggcgaatgggaactcttcgatagatttcaacatgagcccgggcacttatatcaacgaactatgccgtgggggaagcagcagaaactctgaatcgaaagaaacattaaaaagggtcttgctctccctaccacttaaagaacgtgtgcaaaagttgctctgcgagggatctccgttgattcgatacagtgttcttaaacactatgctcctgagttctcagacgaggatttcttaggggccctccaagaatatggcaggttagttcaaggtttatggactcctaaaactaggctactaaaactagacgggcctgtagaagctgccagggattatgtcctgtctctgttcagccagaatacaactataaagtactctgaagttgaagcaacgggtgacaagatgaaacctttgatggaaagaatgttgactgaatttgccaaagaaaggcatgtgctaaaagattggaagttcaaagagcccactgatgtctcattcataaaatcctacccggagattgttaaggagcaagatattttttggacggataagagagagaatctaaagtcgagaataaccgcccaaggaggaaaaagtagagctgataaaaggaggaatgttgttggcacaagttcttcagttacagttaaaccggaggttccaacaaccctctctgacaaaggaggaagttcaaaaaatacgatacatcgtgttgttacacaagaaatgccagaagaacttaagaaggcgttaccaaaggctttgaaaaaggtgtttcaaactcacaaagtttgccgctatgagacgatctgccaaggacttagggatcttgcagtttcgacatcgaataatccaaaagctgattcaggaatggcggtgaatgtggcgctagccgtggatgcttaccagggcgagctcgaagacgttataaatggagtggctactaacattcacgggtcttatgtctccatatcgtctccagaccatcctgaatatgattctttgagggaagtggtcattagcctcttaaccggatctccacctggaacaaagcttatgaaggctgaggtatttgcagcaggcaggaccaaacttgaacgtgaaatcaccaacaacgaatatataaaggtgatgcacgagatctgtgaaaccaactcttcaggatgggttttacagaaagctcgatga

SEQ ID NO: 78951 - protein, 689 aa, Arabidopsis thaliana
  peptide (1)..(689): Ceres Seq. ID no. 12647001
  misc_feature (113)..(486): Pfam Name: Sin-like protein conserved region Pfam Description: Sin-like protein conserved region
  misc_feature (24)..(517): Homolog of NCBI NO: 9858778 NR Description: BAC19.10 [Lycopersicon esculentum]
  misc_feature (329)..(681): Homolog of NCBI NO: 9858778 NR Description: BAC19.10 [Lycopersicon esculentum]
  misc_feature (81)..(318): Homolog of NCBI NO: 28828996 NR Description: similar to Mus musculus (Mouse). N/A
  misc_feature (284)..(610): Homolog of NCBI NO: 12836675 NR Description: unnamed protein product [Mus musculus]
  misc_feature (113)..(273): Homolog of NCBI NO: 12836675 NR Description: unnamed protein product [Mus musculus]
  misc_feature (284)..(483): Homolog of NCBI NO: 24429619 NR Description: RNA polymerase III 80 kDa subunit RPC5 [Homo
  misc_feature (139)..(273): Homolog of NCBI NO: 24429619 NR Description: RNA polymerase III 80 kDa subunit RPC5 [Homo
  misc_feature (284)..(483): Homolog of NCBI NO: 12653043 NR Description: hypothetical protein FLJ10509 [Homo sapiens]
  misc_feature (139)..(273): Homolog of NCBI NO: 12653043 NR Description: hypothetical protein FLJ10509 [Homo sapiens]
  misc_feature (284)..(483): Homolog of NCBI NO: 10435073 NR Description: unnamed protein product [Homo sapiens]
MDFDDDDKPKEVTKTRRFAPGRAGKSKPKPKPEPTADKPVQPPPQSQTESVSKTEHDVDAKFVGTKVETEVCNGSVKMEIDSKVDKEPEIMETELMEEDQQLPLQEEKEEEEEEDDVVVREIDVFFKPSIDANTQLYVLQYPLRPSWRPYEMDERCEEVRVNPSTSQVEIDLSMDVHSKNYDSNFGLNMTKQTLKTTWKQPPTLDYAVGVLSGDKLHLNPVHAVAQLRPSMQSLSSDKKKKQEESTEESVGTSKKQNKGVQQASTDQKPINEETWVSLKYHGLQSEYCSRYLNGMMANGNSSIDFNMSPGTYINELCRGGSSRNSESKETLKRVLLSLPLKERVQKLLCEGSPLIRYSVLKHYAPEFSDEDFLGALQEYGRLVQGLWTPKTRLLKLDGPVEAARDYVLSLFSQNTTIKYSEVEATGDKMKPLMERMLTEFAKERHVLKDWKFKEPTDVSFIKSYPEIVKEQDIFWTDKRENLKSRITAQGGKSRADKRRNVVGTSSSVTVKPEVPTTLSDKGGSSKNTIHRVVTQEMPEELKKALPKALKKVFQTHKVCRYETICQGLRDLAVSTSNNPKADSGMAVNVALAVDAYQGELEDVINGVATNIHGSYVSISSPDHPEYDSLREVVISLLTGSPPGTKLMKAEVFAAGRTKLEREITNNEYIKVMHEICETNSSGWVLQKAR

SEQ ID NO: 78952 - protein, 612 aa, Arabidopsis thaliana
  peptide (1)..(612): Ceres Seq. ID no. 12647002
  misc_feature (36)..(409): Pfam Name: Sin-like protein conserved region Pfam Description: Sin-like protein conserved region
  misc_feature (1)..(440): Homolog of NCBI NO: 9858778 NR Description: BAC19.10 [Lycopersicon esculentum]
  misc_feature (252)..(604): Homolog of NCBI NO: 9858778 NR Description: BAC19.10 [Lycopersicon esculentum]
  misc_feature (4)..(241): Homolog of NCBI NO: 28828996 NR Description: similar to Mus musculus (Mouse). N/A
  misc_feature (207)..(533): Homolog of NCBI NO: 12836675 NR Description: unnamed protein product [Mus musculus]
  misc_feature (36)..(196): Homolog of NCBI NO: 12836675 NR Description: unnamed protein product [Mus musculus]
  misc_feature (207)..(406): Homolog of NCBI NO: 24429619 NR Description: RNA polymerase III 80 kDa subunit RPC5 [Homo
  misc_feature (62)..(196): Homolog of NCBI NO: 24429619 NR Description: RNA polymerase III 80 kDa subunit RPC5 [Homo
  misc_feature (207)..(406): Homolog of NCBI NO: 12653043 NR Description: hypothetical protein FLJ10509 [Homo sapiens]
  misc_feature (62)..(196): Homolog of NCBI NO: 12653043 NR Description: hypothetical protein FLJ10509 [Homo sapiens]
  misc_feature (207)..(406): Homolog of NCBI NO: 10435073 NR Description: unnamed protein product [Homo sapiens]
MEIDSKVDKEPEIMETELMEEDQQLPLQEEKEEEEEEDDVVVREIDVFFKPSIDANTQLYVLQYPLRPSWRPYEMDERCEEVRVNPSTSQVEIDLSMDVHSKNYDSNFGLNMTKQTLKTTWKQPPTLDYAVGVLSGDKLHLNPVHAVAQLRPSMQSLSSDKKKKQEESTEESVGTSKKQNKGVQQASTDQKPINEETWVSLKYHGLQSEYCSRYLNGMMANGNSSIDFNMSPGTYINELCRGGSSRNSESKETLKRVLLSLPLKERVQKLLCEGSPLIRYSVLKHYAPEFSDEDFLGALQEYGRLVQGLWTPKTRLLKLDGPVEAARDYVLSLFSQNTTIKYSEVEATGDKMKPLMERMLTEFAKERHVLKDWKFKEPTDVSFIKSYPEIVKEQDIFWTDKRENLKSRITAQGGKSRADKRRNVVGTSSSVTVKPEVPTTLSDKGGSSKNTIHRVVTQEMPEELKKALPKALKKVFQTHKVCRYETICQGLRDLAVSTSNNPKADSGMAVNVALAVDAYQGELEDVINGVATNIHGSYVSISSPDHPEYDSLREVVISLLTGSPPGTKLMKAEVFAAGRTKLEREITNNEYIKVMHEICETNSSGWVLQKAR

SEQ ID NO: 78953 - protein, 599 aa, Arabidopsis thaliana
  peptide (1)..(599): Ceres Seq. ID no. 12647003
  misc_feature (23)..(396): Pfam Name: Sin-like protein conserved region Pfam Description: Sin-like protein conserved region
  misc_feature (1)..(427): Homolog of NCBI NO: 9858778 NR Description: BAC19.10 [Lycopersicon esculentum]
  misc_feature (239)..(591): Homolog of NCBI NO: 9858778 NR Description: BAC19.10 [Lycopersicon esculentum]
  misc_feature (1)..(228): Homolog of NCBI NO: 28828996 NR Description: similar to Mus musculus (Mouse). N/A
  misc_feature (194)..(520): Homolog of NCBI NO: 12836675 NR Description: unnamed protein product [Mus musculus]
  misc_feature (23)..(183): Homolog of NCBI NO: 12836675 NR Description: unnamed protein product [Mus musculus]
  misc_feature (194)..(393): Homolog of NCBI NO: 24429619 NR Description: RNA polymerase III 80 kDa subunit RPC5 [Homo
  misc_feature (49)..(183): Homolog of NCBI NO: 24429619 NR Description: RNA polymerase III 80 kDa subunit RPC5 [Homo
  misc_feature (194)..(393): Homolog of NCBI NO: 12653043 NR Description: hypothetical protein FLJ10509 [Homo sapiens]
  misc_feature (49)..(183): Homolog of NCBI NO: 12653043 NR Description: hypothetical protein FLJ10509 [Homo sapiens]
  misc_feature (194)..(393): Homolog of NCBI NO: 10435073 NR Description: unnamed protein product [Homo sapiens]
METELMEEDQQLPLQEEKEEEEEEDDVVVREIDVFFKPSIDANTQLYVLQYPLRPSWRPYEMDERCEEVRVNPSTSQVEIDLSMDVHSKNYDSNFGLNMTKQTLKTTWKQPPTLDYAVGVLSGDKLHLNPVHAVAQLRPSMQSLSSDKKKKQEESTEESVGTSKKQNKGVQQASTDQKPINEETWVSLKYHGLQSEYCSRYLNGMMANGNSSIDFNMSPGTYINELCRGGSSRNSESKETLKRVLLSLPLKERVQKLLCEGSPLIRYSVLKHYAPEFSDEDFLGALQEYGRLVQGLWTPKTRLLKLDGPVEAARDYVLSLFSQNTTIKYSEVEATGDKMKPLMERMLTEFAKERHVLKDWKFKEPTDVSFIKSYPEIVKEQDIFWTDKRENLKSRITAQGGKSRADKRRNVVGTSSSVTVKPEVPTTLSDKGGSSKNTIHRVVTQEMPEELKKALPKALKKVFQTHKVCRYETICQGLRDLAVSTSNNPKADSGMAVNVALAVDAYQGELEDVINGVATNIHGSYVSISSPDHPEYDSLREVVISLLTGSPPGTKLMKAEVFAAGRTKLEREITNNEYIKVMHEICETNSSGWVLQKAR

SEQ ID NO: 78954 - DNA, 603 bp, Arabidopsis thaliana
  misc_feature (1)..(603): Ceres Seq. ID no. 12647173
  misc_feature: MA Experiment ID: 20000180 Result: Up-regulated in Transcription
  misc_feature: MA Experiment 20000180 PARAMETER Experiment Name: At_Germinating_Seeds_P Parameter: Age (hr) Value: 24 vs. 0
  misc_feature: MA Experiment 20000180 PARAMETER Experiment Name: At_Germinating_Seeds_P Parameter: Tissue Value: Germinating Seeds
  misc_feature: MA Experiment ID: 20000184 Result: Up-regulated in Transcription
  misc_feature: MA Experiment 20000184 PARAMETER Experiment Name: At_Shoots__P Parameter: Age (day) Value: 7
  misc_feature: MA Experiment 20000184 PARAMETER Experiment Name: At_Shoots__P Parameter: Tissue Value: Shoots vs. Whole Plant
  misc_feature: MA Experiment ID: 20000495 Result: Down-regulated in Transcription
  misc_feature: MA Experiment 20000495 PARAMETER Experiment Name: At_Guard_Cells_P Parameter: Harvest Date Value: 8/2/2002
  misc_feature: MA Experiment 20000495 PARAMETER Experiment Name: At_Guard_Cells_P Parameter: Organism Value: A. thaliana
  misc_feature: MA Experiment 20000495 PARAMETER Experiment Name: At_Guard_Cells_P Parameter: Tissue Value: Guard Cells vs. Leaves
atgtcgcaaatactgccatcggtttacttatcgacgttttccgtcgcatctctgctaccagtcgttcttgtattgttggactactttgtgaatcagtcagcgtctacttcaggatatgacgatcctgatttgaatcagtatcagagcaaaaagcgaatcggaatcgtgggactaggaagcattggctcgaaggtagctacgaggctcaaggcctttggttgccaaatttcatatagctcaagaaacagaaaaccatatgctgttccatatcattattacatggatatagaggagatggtagctaactgtaatgcactcataatctgttgtgaattgaatgagaatacattgcgtttgattaataaagatgttttttctgctctgggaaagcatggagtgatcgttaacgtggctcttggggctataatcgatgaggaagagatgtctaatgttcctaaggagctttttgaattggataatgttgttttctctccacattgtgcttttatgacattggaaggtcttgaagaacttgggaaagttgtagtagggaatattgaagctttcttctccaataaacctcttttaactcctgttctttga

SEQ ID NO: 78955 - protein, 200 aa, Arabidopsis thaliana
  peptide (1)..(200): Ceres Seq. ID no. 12647174
  misc_feature (41)..(154): Homolog of NCBI NO: 7485630 NR Description: probable glycerate dehydrogenase [imported] -
  misc_feature (140)..(200): Homolog of NCBI NO: 7485630 NR Description: probable glycerate dehydrogenase [imported] -
  misc_feature (1)..(125): Homolog of NCBI NO: 15241769 NR Description: putative protein; protein id: At5g28310.1
  misc_feature (41)..(154): Homolog of NCBI NO: 38345306 NR Description: OSJNBb0085F13.6 [Oryza sativa (japonica
  misc_feature (140)..(200): Homolog of NCBI NO: 38345306 NR Description: OSJNBb0085F13.6 [Oryza sativa (japonica
  misc_feature (131)..(200): Homolog of NCBI NO: 15241769 NR Description: putative protein; protein id: At5g28310.1
  misc_feature (49)..(148): Homolog of NCBI NO: 15220005 NR Description: putative D-isomer specific 2-hydroxyacid protein id: At1g79870.1, supported by cDNA: 42333., supported by gi_17978982 [Arabidopsis thaliana] >gi|25283867|pir||G96829
  misc_feature (140)..(200): Homolog of NCBI NO: 15220005 NR Description: putative D-isomer specific 2-hydroxyacid protein id: At1g79870.1, supported by cDNA: 42333., supported by gi_17978982 [Arabidopsis thaliana] >gi|25283867|pir||G96829
  misc_feature (50)..(148): Homolog of NCBI NO: 21636166 NR Description: unknown [Aegilops tauschii]
  misc_feature (140)..(200): Homolog of NCBI NO: 21636166 NR Description: unknown [Aegilops tauschii]
MSQILPSVYLSTFSVASLLPVVLVLLDYFVNQSASTSGYDDPDLNQYQSKKRIGIVGLGSIGSKVATRLKAFGCQISYSSRNRKPYAVPYHYYMDIEEMVANCNALIICCELNENTLRLINKDVFSALGKHGVIVNVALGAIIDEEEMSNVPKELFELDNVVFSPHCAFMTLEGLEELGKVVVGNIEAFFSNKPLLTPVL

SEQ ID NO: 78956 - protein, 107 aa, Arabidopsis thaliana
  peptide (1)..(107): Ceres Seq. ID no. 12647175
  misc_feature (1)..(61): Homolog of NCBI NO: 7485630 NR Description: probable glycerate dehydrogenase [imported] -
  misc_feature (47)..(107): Homolog of NCBI NO: 7485630 NR Description: probable glycerate dehydrogenase [imported] -
  misc_feature (1)..(32): Homolog of NCBI NO: 15241769 NR Description: putative protein; protein id: At5g28310.1
  misc_feature (1)..(61): Homolog of NCBI NO: 38345306 NR Description: OSJNBb0085F13.6 [Oryza sativa (japonica
  misc_feature (47)..(107): Homolog of NCBI NO: 38345306 NR Description: OSJNBb0085F13.6 [Oryza sativa (japonica
  misc_feature (38)..(107): Homolog of NCBI NO: 15241769 NR Description: putative protein; protein id: At5g28310.1
  misc_feature (1)..(55): Homolog of NCBI NO: 15220005 NR Description: putative D-isomer specific 2-hydroxyacid protein id: At1g79870.1, supported by cDNA: 42333., supported by gi_17978982 [Arabidopsis thaliana] >gi|25283867|pir||G96829
  misc_feature (47)..(107): Homolog of NCBI NO: 15220005 NR Description: putative D-isomer specific 2-hydroxyacid protein id: At1g79870.1, supported by cDNA: 42333., supported by gi_17978982 [Arabidopsis thaliana] >gi|25283867|pir||G96829
  misc_feature (1)..(55): Homolog of NCBI NO: 21636166 NR Description: unknown [Aegilops tauschii]
  misc_feature (47)..(107): Homolog of NCBI NO: 21636166 NR Description: unknown [Aegilops tauschii]
MDIEEMVANCNALIICCELNENTLRLINKDVFSALGKHGVIVNVALGAIIDEEEMSNVPKELFELDNVVFSPHCAFMTLEGLEELGKVVVGNIEAFFSNKPLLTPVL

SEQ ID NO: 78957 - protein, 102 aa, Arabidopsis thaliana
  peptide (1)..(102): Ceres Seq. ID no. 12647176
  misc_feature (1)..(56): Homolog of NCBI NO: 7485630 NR Description: probable glycerate dehydrogenase [imported] -
  misc_feature (42)..(102): Homolog of NCBI NO: 7485630 NR Description: probable glycerate dehydrogenase [imported] -
  misc_feature (1)..(27): Homolog of NCBI NO: 15241769 NR Description: putative protein; protein id: At5g28310.1
  misc_feature (1)..(56): Homolog of NCBI NO: 38345306 NR Description: OSJNBb0085F13.6 [Oryza sativa (japonica
  misc_feature (42)..(102): Homolog of NCBI NO: 38345306 NR Description: OSJNBb0085F13.6 [Oryza sativa (japonica
  misc_feature (33)..(102): Homolog of NCBI NO: 15241769 NR Description: putative protein; protein id: At5g28310.1
  misc_feature (1)..(50): Homolog of NCBI NO: 15220005 NR Description: putative D-isomer specific 2-hydroxyacid protein id: At1g79870.1, supported by cDNA: 42333., supported by gi_17978982 [Arabidopsis thaliana] >gi|25283867|pir||G96829
  misc_feature (42)..(102): Homolog of NCBI NO: 15220005 NR Description: putative D-isomer specific 2-hydroxyacid protein id: At1g79870.1, supported by cDNA: 42333., supported by gi_17978982 [Arabidopsis thaliana] >gi|25283867|pir||G96829
  misc_feature (1)..(50): Homolog of NCBI NO: 21636166 NR Description: unknown [Aegilops tauschii]
  misc_feature (42)..(102): Homolog of NCBI NO: 21636166 NR Description: unknown [Aegilops tauschii]
MVANCNALIICCELNENTLRLINKDVFSALGKHGVIVNVALGAIIDEEEMSNVPKELFELDNVVFSPHCAFMTLEGLEELGKVVVGNIEAFFSNKPLLTPVL

SEQ ID NO: 78958 - DNA, 1596 bp, Arabidopsis thaliana
  misc_feature (1)..(1596): Ceres Seq. ID no. 12647478
  misc_feature: MA Experiment ID: 20000179 Result: Up-regulated in Transcription
  misc_feature: MA Experiment 20000179 PARAMETER Experiment Name: At_Germinating_Seeds_P Parameter: Age (hr) Value: 6 vs. 0
  misc_feature: MA Experiment 20000179 PARAMETER Experiment Name: At_Germinating_Seeds_P Parameter: Tissue Value: Germinating Seeds
  misc_feature: MA Experiment ID: 20000185 Result: Up-regulated in Transcription
  misc_feature: MA Experiment 20000185 PARAMETER Experiment Name: At_Roots__P Parameter: Age (day) Value: 7 vs. 21
  misc_feature: MA Experiment 20000185 PARAMETER Experiment Name: At_Roots__P Parameter: Organism Value: A. thaliana
  misc_feature: MA Experiment 20000185 PARAMETER Experiment Name: At_Roots__P Parameter: Tissue Value: Roots vs. Whole Plant
  misc_feature: MA Experiment ID: 20001757 Result: Down-regulated in Transcription
  misc_feature: MA Experiment 20001757 PARAMETER Experiment Name: At_50mM_NH4NO3_L-to-H_P Parameter: Timepoint (hr) Value: 6
  misc_feature: MA Experiment 20001757 PARAMETER Experiment Name: At_50mM_NH4NO3_L-to-H_P Parameter: Tissue Value: Leaf
  misc_feature: MA Experiment 20001757 PARAMETER Experiment Name: At_50mM_NH4NO3_L-to-H_P Parameter: Treatment Value: 50mM NH4NO3 vs 100mM Mannitol
  misc_feature: MA Experiment ID: 20001904 Result: Up-regulated in Transcription
  misc_feature: MA Experiment 20001904 PARAMETER Experiment Name: At_Drought_Reproduction_P Parameter: Age (day) Value: 37
  misc_feature: MA Experiment 20001904 PARAMETER Experiment Name: At_Drought_Reproduction_P Parameter: Organism Value: A. thaliana
  misc_feature: MA Experiment 20001904 PARAMETER Experiment Name: At_Drought_Reproduction_P Parameter: Plant Line Value: WS
  misc_feature: MA Experiment 20001904 PARAMETER Experiment Name: At_Drought_Reproduction_P Parameter: Timepoint (day) Value: 7
  misc_feature: MA Experiment 20001904 PARAMETER Experiment Name: At_Drought_Reproduction_P Parameter: Tissue Value: Rosettes
  misc_feature: MA Experiment 20001904 PARAMETER Experiment Name: At_Drought_Reproduction_P Parameter: Treatment Value: Drought vs. No Drought
  misc_feature: MA Experiment ID: 20001905 Result: Up-regulated in Transcription
  misc_feature: MA Experiment 20001905 PARAMETER Experiment Name: At_Drought_Reproduction_P Parameter: Age (day) Value: 40
  misc_feature: MA Experiment 20001905 PARAMETER Experiment Name: At_Drought_Reproduction_P Parameter: Organism Value: A. thaliana
  misc_feature: MA Experiment 20001905 PARAMETER Experiment Name: At_Drought_Reproduction_P Parameter: Plant Line Value: WS
  misc_feature: MA Experiment 20001905 PARAMETER Experiment Name: At_Drought_Reproduction_P Parameter: Timepoint (day) Value: 10
  misc_feature: MA Experiment 20001905 PARAMETER Experiment Name: At_Drought_Reproduction_P Parameter: Tissue Value: Rosettes
  misc_feature: MA Experiment 20001905 PARAMETER Experiment Name: At_Drought_Reproduction_P Parameter: Treatment Value: Drought vs. No Drought
atggtttcagaagcttggattgtgaaaatgagaaaccaagtaagttctaatctcaagcacgctcttcttcttgaatcttcttccactaagaaaacccctaaaccagtctctcttcctaaacaaacaattggaatcttatctttcgaagtagctaacgttatgtctaaaaccattcaccttcaccgttctctgtccgatacagagatctctaagcttaaagccgaggtttttcactcggaaggagttagaaagcttgtatcttccgatgagaatcatcttttagatctctctgtctctgagaagcttgatgatttgagccgtgtagctagtgttgtgtctaggttaggtaagaaatgtaacgaacctgctttacaaggatttgagcatgtttatgaagatatagtgaatggtgcgattgattttaggaagttagggttcttggttaaagatatggaatctatggttaagaagatggagagatttgtgaatgctacttgtagtttgtattgtgaaatggaagtgatgaatgagcttgaacaagctatagtgaagcttcagagaagtcagcagcatcaagagagtgttaaagcttttgaacagaagcttatgtggcagagacaggacgtgaagagtcttagagatggttcgttgtggaaccaaacttatgataaggttgttgagatgttggctaggactgtttgtactatttatggtaggattgaaactgtttttggtgggttgggtttgagagggaaaaaggatgtgactttgaagagagatcgtagcaagaatgaagcgagtaaggctgttaactcaaggtctgttgcgggttttaaggattcgaggagaagcgaagcggatgagtttacgcgtgcaggggatttcaatttcccttgtgggactaatcctggtaggatgttcatggaatgtcttgctatgaataggactattggtgatgatgatgatgatgatgatgaagatgggggtcggattacatttcctttgagtacagctaggatgattcggagtaataagtttggttttaagagcaggttaactcaacatgcttcagcttcaactattggaggatctgctttatctttgcactatgcaaatgttgtgattgtggtagaaaagcttcttaagtaccctcatctaataggcgaagaagcaagagatgatctttaccaaatgttaccaacgagtttgaagacaacgcttaaggctagtctaagatcatacttgaagaacatttcgatctacgacgctcctctagctcacgactggaaagaaaccatagacggtatactttcttggcttgctcctttagctcacaacatgatccggtggcagagcgaacgcaacttcgagcagcagaatcagattgtgaagcgaactaacgttcttctacttcagactctttactttgctgatagagagaagacagaagctgcgatttgtaagcttcttgtcgggttaaactacatttgccattacgaacaacaacaaaacgcgttgttggattgcgcgagtagctttgattatgaagattgttttgagtggcagagccaatgccgtgcagcttacttggactaa

SEQ ID NO: 78959 - protein, 531 aa, Arabidopsis thaliana
  peptide (1)..(531): Ceres Seq. ID no. 12647479
  misc_feature (360)..(449): Pfam Name: Protein of unknown function (DUF668) Pfam Description: Protein of unknown function (DUF668)
  misc_feature (1)..(531): Homolog of NCBI NO: 7939524 NR Description: contains similarity to unknown
  misc_feature (10)..(531): Homolog of NCBI NO: 15228977 NR Description: hypothetical protein; protein id: At3g23160.1
  misc_feature (40)..(245): Homolog of NCBI NO: 15238198 NR Description: putative protein; protein id: At5g04550.1, by cDNA: gi_13605828, supported by cDNA: gi_17064801, supported cDNA: gi_20259825, supported by cDNA: gi_20260407 [Arabidopsis
  misc_feature (356)..(520): Homolog of NCBI NO: 15238198 NR Description: putative protein; protein id: At5g04550.1, by cDNA: gi_13605828, supported by cDNA: gi_17064801, supported cDNA: gi_20259825, supported by cDNA: gi_20260407 [Arabidopsis
  misc_feature (1)..(271): Homolog of NCBI NO: 15242144 NR Description: putative protein; protein id: At5g51670.1 thaliana] >gi|8953735|dbj|BAA98099.1| contains similarity to
  misc_feature (350)..(505): Homolog of NCBI NO: 15242144 NR Description: putative protein; protein id: At5g51670.1 thaliana] >gi|8953735|dbj|BAA98099.1| contains similarity to
  misc_feature (90)..(265): Homolog of NCBI NO: 12003396 NR Description: Avr9/Cf-9 rapidly elicited protein 137 [Nicotiana
  misc_feature (343)..(503): Homolog of NCBI NO: 12003396 NR Description: Avr9/Cf-9 rapidly elicited protein 137 [Nicotiana
  misc_feature (1)..(275): Homolog of NCBI NO: 30102981 NR Description: hypothetical protein [Oryza sativa (japonica
  misc_feature (360)..(502): Homolog of NCBI NO: 30102981 NR Description: hypothetical protein [Oryza sativa (japonica
MVSEAWIVKMRNQVSSNLKHALLLESSSTKKTPKPVSLPKQTIGILSFEVANVMSKTIHLHRSLSDTEISKLKAEVFHSEGVRKLVSSDENHLLDLSVSEKLDDLSRVASVVSRLGKKCNEPALQGFEHVYEDIVNGAIDFRKLGFLVKDMESMVKKMERFVNATCSLYCEMEVMNELEQAIVKLQRSQQHQESVKAFEQKLMWQRQDVKSLRDGSLWNQTYDKVVEMLARTVCTIYGRIETVFGGLGLRGKKDVTLKRDRSKNEASKAVNSRSVAGFKDSRRSEADEFTRAGDFNFPCGTNPGRMFMECLAMNRTIGDDDDDDDEDGGRITFPLSTARMIRSNKFGFKSRLTQHASASTIGGSALSLHYANVVIVVEKLLKYPHLIGEEARDDLYQMLPTSLKTTLKASLRSYLKNISIYDAPLAHDWKETIDGILSWLAPLAHNMIRWQSERNFEQQNQIVKRTNVLLLQTLYFADREKTEAAICKLLVGLNYICHYEQQQNALLDCASSFDYEDCFEWQSQCRAAYLD

SEQ ID NO: 78960 - protein, 522 aa, Arabidopsis thaliana
  peptide (1)..(522): Ceres Seq. ID no. 12647480
  misc_feature (351)..(440): Pfam Name: Protein of unknown function (DUF668) Pfam Description: Protein of unknown function (DUF668)
  misc_feature (1)..(522): Homolog of NCBI NO: 7939524 NR Description: contains similarity to unknown
  misc_feature (1)..(522): Homolog of NCBI NO: 15228977 NR Description: hypothetical protein; protein id: At3g23160.1
  misc_feature (31)..(236): Homolog of NCBI NO: 15238198 NR Description: putative protein; protein id: At5g04550.1, by cDNA: gi_13605828, supported by cDNA: gi_17064801, supported cDNA: gi_20259825, supported by cDNA: gi_20260407 [Arabidopsis
  misc_feature (347)..(511): Homolog of NCBI NO: 15238198 NR Description: putative protein; protein id: At5g04550.1, by cDNA: gi_13605828, supported by cDNA: gi_17064801, supported cDNA: gi_20259825, supported by cDNA: gi_20260407 [Arabidopsis
  misc_feature (1)..(262): Homolog of NCBI NO: 15242144 NR Description: putative protein; protein id: At5g51670.1 thaliana] >gi|8953735|dbj|BAA98099.1| contains similarity to
  misc_feature (341)..(496): Homolog of NCBI NO: 15242144 NR Description: putative protein; protein id: At5g51670.1 thaliana] >gi|8953735|dbj|BAA98099.1| contains similarity to
  misc_feature (81)..(256): Homolog of NCBI NO: 12003396 NR Description: Avr9/Cf-9 rapidly elicited protein 137 [Nicotiana
  misc_feature (334)..(494): Homolog of NCBI NO: 12003396 NR Description: Avr9/Cf-9 rapidly elicited protein 137 [Nicotiana
  misc_feature (1)..(266): Homolog of NCBI NO: 30102981 NR Description: hypothetical protein [Oryza sativa (japonica
  misc_feature (351)..(493): Homolog of NCBI NO: 30102981 NR Description: hypothetical protein [Oryza sativa (japonica
MRNQVSSNLKHALLLESSSTKKTPKPVSLPKQTIGILSFEVANVMSKTIHLHRSLSDTEISKLKAEVFHSEGVRKLVSSDENHLLDLSVSEKLDDLSRVASVVSRLGKKCNEPALQGFEHVYEDIVNGAIDFRKLGFLVKDMESMVKKMERFVNATCSLYCEMEVMNELEQAIVKLQRSQQHQESVKAFEQKLMWQRQDVKSLRDGSLWNQTYDKVVEMLARTVCTIYGRIETVFGGLGLRGKKDVTLKRDRSKNEASKAVNSRSVAGFKDSRRSEADEFTRAGDFNFPCGTNPGRMFMECLAMNRTIGDDDDDDDEDGGRITFPLSTARMIRSNKFGFKSRLTQHASASTIGGSALSLHYANVVIVVEKLLKYPHLIGEEARDDLYQMLPTSLKTTLKASLRSYLKNISIYDAPLAHDWKETIDGILSWLAPLAHNMIRWQSERNFEQQNQIVKRTNVLLLQTLYFADREKTEAAICKLLVGLNYICHYEQQQNALLDCASSFDYEDCFEWQSQCRAAYLD

SEQ ID NO: 78961 - protein, 478 aa, Arabidopsis thaliana
  peptide (1)..(478): Ceres Seq. ID no. 12647481
  misc_feature (307)..(396): Pfam Name: Protein of unknown function (DUF668) Pfam Description: Protein of unknown function (DUF668)
  misc_feature (1)..(478): Homolog of NCBI NO: 7939524 NR Description: contains similarity to unknown
  misc_feature (1)..(478): Homolog of NCBI NO: 15228977 NR Description: hypothetical protein; protein id: At3g23160.1
  misc_feature (1)..(192): Homolog of NCBI NO: 15238198 NR Description: putative protein; protein id: At5g04550.1, by cDNA: gi_13605828, supported by cDNA: gi_17064801, supported cDNA: gi_20259825, supported by cDNA: gi_20260407 [Arabidopsis
  misc_feature (303)..(467): Homolog of NCBI NO: 15238198 NR Description: putative protein; protein id: At5g04550.1, by cDNA: gi_13605828, supported by cDNA: gi_17064801, supported cDNA: gi_20259825, supported by cDNA: gi_20260407 [Arabidopsis
  misc_feature (1)..(218): Homolog of NCBI NO: 15242144 NR Description: putative protein; protein id: At5g51670.1 thaliana] >gi|8953735|dbj|BAA98099.1| contains similarity to
  misc_feature (297)..(452): Homolog of NCBI NO: 15242144 NR Description: putative protein; protein id: At5g51670.1 thaliana] >gi|8953735|dbj|BAA98099.1| contains similarity to
  misc_feature (37)..(212): Homolog of NCBI NO: 12003396 NR Description: Avr9/Cf-9 rapidly elicited protein 137 [Nicotiana
  misc_feature (290)..(450): Homolog of NCBI NO: 12003396 NR Description: Avr9/Cf-9 rapidly elicited protein 137 [Nicotiana
  misc_feature (1)..(222): Homolog of NCBI NO: 30102981 NR Description: hypothetical protein [Oryza sativa (japonica
  misc_feature (307)..(449): Homolog of NCBI NO: 30102981 NR Description: hypothetical protein [Oryza sativa (japonica
MSKTIHLHRSLSDTEISKLKAEVFHSEGVRKLVSSDENHLLDLSVSEKLDDLSRVASVVSRLGKKCNEPALQGFEHVYEDIVNGAIDFRKLGFLVKDMESMVKKMERFVNATCSLYCEMEVMNELEQAIVKLQRSQQHQESVKAFEQKLMWQRQDVKSLRDGSLWNQTYDKVVEMLARTVCTIYGRIETVFGGLGLRGKKDVTLKRDRSKNEASKAVNSRSVAGFKDSRRSEADEFTRAGDFNFPCGTNPGRMFMECLAMNRTIGDDDDDDDEDGGRITFPLSTARMIRSNKFGFKSRLTQHASASTIGGSALSLHYANVVIVVEKLLKYPHLIGEEARDDLYQMLPTSLKTTLKASLRSYLKNISIYDAPLAHDWKETIDGILSWLAPLAHNMIRWQSERNFEQQNQIVKRTNVLLLQTLYFADREKTEAAICKLLVGLNYICHYEQQQNALLDCASSFDYEDCFEWQSQCRAAYLD

SEQ ID NO: 78962 - DNA, 3825 bp, Arabidopsis thaliana
  misc_feature (1)..(3825): Ceres Seq. ID no. 12647536
  misc_feature: MA Experiment ID: 20000235 Result: Up-regulated in Transcription
  misc_feature: MA Experiment 20000235 PARAMETER Experiment Name: At_Siliques_P Parameter: Age (day) Value: 21
  misc_feature: MA Experiment 20000235 PARAMETER Experiment Name: At_Siliques_P Parameter: Organism Value: A. thaliana
  misc_feature: MA Experiment 20000235 PARAMETER Experiment Name: At_Siliques_P Parameter: Plant Line Value: WS
  misc_feature: MA Experiment 20000235 PARAMETER Experiment Name: At_Siliques_P Parameter: Tissue Value: 5-10mm Siliques vs. Whole Plant
  misc_feature: MA Experiment ID: 20000495 Result: Up-regulated in Transcription
  misc_feature: MA Experiment 20000495 PARAMETER Experiment Name: At_Guard_Cells_P Parameter: Harvest Date Value: 8/2/2002
  misc_feature: MA Experiment 20000495 PARAMETER Experiment Name: At_Guard_Cells_P Parameter: Organism Value: A. thaliana
  misc_feature: MA Experiment 20000495 PARAMETER Experiment Name: At_Guard_Cells_P Parameter: Tissue Value: Guard Cells vs. Leaves
atggtggttcctggacggagaaccgtctgggattgtgtgattgagctgacaaagatggctcaagagaactgtgtcgatcctcgtctttgggcttctcagttatcatcgaatttgaaattcttcgccgtggagttaccgtcgacggagcttgcggaggttattgtttcgtacatttgttgggataataacgttcctattgtttggaagtttcttgaaagagctatggctttgaagcttgtttctcctctcgttgttcttgctcttctcgctgacagagttgttccaacccggtctacgcaacaagcagcttatagaatttacttggagctgctcaagagaaatatgttcaccattaaagatcatattagtggacctcactaccagaaggtcatgatttcagtatccaatattcttcgtctttcagagttatttgatctggacacaagcaaacctggtgtgcttttagtagagtttgtttttaagatggtgtcacaattgctagatgcagcgttaagtgatgaaggtttgctagagctaagccaagactcgagctcccagtggctagttaagtctcaagatatggaaattgatgctcctgagagatataatgaaaagactggatcactagagaagttacagagtttgaataccatcatggctattgagttgatagcggaattcctcagaaatacagtgattgcgagattgctatacttggtatcttccaacagggcttcgaagtggcatgaatttgtccagaaagtgcagcttcttggagaaaattcatcggctttaaaacactcaaaggttctaaattctggggatctattacaattgatttcgaatagacgatttgggtattcttatgatagcaaagtaacttcagcacggaaatccaatgcaattgtggattttggatctctctcttcctatgctggcttatgccatggagcaagtctctcttcactttggcttcctcttgatctagtatttgaagatgcaatggatggatatcaagtaaacccaactagtgcgattgaaatcattaccggtctagctaaaacacttaaagaaattaatgggagcacttggcatgacactttcttggggctttggatagcagctctccgacttgttcaaagggtcctcggtgatttccctggattgctggctcctcccaaatgcgttgtttctgctgccaacaaggctgccacaaaggcaatcttgtttttgtctggtggcaatgttggaaagtcatgttttgatgtcataaacatgaaggacatgcctgtcaactgctctggaaacatgcgccacctgatagtcgaggcttgtattgcaagaaacatactggatatgtcggcttattcgtggcctggctatgttaatggccgaatcaaccaaatacctcagagtctgccgaatgaagtaccctgctggtcatcatttgtgaaaggggctccactaaatgccgcaatggtgaatacattagtttcagttcctgcttcaagctccacactacttcatccacatagtcttccctccaaatcatacagtcagtgcttagcagagctcgagaaactatttgaggttgcagtcaaaggatcggatgacgagaagatatctgctgctacagttctttgcggggcatctctcacacggggttggaacatacaggaacacactgttgaatatcttacaagattactatccccacccgttccagcagattattccagggctgaaaatcatttgattggttatgcctgcatgttgaatgttgttattgttgggataggatctgttgacagcattcaaattttctctttacatggcatggttccgcaacttgcttgctcactaatgccaatttgtgaagagtttggatcttacaccccgagtgtatcatggactcttccttctggagaagcaatatcagcatattctgttttctcaaatgcattcactcttcttttaaagctatggagattcaatcatcctcctattgagcatggtgtgggagatgttcccacagttggctcccaactcactcctgaacatcttctttcagtgcgtaattcttatcttgtttcgtcggagatccttgatagagaccgaaacagaaagagactttcagaagttgcaagggcagcatcttgccagcccgtgtttgtggactcgttccccaagctgaaagtctggtataggcagcaccaaagatgcatagcagccacattatctggacttacacatggatctcccgttcatcagacagttgaagcacttctcaacatgacgttcggaaaggtcagaggcagtcagactttaaatccagtaaattcgggcacaagcagttcatcaggagctgcaagtgaagatagcaatattagacctgagtttcctgcttgggatatcctcaaagccgttccatatgttgtcgatgctgctttaaccgcttgtactcatggaaggctttcgcctcgtcagttagctacagggctgaaagacttagcagattttctcccggcatcattagcaacgatagtaagctatttctcagctgaggtgagtagaggtgtttggaagccagtattcatgaacggcgtggattggccaagtccagctacaaatctatccactgttgaggaatatataacgaaaattcttgcaacaacaggcgtcgatatccctagccttgctccaggagggagttctccggcaacgcttcctttacctctagccgcatttgttagtctaaccattacttacaaaattgacaaagcctcagagcggtttctcaacctggctggcccagctctggagtgcttggctgcaggctgcccttggccttgcatgcccattgtagcttcattatggacccaaaaggcgaaacgttggtttgacttccttgttttctctgcctctcgcaccgtcttccttcacaaccaagacgctgtgattcagctcctcagaaactgcttcagtgccactctgggtttgaatgctgcccccatgtcaaatgatggtggcgttggagctcttcttggccatggattcggctctcatttctatggagggatctctcctgtagcaccagggattctttatctccgtatgtatcgtgctctcagagatactgtctccgtatcggaagagattctctctctgctgatacattcggtggaggatatagcccagaacaggctctcaaaggagaagctggaaaagctgaagacagtgaagaacggatcaagatacggccaaagttctctagcaacagcaatgactcaagtgaagcttgctgcttcgctgagtgcctcgttggtatggctaaccggtggcttaggtgtggtccacgttctcatcaaagaaacgatcccatcttggtttctatcaactgacaaatcagaccgagaacaaggaccatcggatctagttgcagagctaagaggtcatgcccttgcctactttgtggtcctatgtggagcacttacttggggcgtggattcaagatcatctgcatccaaacgccgccgccaagcaatcttgggaagccacttggagttcatcgcgagtgccttagatgggaaaatatcagtgggatgtgaaacagcaacttggcgaacatatatttccggtttggtgagtctaatggtgagctgtttgccgctctgggtgacagagatcgatacagaagtgttaaagagtctaagcaatggactaagaaaatggggaaaagacgagctagcgattgtattactctccttgggaggtctcaaaacaatggattacgcagctgatttcatcattcatttgcgttcatag

SEQ ID NO: 78963 - protein, 1274 aa, Arabidopsis thaliana
  peptide (1)..(1274): Ceres Seq. ID no. 12647537
  misc_feature (214)..(381): Homolog of NCBI NO: 18407529 NR Description: unknown protein; protein id: At2g48110.1
  misc_feature (614)..(1270): Homolog of NCBI NO: 25370851 NR Description: hypothetical protein At2g48110 [imported] -
  misc_feature (8)..(352): Homolog of NCBI NO: 25370851 NR Description: hypothetical protein At2g48110 [imported] -
  misc_feature (471)..(559): Homolog of NCBI NO: 25370851 NR Description: hypothetical protein At2g48110 [imported] -
  misc_feature (383)..(433): Homolog of NCBI NO: 25370851 NR Description: hypothetical protein At2g48110 [imported] -
  misc_feature (386)..(1270): Homolog of NCBI NO: 33146668 NR Description: unknown protein [Oryza sativa (japonica
  misc_feature (13)..(381): Homolog of NCBI NO: 33146668 NR Description: unknown protein [Oryza sativa (japonica
  misc_feature (522)..(925): Homolog of NCBI NO: 20197556 NR Description: unknown protein [Arabidopsis thaliana]
  misc_feature (8)..(247): Homolog of NCBI NO: 20197556 NR Description: unknown protein [Arabidopsis thaliana]
  misc_feature (383)..(504): Homolog of NCBI NO: 20197556 NR Description: unknown protein [Arabidopsis thaliana]
MVVPGRRTVWDCVIELTKMAQENCVDPRLWASQLSSNLKFFAVELPSTELAEVIVSYICWDNNVPIVWKFLERAMALKLVSPLVVLALLADRVVPTRSTQQAAYRIYLELLKRNMFTIKDHISGPHYQKVMISVSNILRLSELFDLDTSKPGVLLVEFVFKMVSQLLDAALSDEGLLELSQDSSSQWLVKSQDMEIDAPERYNEKTGSLEKLQSLNTIMAIELIAEFLRNTVIARLLYLVSSNRASKWHEFVQKVQLLGENSSALKHSKVLNSGDLLQLISNRRFGYSYDSKVTSARKSNAIVDFGSLSSYAGLCHGASLSSLWLPLDLVFEDAMDGYQVNPTSAIEIITGLAKTLKEINGSTWHDTFLGLWIAALRLVQRVLGDFPGLLAPPKCVVSAANKAATKAILFLSGGNVGKSCFDVINMKDMPVNCSGNMRHLIVEACIARNILDMSAYSWPGYVNGRINQIPQSLPNEVPCWSSFVKGAPLNAAMVNTLVSVPASSSTLLHPHSLPSKSYSQCLAELEKLFEVAVKGSDDEKISAATVLCGASLTRGWNIQEHTVEYLTRLLSPPVPADYSRAENHLIGYACMLNVVIVGIGSVDSIQIFSLHGMVPQLACSLMPICEEFGSYTPSVSWTLPSGEAISAYSVFSNAFTLLLKLWRFNHPPIEHGVGDVPTVGSQLTPEHLLSVRNSYLVSSEILDRDRNRKRLSEVARAASCQPVFVDSFPKLKVWYRQHQRCIAATLSGLTHGSPVHQTVEALLNMTFGKVRGSQTLNPVNSGTSSSSGAASEDSNIRPEFPAWDILKAVPYVVDAALTACTHGRLSPRQLATGLKDLADFLPASLATIVSYFSAEVSRGVWKPVFMNGVDWPSPATNLSTVEEYITKILATTGVDIPSLAPGGSSPATLPLPLAAFVSLTITYKIDKASERFLNLAGPALECLAAGCPWPCMPIVASLWTQKAKRWFDFLVFSASRTVFLHNQDAVIQLLRNCFSATLGLNAAPMSNDGGVGALLGHGFGSHFYGGISPVAPGILYLRMYRALRDTVSVSEEILSLLIHSVEDIAQNRLSKEKLEKLKTVKNGSRYGQSSLATAMTQVKLAASLSASLVWLTGGLGVVHVLIKETIPSWFLSTDKSDREQGPSDLVAELRGHALAYFVVLCGALTWGVDSRSSASKRRRQAILGSHLEFIASALDGKISVGCETATWRTYISGLVSLMVSCLPLWVTEIDTEVLKSLSNGLRKWGKDELAIVLLSLGGLKTMDYAADFIIHLRS

SEQ ID NO: 78964 - protein, 1256 aa, Arabidopsis thaliana
  peptide (1)..(1256): Ceres Seq. ID no. 12647538
  misc_feature (196)..(363): Homolog of NCBI NO: 18407529 NR Description: unknown protein; protein id: At2g48110.1
  misc_feature (596)..(1252): Homolog of NCBI NO: 25370851 NR Description: hypothetical protein At2g48110 [imported] -
  misc_feature (1)..(334): Homolog of NCBI NO: 25370851 NR Description: hypothetical protein At2g48110 [imported] -
  misc_feature (453)..(541): Homolog of NCBI NO: 25370851 NR Description: hypothetical protein At2g48110 [imported] -
  misc_feature (365)..(415): Homolog of NCBI NO: 25370851 NR Description: hypothetical protein At2g48110 [imported] -
  misc_feature (368)..(1252): Homolog of NCBI NO: 33146668 NR Description: unknown protein [Oryza sativa (japonica
  misc_feature (1)..(363): Homolog of NCBI NO: 33146668 NR Description: unknown protein [Oryza sativa (japonica
  misc_feature (504)..(907): Homolog of NCBI NO: 20197556 NR Description: unknown protein [Arabidopsis thaliana]
  misc_feature (1)..(229): Homolog of NCBI NO: 20197556 NR Description: unknown protein [Arabidopsis thaliana]
  misc_feature (365)..(486): Homolog of NCBI NO: 20197556 NR Description: unknown protein [Arabidopsis thaliana]
MAQENCVDPRLWASQLSSNLKFFAVELPSTELAEVIVSYICWDNNVPIVWKFLERAMALKLVSPLVVLALLADRVVPTRSTQQAAYRIYLELLKRNMFTIKDHISGPHYQKVMISVSNILRLSELFDLDTSKPGVLLVEFVFKMVSQLLDAALSDEGLLELSQDSSSQWLVKSQDMEIDAPERYNEKTGSLEKLQSLNTIMAIELIAEFLRNTVIARLLYLVSSNRASKWHEFVQKVQLLGENSSALKHSKVLNSGDLLQLISNRRFGYSYDSKVTSARKSNAIVDFGSLSSYAGLCHGASLSSLWLPLDLVFEDAMDGYQVNPTSAIEIITGLAKTLKEINGSTWHDTFLGLWIAALRLVQRVLGDFPGLLAPPKCVVSAANKAATKAILFLSGGNVGKSCFDVINMKDMPVNCSGNMRHLIVEACIARNILDMSAYSWPGYVNGRINQIPQSLPNEVPCWSSFVKGAPLNAAMVNTLVSVPASSSTLLHPHSLPSKSYSQCLAELEKLFEVAVKGSDDEKISAATVLCGASLTRGWNIQEHTVEYLTRLLSPPVPADYSRAENHLIGYACMLNVVIVGIGSVDSIQIFSLHGMVPQLACSLMPICEEFGSYTPSVSWTLPSGEAISAYSVFSNAFTLLLKLWRFNHPPIEHGVGDVPTVGSQLTPEHLLSVRNSYLVSSEILDRDRNRKRLSEVARAASCQPVFVDSFPKLKVWYRQHQRCIAATLSGLTHGSPVHQTVEALLNMTFGKVRGSQTLNPVNSGTSSSSGAASEDSNIRPEFPAWDILKAVPYVVDAALTACTHGRLSPRQLATGLKDLADFLPASLATIVSYFSAEVSRGVWKPVFMNGVDWPSPATNLSTVEEYITKILATTGVDIPSLAPGGSSPATLPLPLAAFVSLTITYKIDKASERFLNLAGPALECLAAGCPWPCMPIVASLWTQKAKRWFDFLVFSASRTVFLHNQDAVIQLLRNCFSATLGLNAAPMSNDGGVGALLGHGFGSHFYGGISPVAPGILYLRMYRALRDTVSVSEEILSLLIHSVEDIAQNRLSKEKLEKLKTVKNGSRYGQSSLATAMTQVKLAASLSASLVWLTGGLGVVHVLIKETIPSWFLSTDKSDREQGPSDLVAELRGHALAYFVVLCGALTWGVDSRSSASKRRRQAILGSHLEFIASALDGKISVGCETATWRTYISGLVSLMVSCLPLWVTEIDTEVLKSLSNGLRKWGKDELAIVLLSLGGLKTMDYAADFIIHLRS

SEQ ID NO: 78965 - protein, 1200 aa, Arabidopsis thaliana
  peptide (1)..(1200): Ceres Seq. ID no. 12647539
  misc_feature (140)..(307): Homolog of NCBI NO: 18407529 NR Description: unknown protein; protein id: At2g48110.1
  misc_feature (540)..(1196): Homolog of NCBI NO: 25370851 NR Description: hypothetical protein At2g48110 [imported] -
  misc_feature (1)..(278): Homolog of NCBI NO: 25370851 NR Description: hypothetical protein At2g48110 [imported] -
  misc_feature (397)..(485): Homolog of NCBI NO: 25370851 NR Description: hypothetical protein At2g48110 [imported] -
  misc_feature (309)..(359): Homolog of NCBI NO: 25370851 NR Description: hypothetical protein At2g48110 [imported] -
  misc_feature (312)..(1196): Homolog of NCBI NO: 33146668 NR Description: unknown protein [Oryza sativa (japonica
  misc_feature (1)..(307): Homolog of NCBI NO: 33146668 NR Description: unknown protein [Oryza sativa (japonica
  misc_feature (448)..(851): Homolog of NCBI NO: 20197556 NR Description: unknown protein [Arabidopsis thaliana]
  misc_feature (1)..(173): Homolog of NCBI NO: 20197556 NR Description: unknown protein [Arabidopsis thaliana]
  misc_feature (309)..(430): Homolog of NCBI NO: 20197556 NR Description: unknown protein [Arabidopsis thaliana]
MALKLVSPLVVLALLADRVVPTRSTQQAAYRIYLELLKRNMFTIKDHISGPHYQKVMISVSNILRLSELFDLDTSKPGVLLVEFVFKMVSQLLDAALSDEGLLELSQDSSSQWLVKSQDMEIDAPERYNEKTGSLEKLQSLNTIMAIELIAEFLRNTVIARLLYLVSSNRASKWHEFVQKVQLLGENSSALKHSKVLNSGDLLQLISNRRFGYSYDSKVTSARKSNAIVDFGSLSSYAGLCHGASLSSLWLPLDLVFEDAMDGYQVNPTSAIEIITGLAKTLKEINGSTWHDTFLGLWIAALRLVQRVLGDFPGLLAPPKCVVSAANKAATKAILFLSGGNVGKSCFDVINMKDMPVNCSGNMRHLIVEACIARNILDMSAYSWPGYVNGRINQIPQSLPNEVPCWSSFVKGAPLNAAMVNTLVSVPASSSTLLHPHSLPSKSYSQCLAELEKLFEVAVKGSDDEKISAATVLCGASLTRGWNIQEHTVEYLTRLLSPPVPADYSRAENHLIGYACMLNVVIVGIGSVDSIQIFSLHGMVPQLACSLMPICEEFGSYTPSVSWTLPSGEAISAYSVFSNAFTLLLKLWRFNHPPIEHGVGDVPTVGSQLTPEHLLSVRNSYLVSSEILDRDRNRKRLSEVARAASCQPVFVDSFPKLKVWYRQHQRCIAATLSGLTHGSPVHQTVEALLNMTFGKVRGSQTLNPVNSGTSSSSGAASEDSNIRPEFPAWDILKAVPYVVDAALTACTHGRLSPRQLATGLKDLADFLPASLATIVSYFSAEVSRGVWKPVFMNGVDWPSPATNLSTVEEYITKILATTGVDIPSLAPGGSSPATLPLPLAAFVSLTITYKIDKASERFLNLAGPALECLAAGCPWPCMPIVASLWTQKAKRWFDFLVFSASRTVFLHNQDAVIQLLRNCFSATLGLNAAPMSNDGGVGALLGHGFGSHFYGGISPVAPGILYLRMYRALRDTVSVSEEILSLLIHSVEDIAQNRLSKEKLEKLKTVKNGSRYGQSSLATAMTQVKLAASLSASLVWLTGGLGVVHVLIKETIPSWFLSTDKSDREQGPSDLVAELRGHALAYFVVLCGALTWGVDSRSSASKRRRQAILGSHLEFIASALDGKISVGCETATWRTYISGLVSLMVSCLPLWVTEIDTEVLKSLSNGLRKWGKDELAIVLLSLGGLKTMDYAADFIIHLRS

SEQ ID NO: 78966 - DNA, 1074 bp, Arabidopsis thaliana
  misc_feature (1)..(1074): Ceres Seq. ID no. 12647555
  misc_feature: MA Experiment ID: 108464 Result: Down-regulated in Transcription
  misc_feature: MA Experiment 108464 PARAMETER Experiment Name: At_Germinating_Seeds_cDNA_P Parameter: Age (day) Value: 4 vs. 0
  misc_feature: MA Experiment 108464 PARAMETER Experiment Name: At_Germinating_Seeds_cDNA_P Parameter: Tissue Value: Germinating Seeds
  misc_feature: MA Experiment ID: 108473 Result: Down-regulated in Transcription
  misc_feature: MA Experiment 108473 PARAMETER Experiment Name: At_Drought_Flowers_cDNA_P Parameter: Timepoint (hr) Value: 7 d
  misc_feature: MA Experiment 108473 PARAMETER Experiment Name: At_Drought_Flowers_cDNA_P Parameter: Tissue Value: Flower
  misc_feature: MA Experiment 108473 PARAMETER Experiment Name: At_Drought_Flowers_cDNA_P Parameter: Treatment Value: Drought vs. No Drought
  misc_feature: MA Experiment ID: 108572 Result: Down-regulated in Transcription
  misc_feature: MA Experiment 108572 PARAMETER Experiment Name: At_Drought_cDNA_P Parameter: Timepoint (hr) Value: 1
  misc_feature: MA Experiment 108572 PARAMETER Experiment Name: At_Drought_cDNA_P Parameter: Tissue Value: Aerial
  misc_feature: MA Experiment 108572 PARAMETER Experiment Name: At_Drought_cDNA_P Parameter: Treatment Value: Drought vs. No Drought
  misc_feature: MA Experiment ID: 108573 Result: Down-regulated in Transcription
  misc_feature: MA Experiment 108573 PARAMETER Experiment Name: At_Drought_cDNA_P Parameter: Timepoint (hr) Value: 6
  misc_feature: MA Experiment 108573 PARAMETER Experiment Name: At_Drought_cDNA_P Parameter: Tissue Value: Aerial
  misc_feature: MA Experiment 108573 PARAMETER Experiment Name: At_Drought_cDNA_P Parameter: Treatment Value: Drought vs. No Drought
  misc_feature: MA Experiment ID: 108577 Result: Down-regulated in Transcription
  misc_feature: MA Experiment 108577 PARAMETER Experiment Name: At_42deg_Heat_cDNA_P Parameter: Temperature (deg C) Value: 42 vs. 22
  misc_feature: MA Experiment 108577 PARAMETER Experiment Name: At_42deg_Heat_cDNA_P Parameter: Timepoint (hr) Value: 6
  misc_feature: MA Experiment 108577 PARAMETER Experiment Name: At_42deg_Heat_cDNA_P Parameter: Tissue Value: Aerial
  misc_feature: MA Experiment ID: 108668 Result: Down-regulated in Transcription
  misc_feature: MA Experiment 108668 PARAMETER Experiment Name: At_2mM_SA_cDNA_P Parameter: Plant Line Value: WS
  misc_feature: MA Experiment 108668 PARAMETER Experiment Name: At_2mM_SA_cDNA_P Parameter: Timepoint (hr) Value: 6
  misc_feature: MA Experiment 108668 PARAMETER Experiment Name: At_2mM_SA_cDNA_P Parameter: Treatment Value: 2mM SA vs. No Treatment
  misc_feature: MA Experiment ID: 20000069 Result: Down-regulated in Transcription
  misc_feature: MA Experiment 20000069 PARAMETER Experiment Name: At_100uM_ABA_Mutants_cDNA_P Parameter: Plant Line Value: CS23
  misc_feature: MA Experiment 20000069 PARAMETER Experiment Name: At_100uM_ABA_Mutants_cDNA_P Parameter: Timepoint (hr) Value: 6
  misc_feature: MA Experiment 20000069 PARAMETER Experiment Name: At_100uM_ABA_Mutants_cDNA_P Parameter: Tissue Value: Aerial
  misc_feature: MA Experiment 20000069 PARAMETER Experiment Name: At_100uM_ABA_Mutants_cDNA_P Parameter: Treatment Value: 100uM ABA vs. No Treatment
  misc_feature: MA Experiment ID: 20000111 Result: Down-regulated in Transcription
  misc_feature: MA Experiment 20000111 PARAMETER Experiment Name: At_42deg_Heat_cDNA_P Parameter: Temperature (deg C) Value: 42 vs. 22
  misc_feature: MA Experiment 20000111 PARAMETER Experiment Name: At_42deg_Heat_cDNA_P Parameter: Timepoint (hr) Value: 6
  misc_feature: MA Experiment 20000111 PARAMETER Experiment Name: At_42deg_Heat_cDNA_P Parameter: Tissue Value: Aerial
  misc_feature: MA Experiment ID: 20000173 Result: Down-regulated in Transcription
  misc_feature: MA Experiment 20000173 PARAMETER Experiment Name: At_42deg_Heat_P Parameter: Age (day) Value: 14
  misc_feature: MA Experiment 20000173 PARAMETER Experiment Name: At_42deg_Heat_P Parameter: Organism Value: A. thaliana
  misc_feature: MA Experiment 20000173 PARAMETER Experiment Name: At_42deg_Heat_P Parameter: Plant Line Value: WS
  misc_feature: MA Experiment 20000173 PARAMETER Experiment Name: At_42deg_Heat_P Parameter: Temperature (deg C) Value: 42 vs. 22
  misc_feature: MA Experiment 20000173 PARAMETER Experiment Name: At_42deg_Heat_P Parameter: Timepoint (hr) Value: 6
  misc_feature: MA Experiment 20000173 PARAMETER Experiment Name: At_42deg_Heat_P Parameter: Tissue Value: Aerial
  misc_feature: MA Experiment ID: 20000179 Result: Up-regulated in Transcription
  misc_feature: MA Experiment 20000179 PARAMETER Experiment Name: At_Germinating_Seeds_P Parameter: Age (hr) Value: 6 vs. 0
  misc_feature: MA Experiment 20000179 PARAMETER Experiment Name: At_Germinating_Seeds_P Parameter: Tissue Value: Germinating Seeds
  misc_feature: MA Experiment ID: 20000180 Result: Up-regulated in Transcription
  misc_feature: MA Experiment 20000180 PARAMETER Experiment Name: At_Germinating_Seeds_P Parameter: Age (hr) Value: 24 vs. 0
  misc_feature: MA Experiment 20000180 PARAMETER Experiment Name: At_Germinating_Seeds_P Parameter: Tissue Value: Germinating Seeds
  misc_feature: MA Experiment ID: 20000182 Result: Down-regulated in Transcription
  misc_feature: MA Experiment 20000182 PARAMETER Experiment Name: At_2mM_SA_P Parameter: Age (day) Value: 14
  misc_feature: MA Experiment 20000182 PARAMETER Experiment Name: At_2mM_SA_P Parameter: Organism Value: A. thaliana
  misc_feature: MA Experiment 20000182 PARAMETER Experiment Name: At_2mM_SA_P Parameter: Plant Line Value: WS
  misc_feature: MA Experiment 20000182 PARAMETER Experiment Name: At_2mM_SA_P Parameter: Timepoint (hr) Value: 6
  misc_feature: MA Experiment 20000182 PARAMETER Experiment Name: At_2mM_SA_P Parameter: Tissue Value: Aerial
  misc_feature: MA Experiment 20000182 PARAMETER Experiment Name: At_2mM_SA_P Parameter: Treatment Value: 2mM SA vs. No Treatment
  misc_feature: MA Experiment ID: 20000185 Result: Down-regulated in Transcription
  misc_feature: MA Experiment 20000185 PARAMETER Experiment Name: At_Roots__P Parameter: Age (day) Value: 7 vs. 21
  misc_feature: MA Experiment 20000185 PARAMETER Experiment Name: At_Roots__P Parameter: Organism Value: A. thaliana
  misc_feature: MA Experiment 20000185 PARAMETER Experiment Name: At_Roots__P Parameter: Tissue Value: Roots vs. Whole Plant
  misc_feature: MA Experiment ID: 20000224 Result: Down-regulated in Transcription
  misc_feature: MA Experiment ID: 20000227 Result: Up-regulated in Transcription
  misc_feature: MA Experiment 20000227 PARAMETER Experiment Name: At_Root-Tips-vs-Tops_P Parameter: Tissue Value: Root Tips vs. Root Tops
  misc_feature: MA Experiment ID: 20000268 Result: Down-regulated in Transcription
  misc_feature: MA Experiment 20000268 PARAMETER Experiment Name: At_100mM_NaCl__P Parameter: Age (day) Value: 14
  misc_feature: MA Experiment 20000268 PARAMETER Experiment Name: At_100mM_NaCl__P Parameter: Organism Value: A. thaliana
  misc_feature: MA Experiment 20000268 PARAMETER Experiment Name: At_100mM_NaCl__P Parameter: Plant Line Value: WS
  misc_feature: MA Experiment 20000268 PARAMETER Experiment Name: At_100mM_NaCl__P Parameter: Timepoint (hr) Value: 6
  misc_feature: MA Experiment 20000268 PARAMETER Experiment Name: At_100mM_NaCl__P Parameter: Tissue Value: Whole Plant
  misc_feature: MA Experiment 20000268 PARAMETER Experiment Name: At_100mM_NaCl__P Parameter: Treatment Value: 100mM NaCl vs. No Treatment
  misc_feature: MA Experiment ID: 20000436 Result: Down-regulated in Transcription
  misc_feature: MA Experiment 20000436 PARAMETER Experiment Name: At_Drought_P Parameter: Age (day) Value: 7
  misc_feature: MA Experiment 20000436 PARAMETER Experiment Name: At_Drought_P Parameter: Organism Value: A. thaliana
  misc_feature: MA Experiment 20000436 PARAMETER Experiment Name: At_Drought_P Parameter: Plant Line Value: WS
  misc_feature: MA Experiment 20000436 PARAMETER Experiment Name: At_Drought_P Parameter: Timepoint (hr) Value: 12
  misc_feature: MA Experiment 20000436 PARAMETER Experiment Name: At_Drought_P Parameter: Tissue Value: Whole Plant
  misc_feature: MA Experiment 20000436 PARAMETER Experiment Name: At_Drought_P Parameter: Treatment Value: Drought vs. No Drought
  misc_feature: MA Experiment ID: 20000437 Result: Down-regulated in Transcription
  misc_feature: MA Experiment 20000437 PARAMETER Experiment Name: At_Drought_P Parameter: Age (day) Value: 8
  misc_feature: MA Experiment 20000437 PARAMETER Experiment Name: At_Drought_P Parameter: Organism Value: A. thaliana
  misc_feature: MA Experiment 20000437 PARAMETER Experiment Name: At_Drought_P Parameter: Plant Line Value: WS
  misc_feature: MA Experiment 20000437 PARAMETER Experiment Name: At_Drought_P Parameter: Timepoint (hr) Value: 24
  misc_feature: MA Experiment 20000437 PARAMETER Experiment Name: At_Drought_P Parameter: Tissue Value: Whole Plant
  misc_feature: MA Experiment 20000437 PARAMETER Experiment Name: At_Drought_P Parameter: Treatment Value: Drought vs. No Drought
  misc_feature: MA Experiment ID: 20000439 Result: Down-regulated in Transcription
  misc_feature: MA Experiment 20000439 PARAMETER Experiment Name: At_Roots__P Parameter: Age (day) Value: 14 vs. 21
  misc_feature: MA Experiment 20000439 PARAMETER Experiment Name: At_Roots__P Parameter: Organism Value: A. thaliana
  misc_feature: MA Experiment 20000439 PARAMETER Experiment Name: At_Roots__P Parameter: Tissue Value: Roots vs. Whole Plant
  misc_feature: MA Experiment ID: 20000451 Result: Down-regulated in Transcription
  misc_feature: MA Experiment 20000451 PARAMETER Experiment Name: At_CS6879_Shoots-Roots_P Parameter: Age (day) Value: 14
  misc_feature: MA Experiment 20000451 PARAMETER Experiment Name: At_CS6879_Shoots-Roots_P Parameter: Organism Value: A. thaliana
  misc_feature: MA Experiment 20000451 PARAMETER Experiment Name: At_CS6879_Shoots-Roots_P Parameter: Plant Line Value: CS6879 vs. WS
  misc_feature: MA Experiment 20000451 PARAMETER Experiment Name: At_CS6879_Shoots-Roots_P Parameter: Tissue Value: Roots
  misc_feature: MA Experiment ID: 20000452 Result: Down-regulated in Transcription
  misc_feature: MA Experiment 20000452 PARAMETER Experiment Name: At_CS6879_Shoots-Roots_P Parameter: Age (day) Value: 14
  misc_feature: MA Experiment 20000452 PARAMETER Experiment Name: At_CS6879_Shoots-Roots_P Parameter: Organism Value: A. thaliana
  misc_feature: MA Experiment 20000452 PARAMETER Experiment Name: At_CS6879_Shoots-Roots_P Parameter: Plant Line Value: CS6879 vs. WS
  misc_feature: MA Experiment 20000452 PARAMETER Experiment Name: At_CS6879_Shoots-Roots_P Parameter: Tissue Value: Shoots
  misc_feature: MA Experiment ID: 20000496 Result: Up-regulated in Transcription
  misc_feature: MA Experiment 20000496 PARAMETER Experiment Name: At_Guard_Cells_P Parameter: Harvest Date Value: 7/19/2002
  misc_feature: MA Experiment 20000496 PARAMETER Experiment Name: At_Guard_Cells_P Parameter: Organism Value: Canola
  misc_feature: MA Experiment 20000496 PARAMETER Experiment Name: At_Guard_Cells_P Parameter: Tissue Value: Guard Cells vs. Leaves
  misc_feature: MA Experiment ID: 20001554 Result: Down-regulated in Transcription
  misc_feature: MA Experiment 20001554 PARAMETER Experiment Name: At_Drought_Soil_Dry_P Parameter: Age (day) Value: 21
  misc_feature: MA Experiment 20001554 PARAMETER Experiment Name: At_Drought_Soil_Dry_P Parameter: Organism Value: A. thaliana
  misc_feature: MA Experiment 20001554 PARAMETER Experiment Name: At_Drought_Soil_Dry_P Parameter: Plant Line Value: WS
  misc_feature: MA Experiment 20001554 PARAMETER Experiment Name: At_Drought_Soil_Dry_P Parameter: Post Timepoint (hr) Value: None
  misc_feature: MA Experiment 20001554 PARAMETER Experiment Name: At_Drought_Soil_Dry_P Parameter: Post-Treatment Value: None
  misc_feature: MA Experiment 20001554 PARAMETER Experiment Name: At_Drought_Soil_Dry_P Parameter: Timepoint (day) Value: 7
  misc_feature: MA Experiment 20001554 PARAMETER Experiment Name: At_Drought_Soil_Dry_P Parameter: Treatment Value: Drought vs. No Drought
  misc_feature: MA Experiment ID: 20001556 Result: Down-regulated in Transcription
  misc_feature: MA Experiment 20001556 PARAMETER Experiment Name: At_Drought_Soil_Dry_P Parameter: Age (day) Value: 26
  misc_feature: MA Experiment 20001556 PARAMETER Experiment Name: At_Drought_Soil_Dry_P Parameter: Organism Value: A. thaliana
  misc_feature: MA Experiment 20001556 PARAMETER Experiment Name: At_Drought_Soil_Dry_P Parameter: Plant Line Value: WS
  misc_feature: MA Experiment 20001556 PARAMETER Experiment Name: At_Drought_Soil_Dry_P Parameter: Post Timepoint (hr) Value: None
  misc_feature: MA Experiment 20001556 PARAMETER Experiment Name: At_Drought_Soil_Dry_P Parameter: Post-Treatment Value: None
  misc_feature: MA Experiment 20001556 PARAMETER Experiment Name: At_Drought_Soil_Dry_P Parameter: Timepoint (day) Value: 12
  misc_feature: MA Experiment 20001556 PARAMETER Experiment Name: At_Drought_Soil_Dry_P Parameter: Treatment Value: Drought vs. No Drought
  misc_feature: MA Experiment ID: 20001557 Result: Up-regulated in Transcription
  misc_feature: MA Experiment 20001557 PARAMETER Experiment Name: At_Drought_Soil_Dry_P Parameter: Age (day) Value: 27
  misc_feature: MA Experiment 20001557 PARAMETER Experiment Name: At_Drought_Soil_Dry_P Parameter: Organism Value: A. thaliana
  misc_feature: MA Experiment 20001557 PARAMETER Experiment Name: At_Drought_Soil_Dry_P Parameter: Plant Line Value: WS
  misc_feature: MA Experiment 20001557 PARAMETER Experiment Name: At_Drought_Soil_Dry_P Parameter: Post Timepoint (hr) Value: 3
  misc_feature: MA Experiment 20001557 PARAMETER Experiment Name: At_Drought_Soil_Dry_P Parameter: Post-Treatment Value: Re-Water vs. No Drought
  misc_feature: MA Experiment 20001557 PARAMETER Experiment Name: At_Drought_Soil_Dry_P Parameter: Timepoint (day) Value: 13
  misc_feature: MA Experiment 20001557 PARAMETER Experiment Name: At_Drought_Soil_Dry_P Parameter: Treatment Value: Drought vs. No Drought
  misc_feature: MA Experiment ID: 20001558 Result: Up-regulated in Transcription
  misc_feature: MA Experiment 20001558 PARAMETER Experiment Name: At_Drought_Soil_Dry_P Parameter: Age (day) Value: 27
  misc_feature: MA Experiment 20001558 PARAMETER Experiment Name: At_Drought_Soil_Dry_P Parameter: Organism Value: A. thaliana
  misc_feature: MA Experiment 20001558 PARAMETER Experiment Name: At_Drought_Soil_Dry_P Parameter: Plant Line Value: WS
  misc_feature: MA Experiment 20001558 PARAMETER Experiment Name: At_Drought_Soil_Dry_P Parameter: Post Timepoint (hr) Value: 6
  misc_feature: MA Experiment 20001558 PARAMETER Experiment Name: At_Drought_Soil_Dry_P Parameter: Post-Treatment Value: Re-Water vs. No Drought
  misc_feature: MA Experiment 20001558 PARAMETER Experiment Name: At_Drought_Soil_Dry_P Parameter: Timepoint (day) Value: 13
  misc_feature: MA Experiment 20001558 PARAMETER Experiment Name: At_Drought_Soil_Dry_P Parameter: Treatment Value: Drought vs. No Drought
  misc_feature: MA Experiment ID: 20001560 Result: Up-regulated in Transcription
  misc_feature: MA Experiment 20001560 PARAMETER Experiment Name: At_Drought_Soil_Dry_P Parameter: Age (day) Value: 28
  misc_feature: MA Experiment 20001560 PARAMETER Experiment Name: At_Drought_Soil_Dry_P Parameter: Organism Value: A. thaliana
  misc_feature: MA Experiment 20001560 PARAMETER Experiment Name: At_Drought_Soil_Dry_P Parameter: Plant Line Value: WS
  misc_feature: MA Experiment 20001560 PARAMETER Experiment Name: At_Drought_Soil_Dry_P Parameter: Post Timepoint (hr) Value: None
  misc_feature: MA Experiment 20001560 PARAMETER Experiment Name: At_Drought_Soil_Dry_P Parameter: Post-Treatment Value: None
  misc_feature: MA Experiment 20001560 PARAMETER Experiment Name: At_Drought_Soil_Dry_P Parameter: Timepoint (day) Value: 14
  misc_feature: MA Experiment 20001560 PARAMETER Experiment Name: At_Drought_Soil_Dry_P Parameter: Treatment Value: Drought vs. No Drought
  misc_feature: MA Experiment ID: 20001910 Result: Down-regulated in Transcription
  misc_feature: MA Experiment 20001910 PARAMETER Experiment Name: At_Drought_Reproduction_P Parameter: Age (day) Value: 37
  misc_feature: MA Experiment 20001910 PARAMETER Experiment Name: At_Drought_Reproduction_P Parameter: Organism Value: A. thaliana
  misc_feature: MA Experiment 20001910 PARAMETER Experiment Name: At_Drought_Reproduction_P Parameter: Plant Line Value: WS
  misc_feature: MA Experiment 20001910 PARAMETER Experiment Name: At_Drought_Reproduction_P Parameter: Timepoint (day) Value: 7
  misc_feature: MA Experiment 20001910 PARAMETER Experiment Name: At_Drought_Reproduction_P Parameter: Tissue Value: Flowers
  misc_feature: MA Experiment 20001910 PARAMETER Experiment Name: At_Drought_Reproduction_P Parameter: Treatment Value: Drought vs. No Drought
  misc_feature: MA Experiment ID: 20001911 Result: Down-regulated in Transcription
  misc_feature: MA Experiment 20001911 PARAMETER Experiment Name: At_Drought_Reproduction_P Parameter: Age (day) Value: 40
  misc_feature: MA Experiment 20001911 PARAMETER Experiment Name: At_Drought_Reproduction_P Parameter: Organism Value: A. thaliana
  misc_feature: MA Experiment 20001911 PARAMETER Experiment Name: At_Drought_Reproduction_P Parameter: Plant Line Value: WS
  misc_feature: MA Experiment 20001911 PARAMETER Experiment Name: At_Drought_Reproduction_P Parameter: Timepoint (day) Value: 10
  misc_feature: MA Experiment 20001911 PARAMETER Experiment Name: At_Drought_Reproduction_P Parameter: Tissue Value: Flowers
  misc_feature: MA Experiment 20001911 PARAMETER Experiment Name: At_Drought_Reproduction_P Parameter: Treatment Value: Drought vs. No Drought
atctcacatcacaattcacatctcctcgaacaaacaaattataaacccattttccttcataaatttctaaaataaaaccccttaaactttcattcacatcatccaacccccaatgggtcgaatcttgaaccgtaccgtgttaatgactcttctagtcgtaacaatggccggaacagcattctccggtagcttcaacgaagagtttgacttaacttggggtgaacacagaggcaaaatcttcagtggaggaaaaatgttgtcactctcactagaccgggtttccgggtcgggttttaaatccaagaaagaatatttgttcggaagaatcgacatgcagcttaaactcgtcgccggtaactccgctggaaccgtcactgcctactacttgtcatcggaaggaccaacacacgacgagatagactttgagtttcttggtaatgaaacagggaagccttatgttcttcacactaatgtatttgctcaaggcaaaggaaacagagaacaacagttttatctctggtttgatccaaccaagaacttccacacttattctcttgtctggagaccacaacacatcatatttatggtagataatgttccaatcagagtattcaacaatgcagagcaacttggtgttccatttcccaagaaccaaccaatgaagatatactcgagtttatggaatgcagatgattgggctacaagaggtggtttggttaagacagattggtctaaagctcctttcacagcttactacagaggctttaacgctgcagcttgtactgtttcttcagggtcatctttctgtgatcctaagtttaagagttcttttactaatggtgaatctcaagtggctaatgagcttaatgcttatgggagaagaagattaagatgggttcagaagtattttatgatttatgattattgttctgatttaaaaaggtttcctcaaggattcccaccagagtgtaggaagtctagagtctaaaaaccaatgattctctctttgttgttgtttagtgcaaattaaattctctttgttgtttctttaataaattgatttgatttttcttc

SEQ ID NO: 78967 - protein, 291 aa, Arabidopsis thaliana
  peptide (1)..(291): Ceres Seq. ID no. 12647556
  misc_feature (27)..(208): Pfam Name: Glycosyl hydrolases family 16 Pfam Description: Glycosyl hydrolases family 16
  misc_feature (1)..(291): Homolog of NCBI NO: 18403867 NR Description: xyloglucan endotransglycosylase, putative; id: At3g23730.1, supported by cDNA: 10852. [Arabidopsis thaliana]
  misc_feature (1)..(291): Homolog of NCBI NO: 21536689 NR Description: xyloglucan endotransglycosylase, putative
  misc_feature (8)..(291): Homolog of NCBI NO: 38605153 NR Description: Probable xyloglucan
  misc_feature (8)..(291): Homolog of NCBI NO: 15236412 NR Description: xyloglucan endotransglycosylase (XTR7); protein At4g14130.1, supported by cDNA: 33554., supported by cDNA: supported by cDNA: gi_15028016 [Arabidopsis thaliana]
  misc_feature (9)..(288): Homolog of NCBI NO: 543905 NR Description: Brassinosteroid-regulated protein BRU1 precursor
  misc_feature (8)..(286): Homolog of NCBI NO: 8886867 NR Description: xyloglucan endotransglycosylase XET2 [Asparagus
  misc_feature (9)..(286): Homolog of NCBI NO: 22947852 NR Description: xyloglucan endotransglycosylase [Malus x
MGRILNRTVLMTLLVVTMAGTAFSGSFNEEFDLTWGEHRGKIFSGGKMLSLSLDRVSGSGFKSKKEYLFGRIDMQLKLVAGNSAGTVTAYYLSSEGPTHDEIDFEFLGNETGKPYVLHTNVFAQGKGNREQQFYLWFDPTKNFHTYSLVWRPQHIIFMVDNVPIRVFNNAEQLGVPFPKNQPMKIYSSLWNADDWATRGGLVKTDWSKAPFTAYYRGFNAAACTVSSGSSFCDPKFKSSFTNGESQVANELNAYGRRRLRWVQKYFMIYDYCSDLKRFPQGFPPECRKSRV

SEQ ID NO: 78968 - protein, 281 aa, Arabidopsis thaliana
  peptide (1)..(281): Ceres Seq. ID no. 12647557
  misc_feature (17)..(198): Pfam Name: Glycosyl hydrolases family 16 Pfam Description: Glycosyl hydrolases family 16
  misc_feature (1)..(281): Homolog of NCBI NO: 18403867 NR Description: xyloglucan endotransglycosylase, putative; id: At3g23730.1, supported by cDNA: 10852. [Arabidopsis thaliana]
  misc_feature (1)..(281): Homolog of NCBI NO: 21536689 NR Description: xyloglucan endotransglycosylase, putative
  misc_feature (1)..(281): Homolog of NCBI NO: 38605153 NR Description: Probable xyloglucan
  misc_feature (1)..(281): Homolog of NCBI NO: 15236412 NR Description: xyloglucan endotransglycosylase (XTR7); protein At4g14130.1, supported by cDNA: 33554., supported by cDNA: supported by cDNA: gi_15028016 [Arabidopsis thaliana]
  misc_feature (1)..(278): Homolog of NCBI NO: 543905 NR Description: Brassinosteroid-regulated protein BRU1 precursor
  misc_feature (1)..(276): Homolog of NCBI NO: 8886867 NR Description: xyloglucan endotransglycosylase XET2 [Asparagus
  misc_feature (1)..(276): Homolog of NCBI NO: 22947852 NR Description: xyloglucan endotransglycosylase [Malus x
MTLLVVTMAGTAFSGSFNEEFDLTWGEHRGKIFSGGKMLSLSLDRVSGSGFKSKKEYLFGRIDMQLKLVAGNSAGTVTAYYLSSEGPTHDEIDFEFLGNETGKPYVLHTNVFAQGKGNREQQFYLWFDPTKNFHTYSLVWRPQHIIFMVDNVPIRVFNNAEQLGVPFPKNQPMKIYSSLWNADDWATRGGLVKTDWSKAPFTAYYRGFNAAACTVSSGSSFCDPKFKSSFTNGESQVANELNAYGRRRLRWVQKYFMIYDYCSDLKRFPQGFPPECRKSRV

SEQ ID NO: 78969 - protein, 274 aa, Arabidopsis thaliana
  peptide (1)..(274): Ceres Seq. ID no. 12647558
  misc_feature (10)..(191): Pfam Name: Glycosyl hydrolases family 16 Pfam Description: Glycosyl hydrolases family 16
  misc_feature (1)..(274): Homolog of NCBI NO: 18403867 NR Description: xyloglucan endotransglycosylase, putative; id: At3g23730.1, supported by cDNA: 10852. [Arabidopsis thaliana]
  misc_feature (1)..(274): Homolog of NCBI NO: 21536689 NR Description: xyloglucan endotransglycosylase, putative
  misc_feature (1)..(274): Homolog of NCBI NO: 38605153 NR Description: Probable xyloglucan
  misc_feature (1)..(274): Homolog of NCBI NO: 15236412 NR Description: xyloglucan endotransglycosylase (XTR7); protein At4g14130.1, supported by cDNA: 33554., supported by cDNA: supported by cDNA: gi_15028016 [Arabidopsis thaliana]
  misc_feature (1)..(271): Homolog of NCBI NO: 543905 NR Description: Brassinosteroid-regulated protein BRU1 precursor
  misc_feature (1)..(269): Homolog of NCBI NO: 8886867 NR Description: xyloglucan endotransglycosylase XET2 [Asparagus
  misc_feature (1)..(269): Homolog of NCBI NO: 22947852 NR Description: xyloglucan endotransglycosylase [Malus x
MAGTAFSGSFNEEFDLTWGEHRGKIFSGGKMLSLSLDRVSGSGFKSKKEYLFGRIDMQLKLVAGNSAGTVTAYYLSSEGPTHDEIDFEFLGNETGKPYVLHTNVFAQGKGNREQQFYLWFDPTKNFHTYSLVWRPQHIIFMVDNVPIRVFNNAEQLGVPFPKNQPMKIYSSLWNADDWATRGGLVKTDWSKAPFTAYYRGFNAAACTVSSGSSFCDPKFKSSFTNGESQVANELNAYGRRRLRWVQKYFMIYDYCSDLKRFPQGFPPECRKSRV

SEQ ID NO: 78970 - DNA, 1175 bp, Arabidopsis thaliana
  misc_feature (1)..(1175): Ceres Seq. ID no. 12647593
  misc_feature: MA Experiment ID: 108434 Result: Down-regulated in Transcription
  misc_feature: MA Experiment 108434 PARAMETER Experiment Name: At_Root_Tips_cDNA_P Parameter: Tissue Value: Root Tips
  misc_feature: MA Experiment ID: 108488 Result: Down-regulated in Transcription
  misc_feature: MA Experiment ID: 20000111 Result: Down-regulated in Transcription
  misc_feature: MA Experiment 20000111 PARAMETER Experiment Name: At_42deg_Heat_cDNA_P Parameter: Temperature (deg C) Value: 42 vs. 22
  misc_feature: MA Experiment 20000111 PARAMETER Experiment Name: At_42deg_Heat_cDNA_P Parameter: Timepoint (hr) Value: 6
  misc_feature: MA Experiment 20000111 PARAMETER Experiment Name: At_42deg_Heat_cDNA_P Parameter: Tissue Value: Aerial
  misc_feature: MA Experiment ID: 20000112 Result: Down-regulated in Transcription
  misc_feature: MA Experiment 20000112 PARAMETER Experiment Name: At_42deg_Heat_cDNA_P Parameter: Temperature (deg C) Value: 42 vs. 22
  misc_feature: MA Experiment 20000112 PARAMETER Experiment Name: At_42deg_Heat_cDNA_P Parameter: Timepoint (hr) Value: 2
  misc_feature: MA Experiment 20000112 PARAMETER Experiment Name: At_42deg_Heat_cDNA_P Parameter: Tissue Value: Aerial
  misc_feature: MA Experiment ID: 20000113 Result: Down-regulated in Transcription
  misc_feature: MA Experiment 20000113 PARAMETER Experiment Name: At_42deg_Heat_cDNA_P Parameter: Temperature (deg C) Value: 42 vs. 22
  misc_feature: MA Experiment 20000113 PARAMETER Experiment Name: At_42deg_Heat_cDNA_P Parameter: Timepoint (hr) Value: 8
  misc_feature: MA Experiment 20000113 PARAMETER Experiment Name: At_42deg_Heat_cDNA_P Parameter: Tissue Value: Aerial
  misc_feature: MA Experiment ID: 20000144 Result: Down-regulated in Transcription
  misc_feature: MA Experiment 20000144 PARAMETER Experiment Name: At_42deg_Heat_cDNA_P Parameter: Temperature (deg C) Value: 42 vs. 22
  misc_feature: MA Experiment 20000144 PARAMETER Experiment Name: At_42deg_Heat_cDNA_P Parameter: Timepoint (hr) Value: 1
  misc_feature: MA Experiment 20000144 PARAMETER Experiment Name: At_42deg_Heat_cDNA_P Parameter: Tissue Value: Aerial
  misc_feature: MA Experiment ID: 20000171 Result: Down-regulated in Transcription
  misc_feature: MA Experiment 20000171 PARAMETER Experiment Name: At_42deg_Heat_P Parameter: Age (day) Value: 14
  misc_feature: MA Experiment 20000171 PARAMETER Experiment Name: At_42deg_Heat_P Parameter: Organism Value: A. thaliana
  misc_feature: MA Experiment 20000171 PARAMETER Experiment Name: At_42deg_Heat_P Parameter: Plant Line Value: WS
  misc_feature: MA Experiment 20000171 PARAMETER Experiment Name: At_42deg_Heat_P Parameter: Temperature (deg C) Value: 42 vs. 22
  misc_feature: MA Experiment 20000171 PARAMETER Experiment Name: At_42deg_Heat_P Parameter: Timepoint (hr) Value: 1
  misc_feature: MA Experiment 20000171 PARAMETER Experiment Name: At_42deg_Heat_P Parameter: Tissue Value: Aerial
  misc_feature: MA Experiment ID: 20000173 Result: Down-regulated in Transcription
  misc_feature: MA Experiment 20000173 PARAMETER Experiment Name: At_42deg_Heat_P Parameter: Age (day) Value: 14
  misc_feature: MA Experiment 20000173 PARAMETER Experiment Name: At_42deg_Heat_P Parameter: Organism Value: A. thaliana
  misc_feature: MA Experiment 20000173 PARAMETER Experiment Name: At_42deg_Heat_P Parameter: Plant Line Value: WS
  misc_feature: MA Experiment 20000173 PARAMETER Experiment Name: At_42deg_Heat_P Parameter: Temperature (deg C) Value: 42 vs. 22
  misc_feature: MA Experiment 20000173 PARAMETER Experiment Name: At_42deg_Heat_P Parameter: Timepoint (hr) Value: 6
  misc_feature: MA Experiment 20000173 PARAMETER Experiment Name: At_42deg_Heat_P Parameter: Tissue Value: Aerial
  misc_feature: MA Experiment ID: 20000265 Result: Down-regulated in Transcription
  misc_feature: MA Experiment 20000265 PARAMETER Experiment Name: At_Open_Flower_P Parameter: Age (day) Value: 21
  misc_feature: MA Experiment 20000265 PARAMETER Experiment Name: At_Open_Flower_P Parameter: Plant Line Value: WS
  misc_feature: MA Experiment 20000265 PARAMETER Experiment Name: At_Open_Flower_P Parameter: Tissue Value: Closed Flower vs. Whole Plant
  misc_feature: MA Experiment ID: 20000496 Result: Up-regulated in Transcription
  misc_feature: MA Experiment 20000496 PARAMETER Experiment Name: At_Guard_Cells_P Parameter: Harvest Date Value: 7/19/2002
  misc_feature: MA Experiment 20000496 PARAMETER Experiment Name: At_Guard_Cells_P Parameter: Organism Value: Canola
  misc_feature: MA Experiment 20000496 PARAMETER Experiment Name: At_Guard_Cells_P Parameter: Tissue Value: Guard Cells vs. Leaves
ttttcgaaattaaagaaaaccctaaacgccgttgtctgatattgagagagagagagagattaaaaacttcttctggttccttttatcaacattttttctctctcttaaaacttcgaagcgatttttgatttacagactatggaaatggaatcattcatggacgaccttttgaacttctctgtaccggaagaggaagaagacgacgacgaacatacgcaaccaccgaggaatattactcgccggaaaactggattacggccaacagactccttcggtctctttaataccgacgaccttggagtggttgaagaagaggatttggaatggatttcaaacaaaaatgcttttccggtgattgaaacattcgtcggtgtattaccgtcggagcattttcctataacgtctcttctggaaagagaagcgactgaggtaaaacagctgagtccggtttcagtacttgagacgagtagccatagctccacaacgactacctcaaacagtagcggcggaagtaacggaagcacggccgtggctacgaccaccaccactccaacaataatgagctgttgcgttggttttaaagcgccggctaaagcgagaagcaagcgtcgtcgtacaggacgccgtgatttacgagttttgtggacaggaaacgagcaaggaggaatacagaagaagaagacgatgactgtggcggcggctgcgttgattatgggaaggaagtgtcaacactgtggagcggagaagactccgcaatggagggcaggaccagcggggcctaagactctgtgtaacgcttgtggcgtgaggtataagtccgggaggctagttccggagtatcgtccagcgaacagtccaactttcacggcggagttacattcgaattctcaccggaagattgtagagatgaggaagcagtatcagtccggtgacggtgacggtgatcggaaagattgtggataaaaagtgattaggattaatttttattttttcggagaaactttttttttttttttttcgtttaatttctctttatttgtttttaaagtctgttttagggttttgcagttggaatttaggtttttaattttttgcttatcttttttatttgtgaaattagtggtaattacttatttagggaatattatggtcatggaatggaagataactttctc

SEQ ID NO: 78971 - protein, 274 aa, Arabidopsis thaliana; identical to SEQ ID NO: 23687
  peptide (1)..(274): Ceres Seq. ID no. 12647594
  misc_feature (1)..(274): Homolog of NCBI NO: 15229571 NR Description: GATA transcription factor 1 (AtGATA-1); protein
  misc_feature (7)..(274): Homolog of NCBI NO: 21593190 NR Description: GATA transcription factor 1 (AtGATA-1)
  misc_feature (8)..(274): Homolog of NCBI NO: 37572445 NR Description: AG-motif binding protein-2 [Nicotiana tabacum]
  misc_feature (7)..(266): Homolog of NCBI NO: 15230393 NR Description: GATA zinc finger protein; protein id: supported by cDNA: gi_17381183 [Arabidopsis thaliana]
  misc_feature (148)..(269): Homolog of NCBI NO: 7484970 NR Description: GATA-binding transcription factor homolog 3
  misc_feature (148)..(269): Homolog of NCBI NO: 20466648 NR Description: GATA transcription factor 3 [Arabidopsis >gi|22136458|gb|AAM91307.1| GATA transcription factor 3
  misc_feature (148)..(269): Homolog of NCBI NO: 15236172 NR Description: GATA transcription factor 3; protein id: supported by cDNA: gi_20466647 [Arabidopsis thaliana]
  misc_feature (1)..(260): Homolog of NCBI NO: 15223086 NR Description: GATA zinc finger protein; protein id: At1g08010.1
  misc_feature (168)..(265): Homolog of NCBI NO: 37572449 NR Description: AG-motif binding protein-4 [Nicotiana tabacum]
  misc_feature (99)..(260): Homolog of NCBI NO: 8778844 NR Description: T6D22.9 [Arabidopsis thaliana]

SEQ ID NO: 78972 - protein, 272 aa, Arabidopsis thaliana; identical to SEQ ID NO: 23688
  peptide (1)..(272): Ceres Seq. ID no. 12647595
  misc_feature (1)..(272): Homolog of NCBI NO: 15229571 NR Description: GATA transcription factor 1 (AtGATA-1); protein
  misc_feature (5)..(272): Homolog of NCBI NO: 21593190 NR Description: GATA transcription factor 1 (AtGATA-1)
  misc_feature (6)..(272): Homolog of NCBI NO: 37572445 NR Description: AG-motif binding protein-2 [Nicotiana tabacum]
  misc_feature (5)..(264): Homolog of NCBI NO: 15230393 NR Description: GATA zinc finger protein; protein id: supported by cDNA: gi_17381183 [Arabidopsis thaliana]
  misc_feature (146)..(267): Homolog of NCBI NO: 7484970 NR Description: GATA-binding transcription factor homolog 3
  misc_feature (146)..(267): Homolog of NCBI NO: 15236172 NR Description: GATA transcription factor 3; protein id: supported by cDNA: gi_20466647 [Arabidopsis thaliana]
  misc_feature (146)..(267): Homolog of NCBI NO: 20466648 NR Description: GATA transcription factor 3 [Arabidopsis >gi|22136458|gb|AAM91307.1| GATA transcription factor 3
  misc_feature (1)..(258): Homolog of NCBI NO: 15223086 NR Description: GATA zinc finger protein; protein id: At1g08010.1
  misc_feature (166)..(263): Homolog of NCBI NO: 37572449 NR Description: AG-motif binding protein-4 [Nicotiana tabacum]
  misc_feature (97)..(258): Homolog of NCBI NO: 8778844 NR Description: T6D22.9 [Arabidopsis thaliana]

SEQ ID NO: 78973 - protein, 268 aa, Arabidopsis thaliana; identical to SEQ ID NO: 23689
  peptide (1)..(268): Ceres Seq. ID no. 12647596
  misc_feature (1)..(268): Homolog of NCBI NO: 15229571 NR Description: GATA transcription factor 1 (AtGATA-1); protein
  misc_feature (1)..(268): Homolog of NCBI NO: 21593190 NR Description: GATA transcription factor 1 (AtGATA-1)
  misc_feature (2)..(268): Homolog of NCBI NO: 37572445 NR Description: AG-motif binding protein-2 [Nicotiana tabacum]
  misc_feature (1)..(260): Homolog of NCBI NO: 15230393 NR Description: GATA zinc finger protein; protein id: supported by cDNA: gi_17381183 [Arabidopsis thaliana]
  misc_feature (142)..(263): Homolog of NCBI NO: 7484970 NR Description: GATA-binding transcription factor homolog 3
  misc_feature (142)..(263): Homolog of NCBI NO: 20466648 NR Description: GATA transcription factor 3 [Arabidopsis >gi|22136458|gb|AAM91307.1| GATA transcription factor 3
  misc_feature (142)..(263): Homolog of NCBI NO: 15236172 NR Description: GATA transcription factor 3; protein id: supported by cDNA: gi_20466647 [Arabidopsis thaliana]
  misc_feature (1)..(254): Homolog of NCBI NO: 15223086 NR Description: GATA zinc finger protein; protein id: At1g08010.1
  misc_feature (162)..(259): Homolog of NCBI NO: 37572449 NR Description: AG-motif binding protein-4 [Nicotiana tabacum]
  misc_feature (93)..(254): Homolog of NCBI NO: 8778844 NR Description: T6D22.9 [Arabidopsis thaliana]

SEQ ID NO: 78974 - DNA, 1482 bp, Arabidopsis thaliana
  misc_feature (1)..(1482): Ceres Seq. ID no. 12647645
  misc_feature: MA Experiment ID: 20000307 Result: Up-regulated in Transcription
  misc_feature: MA Experiment 20000307 PARAMETER Experiment Name: At_Germinating_Seeds_Sub_P Parameter: Age (hr) Value: 24 vs. 0
  misc_feature: MA Experiment 20000307 PARAMETER Experiment Name: At_Germinating_Seeds_Sub_P Parameter: Organism Value: A. thaliana
  misc_feature: MA Experiment 20000307 PARAMETER Experiment Name: At_Germinating_Seeds_Sub_P Parameter: Plant Line Value: WS
  misc_feature: MA Experiment 20000307 PARAMETER Experiment Name: At_Germinating_Seeds_Sub_P Parameter: Tissue Value: Germinating Seeds
  misc_feature: MA Experiment ID: 20000315 Result: Down-regulated in Transcription
  misc_feature: MA Experiment 20000315 PARAMETER Experiment Name: At_14day_Shoots-Roots_Sub_P Parameter: Age (day) Value: 14
  misc_feature: MA Experiment 20000315 PARAMETER Experiment Name: At_14day_Shoots-Roots_Sub_P Parameter: Organism Value: A. thaliana
  misc_feature: MA Experiment 20000315 PARAMETER Experiment Name: At_14day_Shoots-Roots_Sub_P Parameter: Plant Line Value: WS
  misc_feature: MA Experiment 20000315 PARAMETER Experiment Name: At_14day_Shoots-Roots_Sub_P Parameter: Tissue Value: Shoots vs. Whole Plant
  misc_feature: MA Experiment ID: 20000327 Result: Down-regulated in Transcription
  misc_feature: MA Experiment 20000327 PARAMETER Experiment Name: At_42deg_Heat_Sub_P Parameter: Age (day) Value: 14
  misc_feature: MA Experiment 20000327 PARAMETER Experiment Name: At_42deg_Heat_Sub_P Parameter: Organism Value: A. thaliana
  misc_feature: MA Experiment 20000327 PARAMETER Experiment Name: At_42deg_Heat_Sub_P Parameter: Plant Line Value: WS
  misc_feature: MA Experiment 20000327 PARAMETER Experiment Name: At_42deg_Heat_Sub_P Parameter: Temperature (deg C) Value: 42 vs. 22
  misc_feature: MA Experiment 20000327 PARAMETER Experiment Name: At_42deg_Heat_Sub_P Parameter: Timepoint (hr) Value: 1
  misc_feature: MA Experiment 20000327 PARAMETER Experiment Name: At_42deg_Heat_Sub_P Parameter: Tissue Value: Aerial
  misc_feature: MA Experiment ID: 20000328 Result: Down-regulated in Transcription
  misc_feature: MA Experiment 20000328 PARAMETER Experiment Name: At_42deg_Heat_Sub_P Parameter: Age (day) Value: 14
  misc_feature: MA Experiment 20000328 PARAMETER Experiment Name: At_42deg_Heat_Sub_P Parameter: Organism Value: A. thaliana
  misc_feature: MA Experiment 20000328 PARAMETER Experiment Name: At_42deg_Heat_Sub_P Parameter: Plant Line Value: WS
  misc_feature: MA Experiment 20000328 PARAMETER Experiment Name: At_42deg_Heat_Sub_P Parameter: Temperature (deg C) Value: 42 vs. 22
  misc_feature: MA Experiment 20000328 PARAMETER Experiment Name: At_42deg_Heat_Sub_P Parameter: Timepoint (hr) Value: 6
  misc_feature: MA Experiment 20000328 PARAMETER Experiment Name: At_42deg_Heat_Sub_P Parameter: Tissue Value: Aerial
  misc_feature: MA Experiment ID: 20000355 Result: Down-regulated in Transcription
  misc_feature: MA Experiment 20000355 PARAMETER Experiment Name: At_Siliques_Sub_P Parameter: Age (day) Value: 21
  misc_feature: MA Experiment 20000355 PARAMETER Experiment Name: At_Siliques_Sub_P Parameter: Organism Value: A. thaliana
  misc_feature: MA Experiment 20000355 PARAMETER Experiment Name: At_Siliques_Sub_P Parameter: Plant Line Value: WS
  misc_feature: MA Experiment 20000355 PARAMETER Experiment Name: At_Siliques_Sub_P Parameter: Tissue Value: Less Than 5mm Siliques vs. Whole Plant
  misc_feature: MA Experiment ID: 20001807 Result: Down-regulated in Transcription
  misc_feature: MA Experiment 20001807 PARAMETER Experiment Name: At_50mM_NH4NO3_L-to-H_Sub_P Parameter: Timepoint (hr) Value: 6
  misc_feature: MA Experiment 20001807 PARAMETER Experiment Name: At_50mM_NH4NO3_L-to-H_Sub_P Parameter: Tissue Value: Leaf
  misc_feature: MA Experiment 20001807 PARAMETER Experiment Name: At_50mM_NH4NO3_L-to-H_Sub_P Parameter: Treatment Value: 50mM NH4NO3 vs 100mM Mannitol
atggagaacataaccgcgcagctcaaacgaggtatctcaagacaattctcaactggttcgattcgtcgaacattgagccgacagttcacgcgtcagtcatctcttgaccctcgtaggaccaacatgaggtttagtttcggtcgtcagtcttctctcgatccgatcaggaggagtcctgattcttccaagagtgatgacgagccacatatgtcggtaccggagaatctcgattcgacgatgcagcttctctttatggctagcaaaggtgatgtcagaggaatcgaggagcttcttgacgaaggaattgatgttaatagcatcgatcttgatggccggacggcgcttcacatcgccgcttgtgagggacatcttggtgtcgttaaggctcttcttagccggagagctaacattgatgctcgtgatcgatggggaagtacggcggctgctgatgcaaagtactatgggaatttagatgtttacaatctcttgaaggctcgaggagctaaagttccgaaaactaggaagactccgatgactgtgtcgaatccacgagaagttcctgagtatgagcttaatccacttgaggttcaagtcaggaaatctgatggcatctcaaagggagcatatcaagtagctaaatggaatggcacgcgggtttcagtcaaaatacttgataaagatagttactcagacccggaacgcataaacgcatttagacatgaattgacgttgctagaaaaagtccggcatccaaatgttatccagtttgttggagctgtcactcagaatataccgatgatgattgtagtcgagtataatccgaaaggagatttaagtgtatatctccaaaagaaaggacgtctttctccatccaaggcacttagatttgctcttgatattgccagaggcatgaactacctccatgaatgtaaaccagatccaatcattcactgtgatctaaagccaaaaaatattttgctggatagaggagggcaattaaagatctcaggatttggtatgataagattgtcgaaaatttcacaagacaaggcgaaagtagcaaaccacaaagcacatatagatctctctagtaaggagaatgcttcattcacatgcatgaaaactgaatctcttgattactacattgcaccagaggtttataaagacgaaatattcgacctaagggttgatgcacactcctttggtgtcattttatacgagataacagagggagtaccagttttccatccgagacctcctgaagaagttgcgagaatgatgtgcttagaaggaaagagacctgtattcaaaactaagtcaagaagttaccctccagatataaaagagttgatcgagaaatgttggcatccagaagcgggtattagaccgacattctctgaaattattattcgacttgacaaaatagtagcaaattgctctaaacaaggatggtggaaagacacattcaagttcccttggtaa

SEQ ID NO: 78975 - protein, 493 aa, Arabidopsis thaliana
  peptide (1)..(493): Ceres Seq. ID no. 12647646
  misc_feature (1)..(493): Homolog of NCBI NO: 15232181 NR Description: putative protein; protein id: At3g59830.1
  misc_feature (1)..(493): Homolog of NCBI NO: 18700701 NR Description: ankyrin-kinase [Medicago truncatula]
  misc_feature (1)..(493): Homolog of NCBI NO: 18700703 NR Description: putative ankyrin-kinase [Medicago sativa]
  misc_feature (1)..(493): Homolog of NCBI NO: 15225139 NR Description: putative protein kinase; protein id: At2g31800.1
  misc_feature (1)..(364): Homolog of NCBI NO: 30689517 NR Description: protein kinase -related [Arabidopsis thaliana]
  misc_feature (1)..(353): Homolog of NCBI NO: 25408910 NR Description: probable protein kinase [imported] - Arabidopsis >gi|6598341|gb|AAF18591.1| putative protein kinase [Arabidopsis
  misc_feature (18)..(493): Homolog of NCBI NO: 25408910 NR Description: probable protein kinase [imported] - Arabidopsis >gi|6598341|gb|AAF18591.1| putative protein kinase [Arabidopsis
  misc_feature (18)..(493): Homolog of NCBI NO: 30689517 NR Description: protein kinase -related [Arabidopsis thaliana]
  misc_feature (218)..(493): Homolog of NCBI NO: 22652536 NR Description: ankyrin-kinase protein [Arabidopsis thaliana]
  misc_feature (197)..(493): Homolog of NCBI NO: 22652534 NR Description: ankyrin-kinase protein [Arabidopsis thaliana]
MENITAQLKRGISRQFSTGSIRRTLSRQFTRQSSLDPRRTNMRFSFGRQSSLDPIRRSPDSSKSDDEPHMSVPENLDSTMQLLFMASKGDVRGIEELLDEGIDVNSIDLDGRTALHIAACEGHLGVVKALLSRRANIDARDRWGSTAAADAKYYGNLDVYNLLKARGAKVPKTRKTPMTVSNPREVPEYELNPLEVQVRKSDGISKGAYQVAKWNGTRVSVKILDKDSYSDPERINAFRHELTLLEKVRHPNVIQFVGAVTQNIPMMIVVEYNPKGDLSVYLQKKGRLSPSKALRFALDIARGMNYLHECKPDPIIHCDLKPKNILLDRGGQLKISGFGMIRLSKISQDKAKVANHKAHIDLSSKENASFTCMKTESLDYYIAPEVYKDEIFDLRVDAHSFGVILYEITEGVPVFHPRPPEEVARMMCLEGKRPVFKTKSRSYPPDIKELIEKCWHPEAGIRPTFSEIIIRLDKIVANCSKQGWWKDTFKFPW

SEQ ID NO: 78976 - protein, 452 aa, Arabidopsis thaliana
  peptide (1)..(452): Ceres Seq. ID no. 12647647
  misc_feature (1)..(452): Homolog of NCBI NO: 15232181 NR Description: putative protein; protein id: At3g59830.1
  misc_feature (1)..(452): Homolog of NCBI NO: 18700701 NR Description: ankyrin-kinase [Medicago truncatula]
  misc_feature (1)..(452): Homolog of NCBI NO: 18700703 NR Description: putative ankyrin-kinase [Medicago sativa]
  misc_feature (1)..(452): Homolog of NCBI NO: 15225139 NR Description: putative protein kinase; protein id: At2g31800.1
  misc_feature (1)..(323): Homolog of NCBI NO: 30689517 NR Description: protein kinase -related [Arabidopsis thaliana]
  misc_feature (1)..(312): Homolog of NCBI NO: 25408910 NR Description: probable protein kinase [imported] - Arabidopsis >gi|6598341|gb|AAF18591.1| putative protein kinase [Arabidopsis
  misc_feature (1)..(452): Homolog of NCBI NO: 25408910 NR Description: probable protein kinase [imported] - Arabidopsis >gi|6598341|gb|AAF18591.1| putative protein kinase [Arabidopsis
  misc_feature (1)..(452): Homolog of NCBI NO: 30689517 NR Description: protein kinase -related [Arabidopsis thaliana]
  misc_feature (177)..(452): Homolog of NCBI NO: 22652536 NR Description: ankyrin-kinase protein [Arabidopsis thaliana]
  misc_feature (156)..(452): Homolog of NCBI NO: 22652534 NR Description: ankyrin-kinase protein [Arabidopsis thaliana]
MRFSFGRQSSLDPIRRSPDSSKSDDEPHMSVPENLDSTMQLLFMASKGDVRGIEELLDEGIDVNSIDLDGRTALHIAACEGHLGVVKALLSRRANIDARDRWGSTAAADAKYYGNLDVYNLLKARGAKVPKTRKTPMTVSNPREVPEYELNPLEVQVRKSDGISKGAYQVAKWNGTRVSVKILDKDSYSDPERINAFRHELTLLEKVRHPNVIQFVGAVTQNIPMMIVVEYNPKGDLSVYLQKKGRLSPSKALRFALDIARGMNYLHECKPDPIIHCDLKPKNILLDRGGQLKISGFGMIRLSKISQDKAKVANHKAHIDLSSKENASFTCMKTESLDYYIAPEVYKDEIFDLRVDAHSFGVILYEITEGVPVFHPRPPEEVARMMCLEGKRPVFKTKSRSYPPDIKELIEKCWHPEAGIRPTFSEIIIRLDKIVANCSKQGWWKDTFKFPW

SEQ ID NO: 78977 - protein, 424 aa, Arabidopsis thaliana
  peptide (1)..(424): Ceres Seq. ID no. 12647648
  misc_feature (1)..(424): Homolog of NCBI NO: 15232181 NR Description: putative protein; protein id: At3g59830.1
  misc_feature (1)..(424): Homolog of NCBI NO: 18700701 NR Description: ankyrin-kinase [Medicago truncatula]
  misc_feature (1)..(424): Homolog of NCBI NO: 18700703 NR Description: putative ankyrin-kinase [Medicago sativa]
  misc_feature (1)..(424): Homolog of NCBI NO: 15225139 NR Description: putative protein kinase; protein id: At2g31800.1
  misc_feature (1)..(295): Homolog of NCBI NO: 30689517 NR Description: protein kinase -related [Arabidopsis thaliana]
  misc_feature (1)..(284): Homolog of NCBI NO: 25408910 NR Description: probable protein kinase [imported] - Arabidopsis >gi|6598341|gb|AAF18591.1| putative protein kinase [Arabidopsis
  misc_feature (1)..(424): Homolog of NCBI NO: 25408910 NR Description: probable protein kinase [imported] - Arabidopsis >gi|6598341|gb|AAF18591.1| putative protein kinase [Arabidopsis
  misc_feature (1)..(424): Homolog of NCBI NO: 30689517 NR Description: protein kinase -related [Arabidopsis thaliana]
  misc_feature (149)..(424): Homolog of NCBI NO: 22652536 NR Description: ankyrin-kinase protein [Arabidopsis thaliana]
  misc_feature (128)..(424): Homolog of NCBI NO: 22652534 NR Description: ankyrin-kinase protein [Arabidopsis thaliana]
MSVPENLDSTMQLLFMASKGDVRGIEELLDEGIDVNSIDLDGRTALHIAACEGHLGVVKALLSRRANIDARDRWGSTAAADAKYYGNLDVYNLLKARGAKVPKTRKTPMTVSNPREVPEYELNPLEVQVRKSDGISKGAYQVAKWNGTRVSVKILDKDSYSDPERINAFRHELTLLEKVRHPNVIQFVGAVTQNIPMMIVVEYNPKGDLSVYLQKKGRLSPSKALRFALDIARGMNYLHECKPDPIIHCDLKPKNILLDRGGQLKISGFGMIRLSKISQDKAKVANHKAHIDLSSKENASFTCMKTESLDYYIAPEVYKDEIFDLRVDAHSFGVILYEITEGVPVFHPRPPEEVARMMCLEGKRPVFKTKSRSYPPDIKELIEKCWHPEAGIRPTFSEIIIRLDKIVANCSKQGWWKDTFKFPW

SEQ ID NO: 78978 - DNA, 1002 bp, Arabidopsis thaliana
  misc_feature (1)..(1002): Ceres Seq. ID no. 12647669
  misc_feature: MA Experiment ID: 108434 Result: Up-regulated in Transcription
  misc_feature: MA Experiment 108434 PARAMETER Experiment Name: At_Root_Tips_cDNA_P Parameter: Tissue Value: Root Tips
  misc_feature: MA Experiment ID: 108464 Result: Down-regulated in Transcription
  misc_feature: MA Experiment 108464 PARAMETER Experiment Name: At_Germinating_Seeds_cDNA_P Parameter: Age (day) Value: 4 vs. 0
  misc_feature: MA Experiment 108464 PARAMETER Experiment Name: At_Germinating_Seeds_cDNA_P Parameter: Tissue Value: Germinating Seeds
acacacccatagtcgtcttcctcgatcagtctctctctcaaattgcaaaggtttcttcgaggactttggcatactgcaggttttctgattcggaattttaaataaaaatcggtcgtgacgatttaggttgttggagctgtagtgcttaaaaaccctacctttatactgtttagagcagcagtccctccatgtcaggtcttgtggcgttatgcagagctcgagcttctgcttcgtcttctttattcaacagcgttattcgtccagcatttcgcaatttctctacaggttttgctgatacacagaacaaatcattggtagcacaaatgaaagaagagatgctccacatggacatcaactcaatgataggaagttccatgccactaggtatgatgcgtatcggaacaatcatccacaacatcgagatgaacccagggcaaggcgcaaagatggtccgagctgcaggaaccaacgccaagatcctaaaggagcctgctaaagggaaatgcttgataaagcttccgtcaggggacaccaagtggatcaatgccaaatgtcgtgctacgattggcacagtgtcgaacccgtctcatggaacgaagaagctatataaagcaggacagagtaggtggttagggataaggcccaaagttagaggagtggcgatgaatccgtgtgatcatccacacggtggaggtgaaggaaaaagcaaaagtagtggaagcagaggaaggacatcggttagtccgtggggaaaaccgtgtaaaggcggttacaaatcagctagtgtcaagaagaagaagaagcgtttggcagaagcagcagccaaaatgtgatatgggtgaacaagtttcgattttcttcaaacgtttctttcttttaaaaagcctccaatgttatttggttacgttattgaatctgttttttgagagttttttaggcttcatgaaactagaagatctttgatcagttgagaataaatatggttacgtgtttacttttatt

SEQ ID NO: 78979 - protein, 214 aa, Arabidopsis thaliana; identical to SEQ ID NO: 35519
  peptide (1)..(214): Ceres Seq. ID no. 12647670
  misc_feature (57)..(190): Pfam Name: Ribosomal Proteins L2, C-terminal domain Pfam Description: Ribosomal Proteins L2, C-terminal domain
  misc_feature (1)..(214): Homolog of NCBI NO: 18406440 NR Description: Expressed protein; protein id: At2g44065.1, by cDNA: 24003., supported by cDNA: gi_17380713, supported by gi_20259008 [Arabidopsis thaliana] >gi|17380714|gb|AAL36187.1|
  misc_feature (1)..(214): Homolog of NCBI NO: 21592449 NR Description: unknown [Arabidopsis thaliana]
  misc_feature (46)..(214): Homolog of NCBI NO: 1076398 NR Description: ribosomal protein L2 - Arabidopsis thaliana
  misc_feature (18)..(203): Homolog of NCBI NO: 17644114 NR Description: ribosomal protein L2 [Gossypium arboreum]
  misc_feature (5)..(204): Homolog of NCBI NO: 17644112 NR Description: ribosomal protein L2 [Lycopersicon esculentum]
  misc_feature (29)..(204): Homolog of NCBI NO: 17644110 NR Description: ribosomal protein L2 [Zea mays]
  misc_feature (53)..(207): Homolog of NCBI NO: 6094106 NR Description: MITOCHONDRIAL 60S RIBOSOMAL PROTEIN L2
  misc_feature (53)..(207): Homolog of NCBI NO: 7440638 NR Description: probable ribosomal protein L2 [imported] - rice
  misc_feature (53)..(197): Homolog of NCBI NO: 17933116 NR Description: ribosomal protein L2 [Dicentra sp. Qiu 95026]
  misc_feature (53)..(192): Homolog of NCBI NO: 17933118 NR Description: ribosomal protein L2 [Platanus occidentalis]

SEQ ID NO: 78980 - protein, 169 aa, Arabidopsis thaliana; identical to SEQ ID NO: 35520
  peptide (1)..(169): Ceres Seq. ID no. 12647671
  misc_feature (12)..(145): Pfam Name: Ribosomal Proteins L2, C-terminal domain Pfam Description: Ribosomal Proteins L2, C-terminal domain
  misc_feature (1)..(169): Homolog of NCBI NO: 18406440 NR Description: Expressed protein; protein id: At2g44065.1, by cDNA: 24003., supported by cDNA: gi_17380713, supported by gi_20259008 [Arabidopsis thaliana] >gi|17380714|gb|AAL36187.1|
  misc_feature (1)..(169): Homolog of NCBI NO: 21592449 NR Description: unknown [Arabidopsis thaliana]
  misc_feature (1)..(169): Homolog of NCBI NO: 1076398 NR Description: ribosomal protein L2 - Arabidopsis thaliana
  misc_feature (1)..(158): Homolog of NCBI NO: 17644114 NR Description: ribosomal protein L2 [Gossypium arboreum]
  misc_feature (1)..(159): Homolog of NCBI NO: 17644112 NR Description: ribosomal protein L2 [Lycopersicon esculentum]
  misc_feature (1)..(159): Homolog of NCBI NO: 17644110 NR Description: ribosomal protein L2 [Zea mays]
  misc_feature (8)..(162): Homolog of NCBI NO: 6094106 NR Description: MITOCHONDRIAL 60S RIBOSOMAL PROTEIN L2
  misc_feature (8)..(162): Homolog of NCBI NO: 7440638 NR Description: probable ribosomal protein L2 [imported] - rice
  misc_feature (8)..(152): Homolog of NCBI NO: 17933116 NR Description: ribosomal protein L2 [Dicentra sp. Qiu 95026]
  misc_feature (8)..(147): Homolog of NCBI NO: 17933118 NR Description: ribosomal protein L2 [Platanus occidentalis]

SEQ ID NO: 78981 - protein, 165 aa, Arabidopsis thaliana; identical to SEQ ID NO: 35521
  peptide (1)..(165): Ceres Seq. ID no. 12647672
  misc_feature (8)..(141): Pfam Name: Ribosomal Proteins L2, C-terminal domain Pfam Description: Ribosomal Proteins L2, C-terminal domain
  misc_feature (1)..(165): Homolog of NCBI NO: 18406440 NR Description: Expressed protein; protein id: At2g44065.1, by cDNA: 24003., supported by cDNA: gi_17380713, supported by gi_20259008 [Arabidopsis thaliana] >gi|17380714|gb|AAL36187.1|
  misc_feature (1)..(165): Homolog of NCBI NO: 21592449 NR Description: unknown [Arabidopsis thaliana]
  misc_feature (1)..(165): Homolog of NCBI NO: 1076398 NR Description: ribosomal protein L2 - Arabidopsis thaliana
  misc_feature (1)..(154): Homolog of NCBI NO: 17644114 NR Description: ribosomal protein L2 [Gossypium arboreum]
  misc_feature (1)..(155): Homolog of NCBI NO: 17644112 NR Description: ribosomal protein L2 [Lycopersicon esculentum]
  misc_feature (1)..(155): Homolog of NCBI NO: 17644110 NR Description: ribosomal protein L2 [Zea mays]
  misc_feature (4)..(158): Homolog of NCBI NO: 6094106 NR Description: MITOCHONDRIAL 60S RIBOSOMAL PROTEIN L2
  misc_feature (4)..(158): Homolog of NCBI NO: 7440638 NR Description: probable ribosomal protein L2 [imported] - rice
  misc_feature (4)..(148): Homolog of NCBI NO: 17933116 NR Description: ribosomal protein L2 [Dicentra sp. Qiu 95026]
  misc_feature (4)..(143): Homolog of NCBI NO: 17933118 NR Description: ribosomal protein L2 [Platanus occidentalis]

SEQ ID NO: 78982 - DNA, 1217 bp, Arabidopsis thaliana
  misc_feature (1)..(1217): Ceres Seq. ID no. 12647675
  misc_feature: MA Experiment ID: 20000179 Result: Up-regulated in Transcription
  misc_feature: MA Experiment 20000179 PARAMETER Experiment Name: At_Germinating_Seeds_P Parameter: Age (hr) Value: 6 vs. 0
  misc_feature: MA Experiment 20000179 PARAMETER Experiment Name: At_Germinating_Seeds_P Parameter: Tissue Value: Germinating Seeds
  misc_feature: MA Experiment ID: 20000180 Result: Up-regulated in Transcription
  misc_feature: MA Experiment 20000180 PARAMETER Experiment Name: At_Germinating_Seeds_P Parameter: Age (hr) Value: 24 vs. 0
  misc_feature: MA Experiment 20000180 PARAMETER Experiment Name: At_Germinating_Seeds_P Parameter: Tissue Value: Germinating Seeds
  misc_feature: MA Experiment ID: 20000227 Result: Up-regulated in Transcription
  misc_feature: MA Experiment 20000227 PARAMETER Experiment Name: At_Root-Tips-vs-Tops_P Parameter: Tissue Value: Root Tips vs. Root Tops
  misc_feature: MA Experiment ID: 20000794 Result: Down-regulated in Transcription
  misc_feature: MA Experiment 20000794 PARAMETER Experiment Name: At_Petals_P Parameter: Age (day) Value: 23-25 days
  misc_feature: MA Experiment 20000794 PARAMETER Experiment Name: At_Petals_P Parameter: Plant Line Value: WS
  misc_feature: MA Experiment 20000794 PARAMETER Experiment Name: At_Petals_P Parameter: Tissue Value: Petals vs. Whole plant
  misc_feature: MA Experiment ID: 20001558 Result: Down-regulated in Transcription
  misc_feature: MA Experiment 20001558 PARAMETER Experiment Name: At_Drought_Soil_Dry_P Parameter: Age (day) Value: 27
  misc_feature: MA Experiment 20001558 PARAMETER Experiment Name: At_Drought_Soil_Dry_P Parameter: Organism Value: A. thaliana
  misc_feature: MA Experiment 20001558 PARAMETER Experiment Name: At_Drought_Soil_Dry_P Parameter: Plant Line Value: WS
  misc_feature: MA Experiment 20001558 PARAMETER Experiment Name: At_Drought_Soil_Dry_P Parameter: Post Timepoint (hr) Value: 6
  misc_feature: MA Experiment 20001558 PARAMETER Experiment Name: At_Drought_Soil_Dry_P Parameter: Post-Treatment Value: Re-Water vs. No Drought
  misc_feature: MA Experiment 20001558 PARAMETER Experiment Name: At_Drought_Soil_Dry_P Parameter: Timepoint (day) Value: 13
  misc_feature: MA Experiment 20001558 PARAMETER Experiment Name: At_Drought_Soil_Dry_P Parameter: Treatment Value: Drought vs. No Drought
aatctataatcattttgtgactcttggagcactctcttctctttgtctctgtgactcacattcatccaatccaggaggcatgtcgacatctgaggataaaccggaaatcatcagtagagtagttcatcaggagggtgacgtggaaatcgtcgatagaagtcagaaggataaggacgaggaaaaagaagaagggaaaggtggattcctcgataaggtgaaagatttcattcatgacattggtgagaaactcgagggaaccattggctttgggaagccaactgctgatgtctctgcgattcatatccctaagatcaatcttgagagggcagatattgttgtggatgtgcttgtcaagaacccgaatccagttcctatccctctcatcgatgtcaactacctggtcgagagcgatgggaggaaactggtttctggtttgatcccggatgctggaacactcaaggctcatggagaagaaactgtgaagataccattgacgttgatctatgatgacatcaagagcacttacaacgatatcaaccccgggatgatcataccttacagaatcaaggttgatctgattgtggatgtgccagtattgggaagactgacattgccgctggagaaatgtggagagatcccaattccaaagaaacctgatgttgatatcgagaagattaagttccagaagttctctttggaggaaaccgtggcgattctccatgtgaggcttcagaacatgaatgatttcgacttggggctcaatgacttggactgtgaagtttggctgtgtgatgtaagcattgggaaagcagagatcgcggactcgatcaagcttgacaaaaacggaagcggattgattaatgtgccgatgacattccgaccaaaggactttggttctgcgctttgggatatgattcgtggtaaaggaacagggtacacaatcaaaggtaatattgatgttgatacaccatttggagctatgaagcttcctattatcaaggaaggtggagagacccgtctgaagaaggaagatgatgatgacgacgatgaggaataaggaaacaaagtgctgcagagacagaatggtcatagttactaaatctccgatcttgaaatgtctatttaaaattaaaaaaaaagaaagacttgttttgtgtgctttttgataactgatggatcagacttttgaatagagccgtctttttattggacttctt

SEQ ID NO: 78983 - protein, 351 aa, Arabidopsis thaliana
  peptide (1)..(351): Ceres Seq. ID no. 12647676
  misc_feature (66)..(221): Pfam Name: Late embryogenesis abundant protein Pfam Description: Late embryogenesis abundant protein
  misc_feature (27)..(351): Homolog of NCBI NO: 15224810 NR Description: similar to late embryogenesis abundant proteins; id: At2g44060.1, supported by cDNA: 2450. [Arabidopsis thaliana]
  misc_feature (27)..(350): Homolog of NCBI NO: 21592483 NR Description: similar to late embryogenesis abundant proteins
  misc_feature (95)..(351): Homolog of NCBI NO: 3264769 NR Description: late embryogenesis-like protein [Prunus armeniaca]
  misc_feature (52)..(351): Homolog of NCBI NO: 34394536 NR Description: late embryogenesis abundant proteins-like [Oryza
  misc_feature (68)..(220): Homolog of NCBI NO: 7489028 NR Description: late embryogenesis (Lea)-like protein ER5,
IYNHFVTLGALSSLCLCDSHSSNPGGMSTSEDKPEIISRVVHQEGDVEIVDRSQKDKDEEKEEGKGGFLDKVKDFIHDIGEKLEGTIGFGKPTADVSAIHIPKINLERADIVVDVLVKNPNPVPIPLIDVNYLVESDGRKLVSGLIPDAGTLKAHGEETVKIPLTLIYDDIKSTYNDINPGMIIPYRIKVDLIVDVPVLGRLTLPLEKCGEIPIPKKPDVDIEKIKFQKFSLEETVAILHVRLQNMNDFDLGLNDLDCEVWLCDVSIGKAEIADSIKLDKNGSGLINVPMTFRPKDFGSALWDMIRGKGTGYTIKGNIDVDTPFGAMKLPIIKEGGETRLKKEDDDDDDEE

SEQ ID NO: 78984 - protein, 325 aa, Arabidopsis thaliana
  peptide (1)..(325): Ceres Seq. ID no. 12647677
  misc_feature (40)..(195): Pfam Name: Late embryogenesis abundant protein Pfam Description: Late embryogenesis abundant protein
  misc_feature (1)..(325): Homolog of NCBI NO: 15224810 NR Description: similar to late embryogenesis abundant proteins; id: At2g44060.1, supported by cDNA: 2450. [Arabidopsis thaliana]
  misc_feature (1)..(324): Homolog of NCBI NO: 21592483 NR Description: similar to late embryogenesis abundant proteins
  misc_feature (69)..(325): Homolog of NCBI NO: 3264769 NR Description: late embryogenesis-like protein [Prunus armeniaca]
  misc_feature (26)..(325): Homolog of NCBI NO: 34394536 NR Description: late embryogenesis abundant proteins-like [Oryza
  misc_feature (42)..(194): Homolog of NCBI NO: 7489028 NR Description: late embryogenesis (Lea)-like protein ER5,
MSTSEDKPEIISRVVHQEGDVEIVDRSQKDKDEEKEEGKGGFLDKVKDFIHDIGEKLEGTIGFGKPTADVSAIHIPKINLERADIVVDVLVKNPNPVPIPLIDVNYLVESDGRKLVSGLIPDAGTLKAHGEETVKIPLTLIYDDIKSTYNDINPGMIIPYRIKVDLIVDVPVLGRLTLPLEKCGEIPIPKKPDVDIEKIKFQKFSLEETVAILHVRLQNMNDFDLGLNDLDCEVWLCDVSIGKAEIADSIKLDKNGSGLINVPMTFRPKDFGSALWDMIRGKGTGYTIKGNIDVDTPFGAMKLPIIKEGGETRLKKEDDDDDDEE

SEQ ID NO: 78985 - DNA, 1326 bp, Arabidopsis thaliana
  misc_feature (1)..(1326): Ceres Seq. ID no. 12647678
  misc_feature: MA Experiment ID: 20000306 Result: Up-regulated in Transcription
  misc_feature: MA Experiment 20000306 PARAMETER Experiment Name: At_Germinating_Seeds_Sub_P Parameter: Age (hr) Value: 6 vs. 0
  misc_feature: MA Experiment 20000306 PARAMETER Experiment Name: At_Germinating_Seeds_Sub_P Parameter: Organism Value: A. thaliana
  misc_feature: MA Experiment 20000306 PARAMETER Experiment Name: At_Germinating_Seeds_Sub_P Parameter: Plant Line Value: WS
  misc_feature: MA Experiment 20000306 PARAMETER Experiment Name: At_Germinating_Seeds_Sub_P Parameter: Tissue Value: Germinating Seeds
  misc_feature: MA Experiment ID: 20000307 Result: Up-regulated in Transcription
  misc_feature: MA Experiment 20000307 PARAMETER Experiment Name: At_Germinating_Seeds_Sub_P Parameter: Age (hr) Value: 24 vs. 0
  misc_feature: MA Experiment 20000307 PARAMETER Experiment Name: At_Germinating_Seeds_Sub_P Parameter: Organism Value: A. thaliana
  misc_feature: MA Experiment 20000307 PARAMETER Experiment Name: At_Germinating_Seeds_Sub_P Parameter: Plant Line Value: WS
  misc_feature: MA Experiment 20000307 PARAMETER Experiment Name: At_Germinating_Seeds_Sub_P Parameter: Tissue Value: Germinating Seeds
atggatgaagagtacgaagtcatagttctgggtactggtctcaaggagtgcatccttagtggtcttctctccgtcgatggtcttaaggtacttcacatggacaggaatgactactacggtggagagtcaacttctcttaatctcaatcagctgtggaagaagttcaggggagaagagaaggctcctgctcatttaggttctagcagagactacaatgttgacatgatgccaaagtttatgatggctaacggaaagcttgttcgtgtccttattcatacggatgtgaccaagtacttgtcttttaaagctgttgatggaagctatgtttttgtccaaggcaaggtccaaaaagtgccagcaactcccatggaggccctcaaatctcctcttatgggtatttttgagaaacgtcgagctggaaagtttttcagctatgttcaagaatacgacgagaaggacccaaaaacacatgatggaatggatttgaggagagttacaactaaggatttgattgcgaaattcggtcttaaagaagatactattgactttattggtcatgcagtggcacttcactgtaatgacaatcatctccatcaacctgcctatgatactgtaatgagaatgaagctctacgcagagtcccttgcacgttttcaaggaggttcaccatatatctatcctctctatgggttgggagaattgcctcaggcatttgcacgacttagtgctgtctatggtgggacgtatatgttgaacaaacctgagtgcaaggtagagtttgacgaggagggtaaggtttctggtgttacatctgagggagagactgccaaatgcaagaaagttgtctgcgatccttcttacctaaccaacaaggtcaggaagattggcagggttgctcgggcgattgccattatgagccaccctattccaaacaccaatgattctcagtcggtgcaagtcattctaccccaaaaacaattgggccagtatgtcttctgttgttcatattcacacaacgttgctcccaagggaaagttcatagcatttgtgtcaacagacgctgaaactgataaccctcaaaccgagctccagcctggaatcgaccttcttggtcctgttgatgagctgttcttcgacatctatgatagatatgagcctgtcaacgaacccactttggacaactgcttcatatcaacgagttatgatgctacaacacactttgacacaactgttgttgatgtgttgaacatgtataaattgatcaccggaaaggaactggatctaagtgtggatcttaacgcagctagtgctgcagaggaggaatga

SEQ ID NO: 78986 - protein, 441 aa, Arabidopsis thaliana
  peptide (1)..(441): Ceres Seq. ID no. 12647679
  misc_feature (1)..(434): Pfam Name: GDP dissociation inhibitor Pfam Description: GDP dissociation inhibitor
  misc_feature (1)..(441): Homolog of NCBI NO: 15224814 NR Description: GDP dissociation inhibitor; protein id: supported by cDNA: 29536., supported by cDNA: gi_13605640, by cDNA: gi_15215777, supported by cDNA: gi_1655423, supported by
  misc_feature (1)..(441): Homolog of NCBI NO: 1550740 NR Description: GDP-associated inhibitor [Arabidopsis thaliana]
  misc_feature (1)..(441): Homolog of NCBI NO: 17473582 NR Description: GDP dissociation inhibitor [Arabidopsis thaliana]
  misc_feature (1)..(441): Homolog of NCBI NO: 21592535 NR Description: GDP dissociation inhibitor [Arabidopsis thaliana]
  misc_feature (1)..(440): Homolog of NCBI NO: 15232210 NR Description: Rab GDP dissociation inhibitor; protein id: supported by cDNA: gi_19698844, supported by cDNA: gi_2446980
  misc_feature (1)..(440): Homolog of NCBI NO: 3175990 NR Description: GDP dissociation inhibitor [Cicer arietinum]
  misc_feature (1)..(440): Homolog of NCBI NO: 7489478 NR Description: GDP dissociation inhibitor protein - rice
  misc_feature (1)..(440): Homolog of NCBI NO: 7489133 NR Description: GDP dissociation inhibitor - common tobacco
  misc_feature (1)..(440): Homolog of NCBI NO: 7489479 NR Description: GDP dissociation inhibitor protein - rice
  misc_feature (1)..(441): Homolog of NCBI NO: 33146460 NR Description: putative GDP dissociation inhibitor [Oryza sativa
MDEEYEVIVLGTGLKECILSGLLSVDGLKVLHMDRNDYYGGESTSLNLNQLWKKFRGEEKAPAHLGSSRDYNVDMMPKFMMANGKLVRVLIHTDVTKYLSFKAVDGSYVFVQGKVQKVPATPMEALKSPLMGIFEKRRAGKFFSYVQEYDEKDPKTHDGMDLRRVTTKDLIAKFGLKEDTIDFIGHAVALHCNDNHLHQPAYDTVMRMKLYAESLARFQGGSPYIYPLYGLGELPQAFARLSAVYGGTYMLNKPECKVEFDEEGKVSGVTSEGETAKCKKVVCDPSYLTNKVRKIGRVARAIAIMSHPIPNTNDSQSVQVILPQKQLGQYVFCCSYSHNVAPKGKFIAFVSTDAETDNPQTELQPGIDLLGPVDELFFDIYDRYEPVNEPTLDNCFISTSYDATTHFDTTVVDVLNMYKLITGKELDLSVDLNAASAAEEE

SEQ ID NO: 78987 - protein, 409 aa, Arabidopsis thaliana
  peptide (1)..(409): Ceres Seq. ID no. 12647680
  misc_feature (1)..(402): Pfam Name: GDP dissociation inhibitor Pfam Description: GDP dissociation inhibitor
  misc_feature (1)..(409): Homolog of NCBI NO: 15224814 NR Description: GDP dissociation inhibitor; protein id: supported by cDNA: 29536., supported by cDNA: gi_13605640, by cDNA: gi_15215777, supported by cDNA: gi_1655423, supported by
  misc_feature (1)..(409): Homolog of NCBI NO: 1550740 NR Description: GDP-associated inhibitor [Arabidopsis thaliana]
  misc_feature (1)..(409): Homolog of NCBI NO: 17473582 NR Description: GDP dissociation inhibitor [Arabidopsis thaliana]
  misc_feature (1)..(409): Homolog of NCBI NO: 21592535 NR Description: GDP dissociation inhibitor [Arabidopsis thaliana]
  misc_feature (1)..(408): Homolog of NCBI NO: 15232210 NR Description: Rab GDP dissociation inhibitor; protein id: supported by cDNA: gi_19698844, supported by cDNA: gi_2446980
  misc_feature (1)..(408): Homolog of NCBI NO: 3175990 NR Description: GDP dissociation inhibitor [Cicer arietinum]
  misc_feature (1)..(408): Homolog of NCBI NO: 7489478 NR Description: GDP dissociation inhibitor protein - rice
  misc_feature (1)..(408): Homolog of NCBI NO: 7489133 NR Description: GDP dissociation inhibitor - common tobacco
  misc_feature (1)..(408): Homolog of NCBI NO: 7489479 NR Description: GDP dissociation inhibitor protein - rice
  misc_feature (1)..(409): Homolog of NCBI NO: 33146460 NR Description: putative GDP dissociation inhibitor [Oryza sativa
MDRNDYYGGESTSLNLNQLWKKFRGEEKAPAHLGSSRDYNVDMMPKFMMANGKLVRVLIHTDVTKYLSFKAVDGSYVFVQGKVQKVPATPMEALKSPLMGIFEKRRAGKFFSYVQEYDEKDPKTHDGMDLRRVTTKDLIAKFGLKEDTIDFIGHAVALHCNDNHLHQPAYDTVMRMKLYAESLARFQGGSPYIYPLYGLGELPQAFARLSAVYGGTYMLNKPECKVEFDEEGKVSGVTSEGETAKCKKVVCDPSYLTNKVRKIGRVARAIAIMSHPIPNTNDSQSVQVILPQKQLGQYVFCCSYSHNVAPKGKFIAFVSTDAETDNPQTELQPGIDLLGPVDELFFDIYDRYEPVNEPTLDNCFISTSYDATTHFDTTVVDVLNMYKLITGKELDLSVDLNAASAAEEE

SEQ ID NO: 78988 - protein, 367 aa, Arabidopsis thaliana
  peptide (1)..(367): Ceres Seq. ID no. 12647681
  misc_feature (1)..(360): Pfam Name: GDP dissociation inhibitor Pfam Description: GDP dissociation inhibitor
  misc_feature (1)..(367): Homolog of NCBI NO: 15224814 NR Description: GDP dissociation inhibitor; protein id: supported by cDNA: 29536., supported by cDNA: gi_13605640, by cDNA: gi_15215777, supported by cDNA: gi_1655423, supported by
  misc_feature (1)..(367): Homolog of NCBI NO: 1550740 NR Description: GDP-associated inhibitor [Arabidopsis thaliana]
  misc_feature (1)..(367): Homolog of NCBI NO: 17473582 NR Description: GDP dissociation inhibitor [Arabidopsis thaliana]
  misc_feature (1)..(367): Homolog of NCBI NO: 21592535 NR Description: GDP dissociation inhibitor [Arabidopsis thaliana]
  misc_feature (1)..(366): Homolog of NCBI NO: 15232210 NR Description: Rab GDP dissociation inhibitor; protein id: supported by cDNA: gi_19698844, supported by cDNA: gi_2446980
  misc_feature (1)..(366): Homolog of NCBI NO: 3175990 NR Description: GDP dissociation inhibitor [Cicer arietinum]
  misc_feature (1)..(366): Homolog of NCBI NO: 7489478 NR Description: GDP dissociation inhibitor protein - rice
  misc_feature (1)..(366): Homolog of NCBI NO: 7489133 NR Description: GDP dissociation inhibitor - common tobacco
  misc_feature (1)..(366): Homolog of NCBI NO: 7489479 NR Description: GDP dissociation inhibitor protein - rice
  misc_feature (1)..(367): Homolog of NCBI NO: 33146460 NR Description: putative GDP dissociation inhibitor [Oryza sativa
MMPKFMMANGKLVRVLIHTDVTKYLSFKAVDGSYVFVQGKVQKVPATPMEALKSPLMGIFEKRRAGKFFSYVQEYDEKDPKTHDGMDLRRVTTKDLIAKFGLKEDTIDFIGHAVALHCNDNHLHQPAYDTVMRMKLYAESLARFQGGSPYIYPLYGLGELPQAFARLSAVYGGTYMLNKPECKVEFDEEGKVSGVTSEGETAKCKKVVCDPSYLTNKVRKIGRVARAIAIMSHPIPNTNDSQSVQVILPQKQLGQYVFCCSYSHNVAPKGKFIAFVSTDAETDNPQTELQPGIDLLGPVDELFFDIYDRYEPVNEPTLDNCFISTSYDATTHFDTTVVDVLNMYKLITGKELDLSVDLNAASAAEEE

SEQ ID NO: 78989 - DNA, 2445 bp, Arabidopsis thaliana
  misc_feature (1)..(2445): Ceres Seq. ID no. 12647710
  misc_feature: MA Experiment ID: 20000307 Result: Up-regulated in Transcription
  misc_feature: MA Experiment 20000307 PARAMETER Experiment Name: At_Germinating_Seeds_Sub_P Parameter: Age (hr) Value: 24 vs. 0
  misc_feature: MA Experiment 20000307 PARAMETER Experiment Name: At_Germinating_Seeds_Sub_P Parameter: Organism Value: A. thaliana
  misc_feature: MA Experiment 20000307 PARAMETER Experiment Name: At_Germinating_Seeds_Sub_P Parameter: Plant Line Value: WS
  misc_feature: MA Experiment 20000307 PARAMETER Experiment Name: At_Germinating_Seeds_Sub_P Parameter: Tissue Value: Germinating Seeds
  misc_feature: MA Experiment ID: 20000314 Result: Up-regulated in Transcription
  misc_feature: MA Experiment 20000314 PARAMETER Experiment Name: At_14day_Shoots-Roots_Sub_P Parameter: Age (day) Value: 14
  misc_feature: MA Experiment 20000314 PARAMETER Experiment Name: At_14day_Shoots-Roots_Sub_P Parameter: Organism Value: A. thaliana
  misc_feature: MA Experiment 20000314 PARAMETER Experiment Name: At_14day_Shoots-Roots_Sub_P Parameter: Plant Line Value: WS
  misc_feature: MA Experiment 20000314 PARAMETER Experiment Name: At_14day_Shoots-Roots_Sub_P Parameter: Tissue Value: Roots vs. Whole Plant
  misc_feature: MA Experiment ID: 20000328 Result: Up-regulated in Transcription
  misc_feature: MA Experiment 20000328 PARAMETER Experiment Name: At_42deg_Heat_Sub_P Parameter: Age (day) Value: 14
  misc_feature: MA Experiment 20000328 PARAMETER Experiment Name: At_42deg_Heat_Sub_P Parameter: Organism Value: A. thaliana
  misc_feature: MA Experiment 20000328 PARAMETER Experiment Name: At_42deg_Heat_Sub_P Parameter: Plant Line Value: WS
  misc_feature: MA Experiment 20000328 PARAMETER Experiment Name: At_42deg_Heat_Sub_P Parameter: Temperature (deg C) Value: 42 vs. 22
  misc_feature: MA Experiment 20000328 PARAMETER Experiment Name: At_42deg_Heat_Sub_P Parameter: Timepoint (hr) Value: 6
  misc_feature: MA Experiment 20000328 PARAMETER Experiment Name: At_42deg_Heat_Sub_P Parameter: Tissue Value: Aerial
  misc_feature: MA Experiment ID: 20000329 Result: Up-regulated in Transcription
  misc_feature: MA Experiment 20000329 PARAMETER Experiment Name: At_4deg_Cold_Sub_P Parameter: Age (day) Value: 14
  misc_feature: MA Experiment 20000329 PARAMETER Experiment Name: At_4deg_Cold_Sub_P Parameter: Organism Value: A. thaliana
  misc_feature: MA Experiment 20000329 PARAMETER Experiment Name: At_4deg_Cold_Sub_P Parameter: Plant Line Value: WS
  misc_feature: MA Experiment 20000329 PARAMETER Experiment Name: At_4deg_Cold_Sub_P Parameter: Temperature (deg C) Value: 4 vs. 22
  misc_feature: MA Experiment 20000329 PARAMETER Experiment Name: At_4deg_Cold_Sub_P Parameter: Timepoint (hr) Value: 6
  misc_feature: MA Experiment 20000329 PARAMETER Experiment Name: At_4deg_Cold_Sub_P Parameter: Tissue Value: Aerial
  misc_feature: MA Experiment ID: 20000355 Result: Up-regulated in Transcription
  misc_feature: MA Experiment 20000355 PARAMETER Experiment Name: At_Siliques_Sub_P Parameter: Age (day) Value: 21
  misc_feature: MA Experiment 20000355 PARAMETER Experiment Name: At_Siliques_Sub_P Parameter: Organism Value: A. thaliana
  misc_feature: MA Experiment 20000355 PARAMETER Experiment Name: At_Siliques_Sub_P Parameter: Plant Line Value: WS
  misc_feature: MA Experiment 20000355 PARAMETER Experiment Name: At_Siliques_Sub_P Parameter: Tissue Value: Less Than 5mm Siliques vs. Whole Plant
  misc_feature: MA Experiment ID: 20000440 Result: Up-regulated in Transcription
  misc_feature: MA Experiment 20000440 PARAMETER Experiment Name: At_Closed-Flower__Sub_P Parameter: Tissue Value: Closed Flower vs. Whole Plant
atggaaggttcttcaaattctaactctaggggattcaatacctctggtgtttcagataggaacactgagttcttacctgttgagagactcactactcgttccaagccttcctctcatgttgatgagtatgtcagaagcttgtttggtagtactagcacacacaagtctggtgaagatgattctttagggattgatccttttgttagatccttggaatggggtgatgttagtttgagacagtggctggataaacctgaacgatctgttgatgttttcgagtgcttgcacgttttcagacaaattgttgagattgtgaatgcggctcactctcaaggcattgttgttcataatgtcaggccatcatgttttgtcatgtcttcgtttaaccatgtttcgttcattgaatctgcttcttgttcggactctggctctgattccttggaggatggtccaattagccagaaggaaatcggtagctcgagaagagaggaagctgtatcgaaagctattgcaatagaagagaaaggagtctacaataagttgttggagagaaaaatcgagaaactagaggaagaaaaaacccaaccttttccgatgaaacatatattagcaatggagacaagttggtacacaagccctgaagaggattttggttcttcaagtacttgtgcttcagatgtttaccgccttggcgttcttcttttcgagctattttgccctgtaccttcaagagaagagaagtctagaactatgtctagtcttagacatcgcgttcttccgcctcagatattgctcaaatgtccaaaagaagcttctttctgcttgtggttactgcatcctgagccaacttgtcgaccatcaatgagtgacttgctgcaaagcgagtttataactgaacctagagataatttggaagaacgtgaagcagcaatcgagcttcgggacagaatcgaggaacaggagtcgttactcgagttcttgttactgattcaacagaggaagcaagaatctgcgtatagattgcaggatactgtttcacttctttcttctgacattgagcaagttgtaaagagacagttaattttgaagaaaaggggaagctcactctctgatttcagtaaagatgatcatcaatatacctctggtcagccattgatgagtttccaggcaaacgaggagccatcagcattcttggcctcaagaaaacgggttagacaagggattctggcattggaaaacggtgttgaagttgatgaagagagtcaaggaagcacacttcttgaaagctcccggttgatgagaaacttcaagaaactagaatcggtctactttctgacaaggcgcaggcaaatgaaggctgctgcttcagggaaatcattaactagacattcgccgttaagtagtgaaaatggaagaggttctatgattgtctcagagaaaaatcctttccttgagggtttgtgcagatatttatcattcagtcagctaagagtgaaagctgatttgaaacaaggagatttgttgaactcttctaacctcgtttgcgctcttgcgtttgaccgagaaggagaattattcgccactgcgggagtcaacaagaaaatcaagatattcgaatgtaactccatagtaaacgataaccgggatattcactatccggtggtggaattggctggtcggtcaaagctaagtagtttatgttggaacagctacataaagagccaaattgcatcaagtaactttgatggtgttgttcagatatgggatgttgcaagaagccagttggttacagagatgaaggagcacaagaagcgagtatggtccatcgatatttcatcagcagacccgactttgctggctagcggaagcgatgatggaaccggagttagcattgggaccatcaagacaaaggccaatgtatgctgtgtccagtttccatcagactccggacggtctctagcatttggttctgcagatcataaagtgtattactacgatcttcgaaaccccaagattcctctgtgcacaatgattggtcatagcaagacagtgagttatgtcaagtttgtagattcatccactcttgtgtcctcttctactgataacacactgaagctttgggacttgtcgatgtctgcttctgggattaatgaatcccctcttcactcattcactggacacactaatttaaagaactttgttggcttatcggtctctgatgggtatatagcaacaggctcagagactaacgaggttttcgtgtaccacaaggcattcccaatgccagtgatgtcgtacatgttcaacaacactgactctatgtctggtctcgaagtggacgatgcatcacagttcatatcttcaatctgctggcgaggacagtcgtctacgttagtcgctgctaactccaatggcaacataaaaattctggagatgatgacttga

SEQ ID NO: 78990 - protein, 814 aa, Arabidopsis thaliana
  peptide (1)..(814): Ceres Seq. ID no. 12647711
  misc_feature (207)..(297): Pfam Name: Protein kinase domain Pfam Description: Protein kinase domain
  misc_feature (28)..(813): Homolog of NCBI NO: 15219179 NR Description: phytochrome A supressor spa1, putative; protein At1g53090.1 [Arabidopsis thaliana] >gi|14532798|gb|AAK64180.1| phytochrome A supressor spa1 protein [Arabidopsis thaliana]
  misc_feature (1)..(481): Homolog of NCBI NO: 22331100 NR Description: similar to phytochrome A supressor spa1,
  misc_feature (258)..(709): Homolog of NCBI NO: 25405620 NR Description: hypothetical protein F8L10.5 [imported] - thaliana >gi|9454536|gb|AAF87859.1|AC022520_3 Unknown protein
  misc_feature (1)..(177): Homolog of NCBI NO: 25405620 NR Description: hypothetical protein F8L10.5 [imported] - thaliana >gi|9454536|gb|AAF87859.1|AC022520_3 Unknown protein
  misc_feature (277)..(814): Homolog of NCBI NO: 22331100 NR Description: similar to phytochrome A supressor spa1,
  misc_feature (429)..(813): Homolog of NCBI NO: 30690337 NR Description: photomorphogenesis repressor protein -related thaliana] >gi|4809171|gb|AAD30124.1|AF135455_1 phytochrome A
  misc_feature (205)..(358): Homolog of NCBI NO: 30690337 NR Description: photomorphogenesis repressor protein -related thaliana] >gi|4809171|gb|AAD30124.1|AF135455_1 phytochrome A
  misc_feature (76)..(149): Homolog of NCBI NO: 30690337 NR Description: photomorphogenesis repressor protein -related thaliana] >gi|4809171|gb|AAD30124.1|AF135455_1 phytochrome A
  misc_feature (392)..(812): Homolog of NCBI NO: 34910754 NR Description: P0042A10.6 [Oryza sativa (japonica
  misc_feature (373)..(625): Homolog of NCBI NO: 7487340 NR Description: hypothetical protein T22B4.90 - Arabidopsis >gi|4850290|emb|CAB43046.1| COP1 like protein [Arabidopsis >gi|7267810|emb|CAB81212.1| COP1 like protein [Arabidopsis
MEGSSNSNSRGFNTSGVSDRNTEFLPVERLTTRSKPSSHVDEYVRSLFGSTSTHKSGEDDSLGIDPFVRSLEWGDVSLRQWLDKPERSVDVFECLHVFRQIVEIVNAAHSQGIVVHNVRPSCFVMSSFNHVSFIESASCSDSGSDSLEDGPISQKEIGSSRREEAVSKAIAIEEKGVYNKLLERKIEKLEEEKTQPFPMKHILAMETSWYTSPEEDFGSSSTCASDVYRLGVLLFELFCPVPSREEKSRTMSSLRHRVLPPQILLKCPKEASFCLWLLHPEPTCRPSMSDLLQSEFITEPRDNLEEREAAIELRDRIEEQESLLEFLLLIQQRKQESAYRLQDTVSLLSSDIEQVVKRQLILKKRGSSLSDFSKDDHQYTSGQPLMSFQANEEPSAFLASRKRVRQGILALENGVEVDEESQGSTLLESSRLMRNFKKLESVYFLTRRRQMKAAASGKSLTRHSPLSSENGRGSMIVSEKNPFLEGLCRYLSFSQLRVKADLKQGDLLNSSNLVCALAFDREGELFATAGVNKKIKIFECNSIVNDNRDIHYPVVELAGRSKLSSLCWNSYIKSQIASSNFDGVVQIWDVARSQLVTEMKEHKKRVWSIDISSADPTLLASGSDDGTGVSIGTIKTKANVCCVQFPSDSGRSLAFGSADHKVYYYDLRNPKIPLCTMIGHSKTVSYVKFVDSSTLVSSSTDNTLKLWDLSMSASGINESPLHSFTGHTNLKNFVGLSVSDGYIATGSETNEVFVYHKAFPMPVMSYMFNNTDSMSGLEVDDASQFISSICWRGQSSTLVAANSNGNIKILEMMT

SEQ ID NO: 78991 - protein, 690 aa, Arabidopsis thaliana
  peptide (1)..(690): Ceres Seq. ID no. 12647712
  misc_feature (83)..(173): Pfam Name: Protein kinase domain Pfam Description: Protein kinase domain
  misc_feature (1)..(689): Homolog of NCBI NO: 15219179 NR Description: phytochrome A supressor spa1, putative; protein At1g53090.1 [Arabidopsis thaliana] >gi|14532798|gb|AAK64180.1| phytochrome A supressor spa1 protein [Arabidopsis thaliana]
  misc_feature (1)..(357): Homolog of NCBI NO: 22331100 NR Description: similar to phytochrome A supressor spa1,
  misc_feature (134)..(585): Homolog of NCBI NO: 25405620 NR Description: hypothetical protein F8L10.5 [imported] - thaliana >gi|9454536|gb|AAF87859.1|AC022520_3 Unknown protein
  misc_feature (1)..(53): Homolog of NCBI NO: 25405620 NR Description: hypothetical protein F8L10.5 [imported] - thaliana >gi|9454536|gb|AAF87859.1|AC022520_3 Unknown protein
  misc_feature (153)..(690): Homolog of NCBI NO: 22331100 NR Description: similar to phytochrome A supressor spa1,
  misc_feature (305)..(689): Homolog of NCBI NO: 30690337 NR Description: photomorphogenesis repressor protein -related thaliana] >gi|4809171|gb|AAD30124.1|AF135455_1 phytochrome A
  misc_feature (81)..(234): Homolog of NCBI NO: 30690337 NR Description: photomorphogenesis repressor protein -related thaliana] >gi|4809171|gb|AAD30124.1|AF135455_1 phytochrome A
  misc_feature (1)..(25): Homolog of NCBI NO: 30690337 NR Description: photomorphogenesis repressor protein -related thaliana] >gi|4809171|gb|AAD30124.1|AF135455_1 phytochrome A
  misc_feature (268)..(688): Homolog of NCBI NO: 34910754 NR Description: P0042A10.6 [Oryza sativa (japonica
  misc_feature (249)..(501): Homolog of NCBI NO: 7487340 NR Description: hypothetical protein T22B4.90 - Arabidopsis >gi|4850290|emb|CAB43046.1| COP1 like protein [Arabidopsis >gi|7267810|emb|CAB81212.1| COP1 like protein [Arabidopsis
MSSFNHVSFIESASCSDSGSDSLEDGPISQKEIGSSRREEAVSKAIAIEEKGVYNKLLERKIEKLEEEKTQPFPMKHILAMETSWYTSPEEDFGSSSTCASDVYRLGVLLFELFCPVPSREEKSRTMSSLRHRVLPPQILLKCPKEASFCLWLLHPEPTCRPSMSDLLQSEFITEPRDNLEEREAAIELRDRIEEQESLLEFLLLIQQRKQESAYRLQDTVSLLSSDIEQVVKRQLILKKRGSSLSDFSKDDHQYTSGQPLMSFQANEEPSAFLASRKRVRQGILALENGVEVDEESQGSTLLESSRLMRNFKKLESVYFLTRRRQMKAAASGKSLTRHSPLSSENGRGSMIVSEKNPFLEGLCRYLSFSQLRVKADLKQGDLLNSSNLVCALAFDREGELFATAGVNKKIKIFECNSIVNDNRDIHYPVVELAGRSKLSSLCWNSYIKSQIASSNFDGVVQIWDVARSQLVTEMKEHKKRVWSIDISSADPTLLASGSDDGTGVSIGTIKTKANVCCVQFPSDSGRSLAFGSADHKVYYYDLRNPKIPLCTMIGHSKTVSYVKFVDSSTLVSSSTDNTLKLWDLSMSASGINESPLHSFTGHTNLKNFVGLSVSDGYIATGSETNEVFVYHKAFPMPVMSYMFNNTDSMSGLEVDDASQFISSICWRGQSSTLVAANSNGNIKILEMMT

SEQ ID NO: 78992 - protein, 616 aa, Arabidopsis thaliana
  peptide (1)..(616): Ceres Seq. ID no. 12647713
  misc_feature (9)..(99): Pfam Name: Protein kinase domain Pfam Description: Protein kinase domain
  misc_feature (1)..(615): Homolog of NCBI NO: 15219179 NR Description: phytochrome A supressor spa1, putative; protein At1g53090.1 [Arabidopsis thaliana] >gi|14532798|gb|AAK64180.1| phytochrome A supressor spa1 protein [Arabidopsis thaliana]
  misc_feature (1)..(283): Homolog of NCBI NO: 22331100 NR Description: similar to phytochrome A supressor spa1,
  misc_feature (60)..(511): Homolog of NCBI NO: 25405620 NR Description: hypothetical protein F8L10.5 [imported] - thaliana >gi|9454536|gb|AAF87859.1|AC022520_3 Unknown protein
  misc_feature (79)..(616): Homolog of NCBI NO: 22331100 NR Description: similar to phytochrome A supressor spa1,
  misc_feature (231)..(615): Homolog of NCBI NO: 30690337 NR Description: photomorphogenesis repressor protein -related thaliana] >gi|4809171|gb|AAD30124.1|AF135455_1 phytochrome A
  misc_feature (7)..(160): Homolog of NCBI NO: 30690337 NR Description: photomorphogenesis repressor protein -related thaliana] >gi|4809171|gb|AAD30124.1|AF135455_1 phytochrome A
  misc_feature (194)..(614): Homolog of NCBI NO: 34910754 NR Description: P0042A10.6 [Oryza sativa (japonica
  misc_feature (175)..(427): Homolog of NCBI NO: 7487340 NR Description: hypothetical protein T22B4.90 - Arabidopsis >gi|4850290|emb|CAB43046.1| COP1 like protein [Arabidopsis >gi|7267810|emb|CAB81212.1| COP1 like protein [Arabidopsis
  misc_feature (433)..(615): Homolog of NCBI NO: 7487340 NR Description: hypothetical protein T22B4.90 - Arabidopsis >gi|4850290|emb|CAB43046.1| COP1 like protein [Arabidopsis >gi|7267810|emb|CAB81212.1| COP1 like protein [Arabidopsis
  misc_feature (175)..(427): Homolog of NCBI NO: 30681665 NR Description: WD-40 repeat protein family [Arabidopsis thaliana]
MKHILAMETSWYTSPEEDFGSSSTCASDVYRLGVLLFELFCPVPSREEKSRTMSSLRHRVLPPQILLKCPKEASFCLWLLHPEPTCRPSMSDLLQSEFITEPRDNLEEREAAIELRDRIEEQESLLEFLLLIQQRKQESAYRLQDTVSLLSSDIEQVVKRQLILKKRGSSLSDFSKDDHQYTSGQPLMSFQANEEPSAFLASRKRVRQGILALENGVEVDEESQGSTLLESSRLMRNFKKLESVYFLTRRRQMKAAASGKSLTRHSPLSSENGRGSMIVSEKNPFLEGLCRYLSFSQLRVKADLKQGDLLNSSNLVCALAFDREGELFATAGVNKKIKIFECNSIVNDNRDIHYPVVELAGRSKLSSLCWNSYIKSQIASSNFDGVVQIWDVARSQLVTEMKEHKKRVWSIDISSADPTLLASGSDDGTGVSIGTIKTKANVCCVQFPSDSGRSLAFGSADHKVYYYDLRNPKIPLCTMIGHSKTVSYVKFVDSSTLVSSSTDNTLKLWDLSMSASGINESPLHSFTGHTNLKNFVGLSVSDGYIATGSETNEVFVYHKAFPMPVMSYMFNNTDSMSGLEVDDASQFISSICWRGQSSTLVAANSNGNIKILEMMT

SEQ ID NO: 78993 - DNA, 896 bp, Arabidopsis thaliana
  misc_feature (1)..(896): Ceres Seq. ID no. 12647725
  misc_feature: MA Experiment ID: 108435 Result: Down-regulated in Transcription
  misc_feature: MA Experiment 108435 PARAMETER Experiment Name: At_stm_Mutants_cDNA_P Parameter: Plant Line Value: wt Landsburg vs stm
  misc_feature: MA Experiment 108435 PARAMETER Experiment Name: At_stm_Mutants_cDNA_P Parameter: Tissue Value: Shoot Apical Meristem Region
  misc_feature: MA Experiment ID: 108462 Result: Up-regulated in Transcription
  misc_feature: MA Experiment 108462 PARAMETER Experiment Name: At_Germinating_Seeds_cDNA_P Parameter: Age (day) Value: 2 vs. 0
  misc_feature: MA Experiment 108462 PARAMETER Experiment Name: At_Germinating_Seeds_cDNA_P Parameter: Tissue Value: Germinating Seeds
  misc_feature: MA Experiment ID: 108464 Result: Up-regulated in Transcription
  misc_feature: MA Experiment 108464 PARAMETER Experiment Name: At_Germinating_Seeds_cDNA_P Parameter: Age (day) Value: 4 vs. 0
  misc_feature: MA Experiment 108464 PARAMETER Experiment Name: At_Germinating_Seeds_cDNA_P Parameter: Tissue Value: Germinating Seeds
  misc_feature: MA Experiment ID: 108595 Result: Down-regulated in Transcription
  misc_feature: MA Experiment 108595 PARAMETER Experiment Name: At_Ler-pi_Ovule_cDNA_P Parameter: Plant Line Value: null
  misc_feature: MA Experiment ID: 20000180 Result: Up-regulated in Transcription
  misc_feature: MA Experiment 20000180 PARAMETER Experiment Name: At_Germinating_Seeds_P Parameter: Age (hr) Value: 24 vs. 0
  misc_feature: MA Experiment 20000180 PARAMETER Experiment Name: At_Germinating_Seeds_P Parameter: Tissue Value: Germinating Seeds
  misc_feature: MA Experiment ID: 20000185 Result: Down-regulated in Transcription
  misc_feature: MA Experiment 20000185 PARAMETER Experiment Name: At_Roots__P Parameter: Age (day) Value: 7 vs. 21
  misc_feature: MA Experiment 20000185 PARAMETER Experiment Name: At_Roots__P Parameter: Organism Value: A. thaliana
  misc_feature: MA Experiment 20000185 PARAMETER Experiment Name: At_Roots__P Parameter: Tissue Value: Roots vs. Whole Plant
  misc_feature: MA Experiment ID: 20000286 Result: Down-regulated in Transcription
  misc_feature: MA Experiment 20000286 PARAMETER Experiment Name: At_Open_Flower_P Parameter: Age (day) Value: 21
  misc_feature: MA Experiment 20000286 PARAMETER Experiment Name: At_Open_Flower_P Parameter: Plant Line Value: WS
  misc_feature: MA Experiment 20000286 PARAMETER Experiment Name: At_Open_Flower_P Parameter: Tissue Value: Half Open vs. Whole Plant
  misc_feature: MA Experiment ID: 20000439 Result: Down-regulated in Transcription
  misc_feature: MA Experiment 20000439 PARAMETER Experiment Name: At_Roots__P Parameter: Age (day) Value: 14 vs. 21
  misc_feature: MA Experiment 20000439 PARAMETER Experiment Name: At_Roots__P Parameter: Organism Value: A. thaliana
  misc_feature: MA Experiment 20000439 PARAMETER Experiment Name: At_Roots__P Parameter: Tissue Value: Roots vs. Whole Plant
  misc_feature: MA Experiment ID: 20000794 Result: Down-regulated in Transcription
  misc_feature: MA Experiment 20000794 PARAMETER Experiment Name: At_Petals_P Parameter: Age (day) Value: 23-25 days
  misc_feature: MA Experiment 20000794 PARAMETER Experiment Name: At_Petals_P Parameter: Plant Line Value: WS
  misc_feature: MA Experiment 20000794 PARAMETER Experiment Name: At_Petals_P Parameter: Tissue Value: Petals vs. Whole plant
  misc_feature: MA Experiment ID: 20001557 Result: Down-regulated in Transcription
  misc_feature: MA Experiment 20001557 PARAMETER Experiment Name: At_Drought_Soil_Dry_P Parameter: Age (day) Value: 27
  misc_feature: MA Experiment 20001557 PARAMETER Experiment Name: At_Drought_Soil_Dry_P Parameter: Organism Value: A. thaliana
  misc_feature: MA Experiment 20001557 PARAMETER Experiment Name: At_Drought_Soil_Dry_P Parameter: Plant Line Value: WS
  misc_feature: MA Experiment 20001557 PARAMETER Experiment Name: At_Drought_Soil_Dry_P Parameter: Post Timepoint (hr) Value: 3
  misc_feature: MA Experiment 20001557 PARAMETER Experiment Name: At_Drought_Soil_Dry_P Parameter: Post-Treatment Value: Re-Water vs. No Drought
  misc_feature: MA Experiment 20001557 PARAMETER Experiment Name: At_Drought_Soil_Dry_P Parameter: Timepoint (day) Value: 13
  misc_feature: MA Experiment 20001557 PARAMETER Experiment Name: At_Drought_Soil_Dry_P Parameter: Treatment Value: Drought vs. No Drought
  misc_feature: MA Experiment ID: 20001558 Result: Down-regulated in Transcription
  misc_feature: MA Experiment 20001558 PARAMETER Experiment Name: At_Drought_Soil_Dry_P Parameter: Age (day) Value: 27
  misc_feature: MA Experiment 20001558 PARAMETER Experiment Name: At_Drought_Soil_Dry_P Parameter: Organism Value: A. thaliana
  misc_feature: MA Experiment 20001558 PARAMETER Experiment Name: At_Drought_Soil_Dry_P Parameter: Plant Line Value: WS
  misc_feature: MA Experiment 20001558 PARAMETER Experiment Name: At_Drought_Soil_Dry_P Parameter: Post Timepoint (hr) Value: 6
  misc_feature: MA Experiment 20001558 PARAMETER Experiment Name: At_Drought_Soil_Dry_P Parameter: Post-Treatment Value: Re-Water vs. No Drought
  misc_feature: MA Experiment 20001558 PARAMETER Experiment Name: At_Drought_Soil_Dry_P Parameter: Timepoint (day) Value: 13
  misc_feature: MA Experiment 20001558 PARAMETER Experiment Name: At_Drought_Soil_Dry_P Parameter: Treatment Value: Drought vs. No Drought
  misc_feature: MA Experiment ID: 20001905 Result: Down-regulated in Transcription
  misc_feature: MA Experiment 20001905 PARAMETER Experiment Name: At_Drought_Reproduction_P Parameter: Age (day) Value: 40
  misc_feature: MA Experiment 20001905 PARAMETER Experiment Name: At_Drought_Reproduction_P Parameter: Organism Value: A. thaliana
  misc_feature: MA Experiment 20001905 PARAMETER Experiment Name: At_Drought_Reproduction_P Parameter: Plant Line Value: WS
  misc_feature: MA Experiment 20001905 PARAMETER Experiment Name: At_Drought_Reproduction_P Parameter: Timepoint (day) Value: 10
  misc_feature: MA Experiment 20001905 PARAMETER Experiment Name: At_Drought_Reproduction_P Parameter: Tissue Value: Rosettes
  misc_feature: MA Experiment 20001905 PARAMETER Experiment Name: At_Drought_Reproduction_P Parameter: Treatment Value: Drought vs. No Drought
aagtcattcaaattgtcacccgtatctgccaaaaaccctctaaccactcaaaaaaatatctctgctctgctccaatggcgtcgttactcgattccgtcaccgtgacccgcgtgttttctctgccgattgcggcttcggtctcgtcttcttcagctgctccgtcggtttcacgacgccggatttctcccgccaggtttctggaattcagaggtttgaagtcttcgcggagtttggtgactcagtcggccagtctgggtgcgaatcgtagaaccagaatcgctcgcggtggacgaatcgcctgtgaggctcaggacaccactgccgccgccgtcgaagtaccaaatctgtctgattcagaatggcaaacaaaggttctggaatcagatgtcccagttctggtcgagttctgggcaccatggtgtggaccttgccgtatgattcaccccatagttgaccagctagccaaagatttcgcagggaagttcaaattctacaaaatcaacactgacgagagcccaaatacagcaaaccgttacgggatacgaagcgttccaacagtaatcatcttcaaaggcggtgagaagaaagatagcatcattggagctgtgcctagagagacgttggagaaaactatagaaagattcttggtcgagtaacaaaatttgactcttttgtcactctgaaccattttaccttatcttctctcttgtaatctctgtaaagtcttttaagtttttgactattatgttatcgtgggtcctctttgtcttcttcaataaaaaaaatggaaacaaagtaatccaccgacgcatgagaagcataactccacgttgaaccacatgccattgttcttcctaattcaccgtacaatctatatacatacatatgttttgagt

SEQ ID NO: 78994 - protein, 217 aa, Arabidopsis thaliana
  peptide (1)..(217): Ceres Seq. ID no. 12647726
  misc_feature (25)..(217): Homolog of NCBI NO: 15232567 NR Description: thioredoxin m4; protein id: At3g15360.1, by cDNA: 42151., supported by cDNA: gi_14030704, supported by gi_16974518, supported by cDNA: gi_6539613 [Arabidopsis thaliana]
  misc_feature (25)..(217): Homolog of NCBI NO: 6539614 NR Description: thioredoxin m4 [Arabidopsis thaliana]
  misc_feature (38)..(215): Homolog of NCBI NO: 15594012 NR Description: putative thioredoxin m2 [Pisum sativum]
  misc_feature (46)..(215): Homolog of NCBI NO: 15236327 NR Description: putative M-type thioredoxin; protein id: supported by cDNA: 10950., supported by cDNA: gi_15028102, by cDNA: gi_19310724, supported by cDNA: gi_6539609 [Arabidopsis
  misc_feature (46)..(215): Homolog of NCBI NO: 6539610 NR Description: thioredoxin m2 [Arabidopsis thaliana]
  misc_feature (46)..(215): Homolog of NCBI NO: 21618235 NR Description: putative M-type thioredoxin [Arabidopsis thaliana]
  misc_feature (39)..(215): Homolog of NCBI NO: 11135407 NR Description: Thioredoxin M-type, chloroplast precursor (TRX-M)
  misc_feature (48)..(215): Homolog of NCBI NO: 30678634 NR Description: thioredoxin M-type 1, chloroplast precursor
  misc_feature (25)..(215): Homolog of NCBI NO: 38346628 NR Description: OSJNBa0074L08.22 [Oryza sativa (japonica
  misc_feature (40)..(215): Homolog of NCBI NO: 21354 NR Description: thioredoxin M precursor (AA -67 to 114) [Spinacia
VIQIVTRICQKPSNHSKKYLCSAPMASLLDSVTVTRVFSLPIAASVSSSSAAPSVSRRRISPARFLEFRGLKSSRSLVTQSASLGANRRTRIARGGRIACEAQDTTAAAVEVPNLSDSEWQTKVLESDVPVLVEFWAPWCGPCRMIHPIVDQLAKDFAGKFKFYKINTDESPNTANRYGIRSVPTVIIFKGGEKKDSIIGAVPRETLEKTIERFLVE

SEQ ID NO: 78995 - protein, 193 aa, Arabidopsis thaliana; identical to SEQ ID NO: 37672
  peptide (1)..(193): Ceres Seq. ID no. 12647727
  misc_feature (1)..(193): Homolog of NCBI NO: 15232567 NR Description: thioredoxin m4; protein id: At3g15360.1, by cDNA: 42151., supported by cDNA: gi_14030704, supported by gi_16974518, supported by cDNA: gi_6539613 [Arabidopsis thaliana]
  misc_feature (1)..(193): Homolog of NCBI NO: 6539614 NR Description: thioredoxin m4 [Arabidopsis thaliana]
  misc_feature (14)..(191): Homolog of NCBI NO: 15594012 NR Description: putative thioredoxin m2 [Pisum sativum]
  misc_feature (22)..(191): Homolog of NCBI NO: 15236327 NR Description: putative M-type thioredoxin; protein id: supported by cDNA: 10950., supported by cDNA: gi_15028102, by cDNA: gi_19310724, supported by cDNA: gi_6539609 [Arabidopsis
  misc_feature (22)..(191): Homolog of NCBI NO: 6539610 NR Description: thioredoxin m2 [Arabidopsis thaliana]
  misc_feature (22)..(191): Homolog of NCBI NO: 21618235 NR Description: putative M-type thioredoxin [Arabidopsis thaliana]
  misc_feature (15)..(191): Homolog of NCBI NO: 11135407 NR Description: Thioredoxin M-type, chloroplast precursor (TRX-M)
  misc_feature (24)..(191): Homolog of NCBI NO: 30678634 NR Description: thioredoxin M-type 1, chloroplast precursor
  misc_feature (1)..(191): Homolog of NCBI NO: 38346628 NR Description: OSJNBa0074L08.22 [Oryza sativa (japonica
  misc_feature (16)..(191): Homolog of NCBI NO: 21354 NR Description: thioredoxin M precursor (AA -67 to 114) [Spinacia

SEQ ID NO: 78996 - DNA, 818 bp, Arabidopsis thaliana
  misc_feature (1)..(818): Ceres Seq. ID no. 12647785
  misc_feature: MA Experiment ID: 108461 Result: Up-regulated in Transcription
  misc_feature: MA Experiment 108461 PARAMETER Experiment Name: At_Germinating_Seeds_cDNA_P Parameter: Age (day) Value: 1 vs. 0
  misc_feature: MA Experiment 108461 PARAMETER Experiment Name: At_Germinating_Seeds_cDNA_P Parameter: Tissue Value: Germinating Seeds
  misc_feature: MA Experiment ID: 108573 Result: Down-regulated in Transcription
  misc_feature: MA Experiment 108573 PARAMETER Experiment Name: At_Drought_cDNA_P Parameter: Timepoint (hr) Value: 6
  misc_feature: MA Experiment 108573 PARAMETER Experiment Name: At_Drought_cDNA_P Parameter: Tissue Value: Aerial
  misc_feature: MA Experiment 108573 PARAMETER Experiment Name: At_Drought_cDNA_P Parameter: Treatment Value: Drought vs. No Drought
  misc_feature: MA Experiment ID: 20000111 Result: Down-regulated in Transcription
  misc_feature: MA Experiment 20000111 PARAMETER Experiment Name: At_42deg_Heat_cDNA_P Parameter: Temperature (deg C) Value: 42 vs. 22
  misc_feature: MA Experiment 20000111 PARAMETER Experiment Name: At_42deg_Heat_cDNA_P Parameter: Timepoint (hr) Value: 6
  misc_feature: MA Experiment 20000111 PARAMETER Experiment Name: At_42deg_Heat_cDNA_P Parameter: Tissue Value: Aerial
  misc_feature: MA Experiment ID: 20000113 Result: Down-regulated in Transcription
  misc_feature: MA Experiment 20000113 PARAMETER Experiment Name: At_42deg_Heat_cDNA_P Parameter: Temperature (deg C) Value: 42 vs. 22
  misc_feature: MA Experiment 20000113 PARAMETER Experiment Name: At_42deg_Heat_cDNA_P Parameter: Timepoint (hr) Value: 8
  misc_feature: MA Experiment 20000113 PARAMETER Experiment Name: At_42deg_Heat_cDNA_P Parameter: Tissue Value: Aerial
  misc_feature: MA Experiment ID: 20000179 Result: Up-regulated in Transcription
  misc_feature: MA Experiment 20000179 PARAMETER Experiment Name: At_Germinating_Seeds_P Parameter: Age (hr) Value: 6 vs. 0
  misc_feature: MA Experiment 20000179 PARAMETER Experiment Name: At_Germinating_Seeds_P Parameter: Tissue Value: Germinating Seeds
  misc_feature: MA Experiment ID: 20000180 Result: Up-regulated in Transcription
  misc_feature: MA Experiment 20000180 PARAMETER Experiment Name: At_Germinating_Seeds_P Parameter: Age (hr) Value: 24 vs. 0
  misc_feature: MA Experiment 20000180 PARAMETER Experiment Name: At_Germinating_Seeds_P Parameter: Tissue Value: Germinating Seeds
  misc_feature: MA Experiment ID: 20001905 Result: Down-regulated in Transcription
  misc_feature: MA Experiment 20001905 PARAMETER Experiment Name: At_Drought_Reproduction_P Parameter: Age (day) Value: 40
  misc_feature: MA Experiment 20001905 PARAMETER Experiment Name: At_Drought_Reproduction_P Parameter: Organism Value: A. thaliana
  misc_feature: MA Experiment 20001905 PARAMETER Experiment Name: At_Drought_Reproduction_P Parameter: Plant Line Value: WS
  misc_feature: MA Experiment 20001905 PARAMETER Experiment Name: At_Drought_Reproduction_P Parameter: Timepoint (day) Value: 10
  misc_feature: MA Experiment 20001905 PARAMETER Experiment Name: At_Drought_Reproduction_P Parameter: Tissue Value: Rosettes
  misc_feature: MA Experiment 20001905 PARAMETER Experiment Name: At_Drought_Reproduction_P Parameter: Treatment Value: Drought vs. No Drought
  misc_feature: MA Experiment ID: 20001911 Result: Down-regulated in Transcription
  misc_feature: MA Experiment 20001911 PARAMETER Experiment Name: At_Drought_Reproduction_P Parameter: Age (day) Value: 40
  misc_feature: MA Experiment 20001911 PARAMETER Experiment Name: At_Drought_Reproduction_P Parameter: Organism Value: A. thaliana
  misc_feature: MA Experiment 20001911 PARAMETER Experiment Name: At_Drought_Reproduction_P Parameter: Plant Line Value: WS
  misc_feature: MA Experiment 20001911 PARAMETER Experiment Name: At_Drought_Reproduction_P Parameter: Timepoint (day) Value: 10
  misc_feature: MA Experiment 20001911 PARAMETER Experiment Name: At_Drought_Reproduction_P Parameter: Tissue Value: Flowers
  misc_feature: MA Experiment 20001911 PARAMETER Experiment Name: At_Drought_Reproduction_P Parameter: Treatment Value: Drought vs. No Drought
aatcaaatcaaatctgtgtttcattctcttctccactgaaacgcgtttgaaggagaagggtcaaagggatctgatcctatcactttcgctgggaaaaacacgaaatcgaaggaagaatcaatcatgggtttcatcggagaaactgtagattccatcaaatctatcaagatccgtcaagttctcactcaggctatcactctcggtatgatcgttacatctgcattgataatttggaaggcattgatatgtgtcactggcagtgaatcaccagtggttgttgttctctctgaaagtatggaacctggctttcagagaggagatatattgttcttgcggatgactgatgagcctattcgagcaggcgagattgttgtgttcagtgttgatggtcgtgaaattcccattgttcatcgagcaatcaaagttcatgagagaggagatactaaagcagttgatgttctaacaaaaggtgacaacaatgacattgatgacattggtctctatgctgaaggacagctttggcttcacaggcatcatatcatgggcagagctgttggattcttgccttatgttggatgggttactattatcatgacagaaaagcctatcatcaagtatatactcattggtgcattgggtttgctcgttataacatcgaaagactaagactacataacaagctggtcgttggtaaggaggtagcttctgcaacgctcgggtcatcatctttgtagccatcatctttgaaactgtagaatcatataaacctcaacttataattatagacacttttatctttaaatcagctacgttttgtg

SEQ ID NO: 78997 - protein, 180 aa, Arabidopsis thaliana
  peptide (1)..(180): Ceres Seq. ID no. 12647786
  misc_feature (1)..(157): Pfam Name: Signal peptidase I Pfam Description: Signal peptidase I
  misc_feature (1)..(180): Homolog of NCBI NO: 18400874 NR Description: putative signal peptidase 21kDa subunit; protein
  misc_feature (1)..(180): Homolog of NCBI NO: 15219044 NR Description: signal peptidase subunit, putative; protein id: supported by cDNA: 103157., supported by cDNA: gi_17381151, by cDNA: gi_20465736 [Arabidopsis thaliana]
  misc_feature (11)..(180): Homolog of NCBI NO: 15150809 NR Description: similar to signal peptidase complex (18kD) [Homo >gi|17368701|sp|Q9BY50|SPC3_HUMAN Microsomal signal peptidase 21 subunit (SPase 21 kDa subunit) (SPC21)
  misc_feature (11)..(180): Homolog of NCBI NO: 24025634 NR Description: signal peptidase 21kDa subunit [Rattus >gi|17367427|sp|Q9WTR7|SPC3_RAT Microsomal signal peptidase 21 subunit (SPase 21 kDa subunit) (SPC21)
  misc_feature (11)..(180): Homolog of NCBI NO: 134792 NR Description: Microsomal signal peptidase 21 kDa subunit (SPase
  misc_feature (11)..(180): Homolog of NCBI NO: 21313554 NR Description: RIKEN cDNA 1810029G24 [Mus musculus] Microsomal signal peptidase 21 kDa subunit (SPase 21 kDa subunit) >gi|12841311|dbj|BAB25156.1| unnamed protein product [Mus
  misc_feature (8)..(180): Homolog of NCBI NO: 38511785 NR Description: Signal peptidase complex (18kD) [Silurana
  misc_feature (9)..(180): Homolog of NCBI NO: 39595527 NR Description: Hypothetical protein CBG04194 [Caenorhabditis
  misc_feature (8)..(180): Homolog of NCBI NO: 9910550 NR Description: signal peptidase complex; sid2895p; signal complex (18kD) [Mus musculus] >gi|17369451|sp|Q9R0P6|SPC4_MOUSE signal peptidase 18 kDa subunit (SPase 18 kDa subunit) (SPC18)
  misc_feature (8)..(180): Homolog of NCBI NO: 34784421 NR Description: Spc18-pending protein [Mus musculus]
MGFIGETVDSIKSIKIRQVLTQAITLGMIVTSALIIWKALICVTGSESPVVVVLSESMEPGFQRGDILFLRMTDEPIRAGEIVVFSVDGREIPIVHRAIKVHERGDTKAVDVLTKGDNNDIDDIGLYAEGQLWLHRHHIMGRAVGFLPYVGWVTIIMTEKPIIKYILIGALGLLVITSKD

SEQ ID NO: 78998 - protein, 153 aa, Arabidopsis thaliana; identical to SEQ ID NO: 35045
  peptide (1)..(153): Ceres Seq. ID no. 12647787
  misc_feature (1)..(130): Pfam Name: Signal peptidase I Pfam Description: Signal peptidase I
  misc_feature (1)..(153): Homolog of NCBI NO: 18400874 NR Description: putative signal peptidase 21kDa subunit; protein
  misc_feature (1)..(153): Homolog of NCBI NO: 15219044 NR Description: signal peptidase subunit, putative; protein id: supported by cDNA: 103157., supported by cDNA: gi_17381151, by cDNA: gi_20465736 [Arabidopsis thaliana]
  misc_feature (1)..(153): Homolog of NCBI NO: 15150809 NR Description: similar to signal peptidase complex (18kD) [Homo >gi|17368701|sp|Q9BY50|SPC3_HUMAN Microsomal signal peptidase 21 subunit (SPase 21 kDa subunit) (SPC21)
  misc_feature (1)..(153): Homolog of NCBI NO: 24025634 NR Description: signal peptidase 21kDa subunit [Rattus >gi|17367427|sp|Q9WTR7|SPC3_RAT Microsomal signal peptidase 21 subunit (SPase 21 kDa subunit) (SPC21)
  misc_feature (1)..(153): Homolog of NCBI NO: 134792 NR Description: Microsomal signal peptidase 21 kDa subunit (SPase
  misc_feature (1)..(153): Homolog of NCBI NO: 21313554 NR Description: RIKEN cDNA 1810029G24 [Mus musculus] Microsomal signal peptidase 21 kDa subunit (SPase 21 kDa subunit) >gi|12841311|dbj|BAB25156.1| unnamed protein product [Mus
  misc_feature (1)..(153): Homolog of NCBI NO: 38511785 NR Description: Signal peptidase complex (18kD) [Silurana
  misc_feature (1)..(153): Homolog of NCBI NO: 39595527 NR Description: Hypothetical protein CBG04194 [Caenorhabditis
  misc_feature (1)..(153): Homolog of NCBI NO: 9910550 NR Description: signal peptidase complex; sid2895p; signal complex (18kD) [Mus musculus] >gi|17369451|sp|Q9R0P6|SPC4_MOUSE signal peptidase 18 kDa subunit (SPase 18 kDa subunit) (SPC18)
  misc_feature (1)..(153): Homolog of NCBI NO: 34784421 NR Description: Spc18-pending protein [Mus musculus]

SEQ ID NO: 78999 - protein, 123 aa, Arabidopsis thaliana; identical to SEQ ID NO: 35046
  peptide (1)..(123): Ceres Seq. ID no. 12647788
  misc_feature (1)..(100): Pfam Name: Signal peptidase I Pfam Description: Signal peptidase I
  misc_feature (1)..(123): Homolog of NCBI NO: 18400874 NR Description: putative signal peptidase 21kDa subunit; protein
  misc_feature (1)..(123): Homolog of NCBI NO: 15219044 NR Description: signal peptidase subunit, putative; protein id: supported by cDNA: 103157., supported by cDNA: gi_17381151, by cDNA: gi_20465736 [Arabidopsis thaliana]
  misc_feature (1)..(123): Homolog of NCBI NO: 15150809 NR Description: similar to signal peptidase complex (18kD) [Homo >gi|17368701|sp|Q9BY50|SPC3_HUMAN Microsomal signal peptidase 21 subunit (SPase 21 kDa subunit) (SPC21)
  misc_feature (1)..(123): Homolog of NCBI NO: 24025634 NR Description: signal peptidase 21kDa subunit [Rattus >gi|17367427|sp|Q9WTR7|SPC3_RAT Microsomal signal peptidase 21 subunit (SPase 21 kDa subunit) (SPC21)
  misc_feature (1)..(123): Homolog of NCBI NO: 134792 NR Description: Microsomal signal peptidase 21 kDa subunit (SPase
  misc_feature (1)..(123): Homolog of NCBI NO: 21313554 NR Description: RIKEN cDNA 1810029G24 [Mus musculus] Microsomal signal peptidase 21 kDa subunit (SPase 21 kDa subunit) >gi|12841311|dbj|BAB25156.1| unnamed protein product [Mus
  misc_feature (1)..(123): Homolog of NCBI NO: 38511785 NR Description: Signal peptidase complex (18kD) [Silurana
  misc_feature (1)..(123): Homolog of NCBI NO: 39595527 NR Description: Hypothetical protein CBG04194 [Caenorhabditis
  misc_feature (1)..(123): Homolog of NCBI NO: 9910550 NR Description: signal peptidase complex; sid2895p; signal complex (18kD) [Mus musculus] >gi|17369451|sp|Q9R0P6|SPC4_MOUSE signal peptidase 18 kDa subunit (SPase 18 kDa subunit) (SPC18)
  misc_feature (1)..(123): Homolog of NCBI NO: 34784421 NR Description: Spc18-pending protein [Mus musculus]

SEQ ID NO: 79000 - DNA, 3258 bp, Arabidopsis thaliana
  misc_feature (1)..(3258): Ceres Seq. ID no. 12647799
  misc_feature: MA Experiment ID: 20000307 Result: Up-regulated in Transcription
  misc_feature: MA Experiment 20000307 PARAMETER Experiment Name: At_Germinating_Seeds_Sub_P Parameter: Age (hr) Value: 24 vs. 0
  misc_feature: MA Experiment 20000307 PARAMETER Experiment Name: At_Germinating_Seeds_Sub_P Parameter: Organism Value: A. thaliana
  misc_feature: MA Experiment 20000307 PARAMETER Experiment Name: At_Germinating_Seeds_Sub_P Parameter: Plant Line Value: WS
  misc_feature: MA Experiment 20000307 PARAMETER Experiment Name: At_Germinating_Seeds_Sub_P Parameter: Tissue Value: Germinating Seeds
atgaacactggagggagactcattgctgggtctcacaacaggaatgaattcgttctcattaacgccgacgacactgccagaatacgatcagcagaagaactgagtgggcaaacttgtaaaatctgtagagatgagattgagttaacagataatggtgagccatttatcgcttgcaacgaatgtgctttccctacgtgtagaccgtgctatgagtatgaaagaagagaaggaaaccaagcttgtcctcagtgcggaacccgatacaagcgtattaaaggtagtccaagggtcgaaggggatgaagaagatgatgacattgatgatctggagcatgagttttatggaatggatcctgaacatgttactgaagctgcgctctattatatgcgtcttaacactggtcgtggtactgatgaagtgtcacacttgtattcagcttcaccaggctctgaggttcctcttttgacgtattgtgatgaggattctgatatgtattcggatagacatgctcttatcgtgcccccatctacgggtttggggaacagagtccatcatgtgccatttacagattcttttgcatctatacacacaagacccatggttcctcagaaggatcttacagtttatggatatggaagtgttgcatggaaagaccgtatggaagtatggaagaaacaacaaatagaaaagctacaagtcgttaagaatgaaagagtaaatgatggtgatggcgatggattcattgttgacgagctcgatgatcccgggatggatgaaggaagacaacctctgtcacgaaagctacccattcgttcgagcagaataaacccttataggatgttgattttctgtcggctcgccattcttggcttgttcttccattataggattctccatccggtgaatgatgcattcggcttgtggttaacatcggttatatgcgaaatatggttcgctgtgtcttggattcttgatcagttcccaaaatggtatcccatcgaaagagaaacatatctcgacaggctttctctaaggtatgagaaggaagggaagccatcagagttagcgcctgtcgatgtctttgttagtactgtggatccattgaaagagcctccactgattacagcaaatacggttctgtctattctcgctgttgattatccggttgagaaggttgcatgttatgtatcagatgatggtgctgcaatgcttacatttgaagctctctcttacacagccgagtttgcaagaaaatgggttcctttctgtaagaagttcagcatcgagccacgcgctcctgaatggtatttttcacagaagatggattacttgaagcataaagtcgatcccgcttttgttatggaacgccgtgccatgaagagagactatgaggaattcaaagtaaagataaatgcattggtttctgtatcacagaaagttcctgaagatggttggactatgcaagatggaactccttggcctggaaacaatgtccgggaccatccaggaatgattcaggttttcctgggacacagcggagtttgtgatatggatggaaatgagttacctcgtttggtgtatgtttctcgtgagaagcgaccgggatttgatcaccataagaaggctggagctatgaattccttgatccgggtatctgctgttctctcaaatgctccttaccttcttaatgtggactgtgatcattacatcaacaacagcaaggcaattagagaagctatgtgtttcatgatggacccgcagtccggaaagaaaatatgttatgttcagtttcctcagaggtttgatgggattgatagacacgatcgatactcaaatcgcaatgtggttttcttcgatatcaacatgaaaggtttagatggcatacaaggaccgatatatgtggggaccgggtgtgtcttcagaaggcaagcactttatggatttgatgcaccaaagaagaagcaaccaccaggcagaacctgcaactgttggccaaaatggtgctgtttgtgttgcggtatgagaaagaagaagacaggtaaggtcaaagataatcagagaaagaagcctaaagagacttcaaagcagatacatgcccttgagcacatagaagaaggccttcaagtgacaaatgctgagaataactctgagactgcccaactgaagctggagaagaaatttggtcaatcaccggttttagtagcttctactcttctgctaaatggtggagtgcctagcaatgtgaacccagcgtctttattgagggaatccattcaggttattagctgtggctacgaagagaaaaccgaatggggaaaagagattgggtggatttatggctcggtcactgaggatatcttaacgggtttcaagatgcattgccatggatggagatctgtatattgtatgccaaagcgagcggctttcaaaggttctgctcccattaacttgtcggatcgtcttcatcaagttctacgttgggcacttggctctgtcgagattttcttgagtaggcattgccctatttggtacggttatggtggtggtttaaaatggttggaaagattctcttacattaactctgttgtctatccttggacatcccttcctttgcttgtctactgctcacttcccgccatttgtctactcaccggaaaattcatcgtccctgagataagtaactacgcgggtatactcttcctgctaatgtttatgtccattgcggtaacgggtatactagaaatgcaatggggcaaaataggaatcgatgattggtggagaaacgagcagttttgggtcattggaggagtctcttcgcatctatttgctctgtttcaaggtttactcaaagttcttgcaggagtcagcacgaacttcacagtcacatctaaagcagcagatgatggagaattctcagagctttacattttcaaatggacatctttgttgattcctccgactactctgctgatcattaacatcgttggagtcattgtcggagtttcggatgcgataaataacgggtatgactcttggggaccgctttttgggagattgttctttgcgctttgggtgattgttcatttgtatccgttcctcaaagggttacttgggaaacaagatagagtaccaaccattatattggtttggtcgattcttcttgcttccatcttgactctcttgtgggtcagagtcaatccgtttgtgtccaaagatggaccggtcttggagatctgtggtcttgactgtttaaagtga

SEQ ID NO: 79001 - protein, 1085 aa, Arabidopsis thaliana
  peptide (1)..(1085): Ceres Seq. ID no. 12647800
  misc_feature (516)..(1067): Homolog of NCBI NO: 15217853 NR Description: hypothetical protein; protein id: At1g02730.1
  misc_feature (196)..(473): Homolog of NCBI NO: 15217853 NR Description: hypothetical protein; protein id: At1g02730.1
  misc_feature (32)..(109): Homolog of NCBI NO: 15217853 NR Description: hypothetical protein; protein id: At1g02730.1
  misc_feature (479)..(1067): Homolog of NCBI NO: 15228448 NR Description: putative cellulose synthase catalytic subunit; id: At3g03050.1, supported by cDNA: gi_12619787, supported by gi_13430535 [Arabidopsis thaliana]
  misc_feature (241)..(473): Homolog of NCBI NO: 15228448 NR Description: putative cellulose synthase catalytic subunit; id: At3g03050.1, supported by cDNA: gi_12619787, supported by gi_13430535 [Arabidopsis thaliana]
  misc_feature (477)..(1067): Homolog of NCBI NO: 27372782 NR Description: cellulose synthase-like protein D4 [Populus
  misc_feature (242)..(473): Homolog of NCBI NO: 27372782 NR Description: cellulose synthase-like protein D4 [Populus
  misc_feature (479)..(1067): Homolog of NCBI NO: 15237873 NR Description: cellulose synthase catalytic subunit -like protein id: At5g16910.1 [Arabidopsis thaliana]
  misc_feature (241)..(473): Homolog of NCBI NO: 15237873 NR Description: cellulose synthase catalytic subunit -like protein id: At5g16910.1 [Arabidopsis thaliana]
  misc_feature (751)..(1080): Homolog of NCBI NO: 13925884 NR Description: cellulose synthase D-like protein [Nicotiana
MNTGGRLIAGSHNRNEFVLINADDTARIRSAEELSGQTCKICRDEIELTDNGEPFIACNECAFPTCRPCYEYERREGNQACPQCGTRYKRIKGSPRVEGDEEDDDIDDLEHEFYGMDPEHVTEAALYYMRLNTGRGTDEVSHLYSASPGSEVPLLTYCDEDSDMYSDRHALIVPPSTGLGNRVHHVPFTDSFASIHTRPMVPQKDLTVYGYGSVAWKDRMEVWKKQQIEKLQVVKNERVNDGDGDGFIVDELDDPGMDEGRQPLSRKLPIRSSRINPYRMLIFCRLAILGLFFHYRILHPVNDAFGLWLTSVICEIWFAVSWILDQFPKWYPIERETYLDRLSLRYEKEGKPSELAPVDVFVSTVDPLKEPPLITANTVLSILAVDYPVEKVACYVSDDGAAMLTFEALSYTAEFARKWVPFCKKFSIEPRAPEWYFSQKMDYLKHKVDPAFVMERRAMKRDYEEFKVKINALVSVSQKVPEDGWTMQDGTPWPGNNVRDHPGMIQVFLGHSGVCDMDGNELPRLVYVSREKRPGFDHHKKAGAMNSLIRVSAVLSNAPYLLNVDCDHYINNSKAIREAMCFMMDPQSGKKICYVQFPQRFDGIDRHDRYSNRNVVFFDINMKGLDGIQGPIYVGTGCVFRRQALYGFDAPKKKQPPGRTCNCWPKWCCLCCGMRKKKTGKVKDNQRKKPKETSKQIHALEHIEEGLQVTNAENNSETAQLKLEKKFGQSPVLVASTLLLNGGVPSNVNPASLLRESIQVISCGYEEKTEWGKEIGWIYGSVTEDILTGFKMHCHGWRSVYCMPKRAAFKGSAPINLSDRLHQVLRWALGSVEIFLSRHCPIWYGYGGGLKWLERFSYINSVVYPWTSLPLLVYCSLPAICLLTGKFIVPEISNYAGILFLLMFMSIAVTGILEMQWGKIGIDDWWRNEQFWVIGGVSSHLFALFQGLLKVLAGVSTNFTVTSKAADDGEFSELYIFKWTSLLIPPTTLLIINIVGVIVGVSDAINNGYDSWGPLFGRLFFALWVIVHLYPFLKGLLGKQDRVPTIILVWSILLASILTLLWVRVNPFVSKDGPVLEICGLDCLK

SEQ ID NO: 79002 - protein, 970 aa, Arabidopsis thaliana
  peptide (1)..(970): Ceres Seq. ID no. 12647801
  misc_feature (401)..(952): Homolog of NCBI NO: 15217853 NR Description: hypothetical protein; protein id: At1g02730.1
  misc_feature (81)..(358): Homolog of NCBI NO: 15217853 NR Description: hypothetical protein; protein id: At1g02730.1
  misc_feature (364)..(952): Homolog of NCBI NO: 15228448 NR Description: putative cellulose synthase catalytic subunit; id: At3g03050.1, supported by cDNA: gi_12619787, supported by gi_13430535 [Arabidopsis thaliana]
  misc_feature (126)..(358): Homolog of NCBI NO: 15228448 NR Description: putative cellulose synthase catalytic subunit; id: At3g03050.1, supported by cDNA: gi_12619787, supported by gi_13430535 [Arabidopsis thaliana]
  misc_feature (362)..(952): Homolog of NCBI NO: 27372782 NR Description: cellulose synthase-like protein D4 [Populus
  misc_feature (127)..(358): Homolog of NCBI NO: 27372782 NR Description: cellulose synthase-like protein D4 [Populus
  misc_feature (364)..(952): Homolog of NCBI NO: 15237873 NR Description: cellulose synthase catalytic subunit -like protein id: At5g16910.1 [Arabidopsis thaliana]
  misc_feature (126)..(358): Homolog of NCBI NO: 15237873 NR Description: cellulose synthase catalytic subunit -like protein id: At5g16910.1 [Arabidopsis thaliana]
  misc_feature (636)..(965): Homolog of NCBI NO: 13925884 NR Description: cellulose synthase D-like protein [Nicotiana
  misc_feature (121)..(358): Homolog of NCBI NO: 13925884 NR Description: cellulose synthase D-like protein [Nicotiana
MDPEHVTEAALYYMRLNTGRGTDEVSHLYSASPGSEVPLLTYCDEDSDMYSDRHALIVPPSTGLGNRVHHVPFTDSFASIHTRPMVPQKDLTVYGYGSVAWKDRMEVWKKQQIEKLQVVKNERVNDGDGDGFIVDELDDPGMDEGRQPLSRKLPIRSSRINPYRMLIFCRLAILGLFFHYRILHPVNDAFGLWLTSVICEIWFAVSWILDQFPKWYPIERETYLDRLSLRYEKEGKPSELAPVDVFVSTVDPLKEPPLITANTVLSILAVDYPVEKVACYVSDDGAAMLTFEALSYTAEFARKWVPFCKKFSIEPRAPEWYFSQKMDYLKHKVDPAFVMERRAMKRDYEEFKVKINALVSVSQKVPEDGWTMQDGTPWPGNNVRDHPGMIQVFLGHSGVCDMDGNELPRLVYVSREKRPGFDHHKKAGAMNSLIRVSAVLSNAPYLLNVDCDHYINNSKAIREAMCFMMDPQSGKKICYVQFPQRFDGIDRHDRYSNRNVVFFDINMKGLDGIQGPIYVGTGCVFRRQALYGFDAPKKKQPPGRTCNCWPKWCCLCCGMRKKKTGKVKDNQRKKPKETSKQIHALEHIEEGLQVTNAENNSETAQLKLEKKFGQSPVLVASTLLLNGGVPSNVNPASLLRESIQVISCGYEEKTEWGKEIGWIYGSVTEDILTGFKMHCHGWRSVYCMPKRAAFKGSAPINLSDRLHQVLRWALGSVEIFLSRHCPIWYGYGGGLKWLERFSYINSVVYPWTSLPLLVYCSLPAICLLTGKFIVPEISNYAGILFLLMFMSIAVTGILEMQWGKIGIDDWWRNEQFWVIGGVSSHLFALFQGLLKVLAGVSTNFTVTSKAADDGEFSELYIFKWTSLLIPPTTLLIINIVGVIVGVSDAINNGYDSWGPLFGRLFFALWVIVHLYPFLKGLLGKQDRVPTIILVWSILLASILTLLWVRVNPFVSKDGPVLEICGLDCLK

SEQ ID NO: 79003 - protein, 957 aa, Arabidopsis thaliana
  peptide (1)..(957): Ceres Seq. ID no. 12647802
  misc_feature (388)..(939): Homolog of NCBI NO: 15217853 NR Description: hypothetical protein; protein id: At1g02730.1
  misc_feature (68)..(345): Homolog of NCBI NO: 15217853 NR Description: hypothetical protein; protein id: At1g02730.1
  misc_feature (351)..(939): Homolog of NCBI NO: 15228448 NR Description: putative cellulose synthase catalytic subunit; id: At3g03050.1, supported by cDNA: gi_12619787, supported by gi_13430535 [Arabidopsis thaliana]
  misc_feature (113)..(345): Homolog of NCBI NO: 15228448 NR Description: putative cellulose synthase catalytic subunit; id: At3g03050.1, supported by cDNA: gi_12619787, supported by gi_13430535 [Arabidopsis thaliana]
  misc_feature (349)..(939): Homolog of NCBI NO: 27372782 NR Description: cellulose synthase-like protein D4 [Populus
  misc_feature (114)..(345): Homolog of NCBI NO: 27372782 NR Description: cellulose synthase-like protein D4 [Populus
  misc_feature (351)..(939): Homolog of NCBI NO: 15237873 NR Description: cellulose synthase catalytic subunit -like protein id: At5g16910.1 [Arabidopsis thaliana]
  misc_feature (113)..(345): Homolog of NCBI NO: 15237873 NR Description: cellulose synthase catalytic subunit -like protein id: At5g16910.1 [Arabidopsis thaliana]
  misc_feature (623)..(952): Homolog of NCBI NO: 13925884 NR Description: cellulose synthase D-like protein [Nicotiana
  misc_feature (108)..(345): Homolog of NCBI NO: 13925884 NR Description: cellulose synthase D-like protein [Nicotiana
MRLNTGRGTDEVSHLYSASPGSEVPLLTYCDEDSDMYSDRHALIVPPSTGLGNRVHHVPFTDSFASIHTRPMVPQKDLTVYGYGSVAWKDRMEVWKKQQIEKLQVVKNERVNDGDGDGFIVDELDDPGMDEGRQPLSRKLPIRSSRINPYRMLIFCRLAILGLFFHYRILHPVNDAFGLWLTSVICEIWFAVSWILDQFPKWYPIERETYLDRLSLRYEKEGKPSELAPVDVFVSTVDPLKEPPLITANTVLSILAVDYPVEKVACYVSDDGAAMLTFEALSYTAEFARKWVPFCKKFSIEPRAPEWYFSQKMDYLKHKVDPAFVMERRAMKRDYEEFKVKINALVSVSQKVPEDGWTMQDGTPWPGNNVRDHPGMIQVFLGHSGVCDMDGNELPRLVYVSREKRPGFDHHKKAGAMNSLIRVSAVLSNAPYLLNVDCDHYINNSKAIREAMCFMMDPQSGKKICYVQFPQRFDGIDRHDRYSNRNVVFFDINMKGLDGIQGPIYVGTGCVFRRQALYGFDAPKKKQPPGRTCNCWPKWCCLCCGMRKKKTGKVKDNQRKKPKETSKQIHALEHIEEGLQVTNAENNSETAQLKLEKKFGQSPVLVASTLLLNGGVPSNVNPASLLRESIQVISCGYEEKTEWGKEIGWIYGSVTEDILTGFKMHCHGWRSVYCMPKRAAFKGSAPINLSDRLHQVLRWALGSVEIFLSRHCPIWYGYGGGLKWLERFSYINSVVYPWTSLPLLVYCSLPAICLLTGKFIVPEISNYAGILFLLMFMSIAVTGILEMQWGKIGIDDWWRNEQFWVIGGVSSHLFALFQGLLKVLAGVSTNFTVTSKAADDGEFSELYIFKWTSLLIPPTTLLIINIVGVIVGVSDAINNGYDSWGPLFGRLFFALWVIVHLYPFLKGLLGKQDRVPTIILVWSILLASILTLLWVRVNPFVSKDGPVLEICGLDCLK

SEQ ID NO: 79004 - DNA, 1128 bp, Arabidopsis thaliana
  misc_feature (1)..(1128): Ceres Seq. ID no. 12647826
  misc_feature: MA Experiment ID: 20000440 Result: Up-regulated in Transcription
  misc_feature: MA Experiment 20000440 PARAMETER Experiment Name: At_Closed-Flower__Sub_P Parameter: Tissue Value: Closed Flower vs. Whole Plant
atggtagatcaaaatagagcatttggttgggcggccaacgacgaatcgggcgtcctctctccatttcatttctctagaagagaaaatggtgagaacgatgtaacagtgaagatcttgttctgtggtgtttgtcactctgatcttcataccatcaagaaccattggggattctctcgttaccccattattcccgggcatgaaatcgttggaatagcaacaaaagttgggaagaatgtgacaaagtttaaagaaggagaccgagtaggagtaggcgtaataatcggttcatgccaatcatgtgaatcatgtaaccaagacttagaaaactattgtcctaaagtcgttttcacatacaactctcgttcctctgacggaaccagaaaccaaggtggttattccgacgtaattgttgtcgatcaccgctttgtcctaagcattcccgacggtttaccaagcgattcaggcgcgccgctgctctgtgctggaatcactgtgtacagtcccatgaagtattatggcatgactaaagaatcagggaaacgtttaggtgtgaatggacttggtggacttggtcatatcgctgttaagattggtaaagcctttggtttaagagttactgtgattagtaggtcatcagagaaagagagagaagcaattgatcgactcggtgctgattcgtttcttgttacaacggattctcaaaagatgaaggaagcagttggaactatggatttcattatcgatacggtatcagcagaacatgctctattacctttgtttagtttgcttaaagtgagtggaaagcttgtggctttaggcttgctggagaagccactcgacctgccaattttccctctagttctcggaaggaaaatggtgggaggaagtcagattggagggatgaaggagacacaagagatgcttgagttctgtgccaagcataaaatcgtttcggatattgagctcataaagatgagtgatatcaactctgcgatggaccgtttggttaaatctgatgtcaggtaccggttcgtgatcgatgtggccaactctttactccctgagtcgtcagctgagattttaacggagcatgtcgaccatggagtctcgatcacgtctagattctga

SEQ ID NO: 79005 - protein, 375 aa, Arabidopsis thaliana
  peptide (1)..(375): Ceres Seq. ID no. 12647827
  misc_feature (1)..(375): Homolog of NCBI NO: 15227106 NR Description: putative cinnamyl-alcohol dehydrogenase; protein At2g21890.1 [Arabidopsis thaliana] >gi|25283040|pir||D84606
  misc_feature (1)..(375): Homolog of NCBI NO: 15227091 NR Description: putative cinnamyl-alcohol dehydrogenase; protein At2g21730.1 [Arabidopsis thaliana] >gi|25283043|pir||E84604
  misc_feature (5)..(354): Homolog of NCBI NO: 2146727 NR Description: cinnamyl-alcohol dehydrogenase (EC 1.1.1.195)
  misc_feature (5)..(354): Homolog of NCBI NO: 15235022 NR Description: cinnamyl-alcohol dehydrogenase CAD1; protein id: supported by cDNA: 34593., supported by cDNA: gi_13877594, by cDNA: gi_17978764 [Arabidopsis thaliana]
  misc_feature (5)..(354): Homolog of NCBI NO: 21592964 NR Description: cinnamyl-alcohol dehydrogenase CAD1 [Arabidopsis
  misc_feature (5)..(354): Homolog of NCBI NO: 1168728 NR Description: Probable mannitol dehydrogenase (NAD-dependent
  misc_feature (4)..(352): Homolog of NCBI NO: 22475166 NR Description: putative sinapyl alcohol dehydrogenase [Populus
  misc_feature (6)..(351): Homolog of NCBI NO: 10720088 NR Description: Probable mannitol dehydrogenase (NAD-dependent
  misc_feature (5)..(352): Homolog of NCBI NO: 3913193 NR Description: Probable mannitol dehydrogenase 1 (NAD-dependent
  misc_feature (4)..(352): Homolog of NCBI NO: 10720093 NR Description: Probable mannitol dehydrogenase (NAD-dependent dehydrogenase) >gi|4097522|gb|AAD10327.1| cinnamyl alcohol
MVDQNRAFGWAANDESGVLSPFHFSRRENGENDVTVKILFCGVCHSDLHTIKNHWGFSRYPIIPGHEIVGIATKVGKNVTKFKEGDRVGVGVIIGSCQSCESCNQDLENYCPKVVFTYNSRSSDGTRNQGGYSDVIVVDHRFVLSIPDGLPSDSGAPLLCAGITVYSPMKYYGMTKESGKRLGVNGLGGLGHIAVKIGKAFGLRVTVISRSSEKEREAIDRLGADSFLVTTDSQKMKEAVGTMDFIIDTVSAEHALLPLFSLLKVSGKLVALGLLEKPLDLPIFPLVLGRKMVGGSQIGGMKETQEMLEFCAKHKIVSDIELIKMSDINSAMDRLVKSDVRYRFVIDVANSLLPESSAEILTEHVDHGVSITSRF

SEQ ID NO: 79006 - protein, 207 aa, Arabidopsis thaliana
  peptide (1)..(207): Ceres Seq. ID no. 12647828
  misc_feature (1)..(207): Homolog of NCBI NO: 15227106 NR Description: putative cinnamyl-alcohol dehydrogenase; protein At2g21890.1 [Arabidopsis thaliana] >gi|25283040|pir||D84606
  misc_feature (1)..(207): Homolog of NCBI NO: 15227091 NR Description: putative cinnamyl-alcohol dehydrogenase; protein At2g21730.1 [Arabidopsis thaliana] >gi|25283043|pir||E84604
  misc_feature (1)..(186): Homolog of NCBI NO: 2146727 NR Description: cinnamyl-alcohol dehydrogenase (EC 1.1.1.195)
  misc_feature (1)..(186): Homolog of NCBI NO: 15235022 NR Description: cinnamyl-alcohol dehydrogenase CAD1; protein id: supported by cDNA: 34593., supported by cDNA: gi_13877594, by cDNA: gi_17978764 [Arabidopsis thaliana]
  misc_feature (1)..(186): Homolog of NCBI NO: 21592964 NR Description: cinnamyl-alcohol dehydrogenase CAD1 [Arabidopsis
  misc_feature (1)..(186): Homolog of NCBI NO: 1168728 NR Description: Probable mannitol dehydrogenase (NAD-dependent
  misc_feature (1)..(184): Homolog of NCBI NO: 22475166 NR Description: putative sinapyl alcohol dehydrogenase [Populus
  misc_feature (1)..(183): Homolog of NCBI NO: 10720088 NR Description: Probable mannitol dehydrogenase (NAD-dependent
  misc_feature (1)..(184): Homolog of NCBI NO: 3913193 NR Description: Probable mannitol dehydrogenase 1 (NAD-dependent
  misc_feature (1)..(184): Homolog of NCBI NO: 10720093 NR Description: Probable mannitol dehydrogenase (NAD-dependent dehydrogenase) >gi|4097522|gb|AAD10327.1| cinnamyl alcohol
MKYYGMTKESGKRLGVNGLGGLGHIAVKIGKAFGLRVTVISRSSEKEREAIDRLGADSFLVTTDSQKMKEAVGTMDFIIDTVSAEHALLPLFSLLKVSGKLVALGLLEKPLDLPIFPLVLGRKMVGGSQIGGMKETQEMLEFCAKHKIVSDIELIKMSDINSAMDRLVKSDVRYRFVIDVANSLLPESSAEILTEHVDHGVSITSRF

SEQ ID NO: 79007 - protein, 202 aa, Arabidopsis thaliana
  peptide (1)..(202): Ceres Seq. ID no. 12647829
  misc_feature (1)..(202): Homolog of NCBI NO: 15227106 NR Description: putative cinnamyl-alcohol dehydrogenase; protein At2g21890.1 [Arabidopsis thaliana] >gi|25283040|pir||D84606
  misc_feature (1)..(202): Homolog of NCBI NO: 15227091 NR Description: putative cinnamyl-alcohol dehydrogenase; protein At2g21730.1 [Arabidopsis thaliana] >gi|25283043|pir||E84604
  misc_feature (1)..(181): Homolog of NCBI NO: 2146727 NR Description: cinnamyl-alcohol dehydrogenase (EC 1.1.1.195)
  misc_feature (1)..(181): Homolog of NCBI NO: 15235022 NR Description: cinnamyl-alcohol dehydrogenase CAD1; protein id: supported by cDNA: 34593., supported by cDNA: gi_13877594, by cDNA: gi_17978764 [Arabidopsis thaliana]
  misc_feature (1)..(181): Homolog of NCBI NO: 21592964 NR Description: cinnamyl-alcohol dehydrogenase CAD1 [Arabidopsis
  misc_feature (1)..(181): Homolog of NCBI NO: 1168728 NR Description: Probable mannitol dehydrogenase (NAD-dependent
  misc_feature (1)..(179): Homolog of NCBI NO: 22475166 NR Description: putative sinapyl alcohol dehydrogenase [Populus
  misc_feature (1)..(178): Homolog of NCBI NO: 10720088 NR Description: Probable mannitol dehydrogenase (NAD-dependent
  misc_feature (1)..(179): Homolog of NCBI NO: 3913193 NR Description: Probable mannitol dehydrogenase 1 (NAD-dependent
  misc_feature (1)..(179): Homolog of NCBI NO: 10720093 NR Description: Probable mannitol dehydrogenase (NAD-dependent dehydrogenase) >gi|4097522|gb|AAD10327.1| cinnamyl alcohol
MTKESGKRLGVNGLGGLGHIAVKIGKAFGLRVTVISRSSEKEREAIDRLGADSFLVTTDSQKMKEAVGTMDFIIDTVSAEHALLPLFSLLKVSGKLVALGLLEKPLDLPIFPLVLGRKMVGGSQIGGMKETQEMLEFCAKHKIVSDIELIKMSDINSAMDRLVKSDVRYRFVIDVANSLLPESSAEILTEHVDHGVSITSRF

SEQ ID NO: 79008 - DNA, 2205 bp, Arabidopsis thaliana
  misc_feature (1)..(2205): Ceres Seq. ID no. 12647844
  misc_feature: MA Experiment ID: 20000306 Result: Down-regulated in Transcription
  misc_feature: MA Experiment 20000306 PARAMETER Experiment Name: At_Germinating_Seeds_Sub_P Parameter: Age (hr) Value: 6 vs. 0
  misc_feature: MA Experiment 20000306 PARAMETER Experiment Name: At_Germinating_Seeds_Sub_P Parameter: Organism Value: A. thaliana
  misc_feature: MA Experiment 20000306 PARAMETER Experiment Name: At_Germinating_Seeds_Sub_P Parameter: Plant Line Value: WS
  misc_feature: MA Experiment 20000306 PARAMETER Experiment Name: At_Germinating_Seeds_Sub_P Parameter: Tissue Value: Germinating Seeds
  misc_feature: MA Experiment ID: 20000307 Result: Down-regulated in Transcription
  misc_feature: MA Experiment 20000307 PARAMETER Experiment Name: At_Germinating_Seeds_Sub_P Parameter: Age (hr) Value: 24 vs. 0
  misc_feature: MA Experiment 20000307 PARAMETER Experiment Name: At_Germinating_Seeds_Sub_P Parameter: Organism Value: A. thaliana
  misc_feature: MA Experiment 20000307 PARAMETER Experiment Name: At_Germinating_Seeds_Sub_P Parameter: Plant Line Value: WS
  misc_feature: MA Experiment 20000307 PARAMETER Experiment Name: At_Germinating_Seeds_Sub_P Parameter: Tissue Value: Germinating Seeds
atggatgctccggttccactctctttatctactctgttagaactctgcaccaatctcttgcaaaaatctgtaaacaagtccaatggtcgtttcacagcgcaattggttcattgccgtgttatcaaatcgggtcttatgttcagcgtctacctgatgaataatctcatgaacgtctactcaaaaactggttatgctcttcacgcacgcaagctgttcgacgaaatgcctctaagaacagctttttcatggaacacggttctttcggcttattctaaacgaggagatatggattcgacttgtgagttctttgatcagttgcctcaaagggattcggtttcgtggactacgatgattgttgggtataagaacattggtcaatatcataaggctataagagttatgggggatatggtcaaggaagggattgagccgacgcagtttacgcttacgaatgtgcttgcatcggtggctgcaacgcggtgtatggaaacaggtaaaaaggttcattctttcatcgttaagcttggtcttcgcggtaacgtttctgtgtcgaattcactgcttaatatgtatgcaaaatgtggtgatccaatgatggcaaaatttgttttcgatagaatggttgttagagatatctcaagctggaatgctatgattgcgttacatatgcaggtcggtcaaatggatcttgctatggcgcagttcgagcaaatggctgagcgagatatagtcacttggaattctatgatttctggtttcaatcagagagggtatgatctcagagctctagatatcttttcgaagatgctgagggattctctgttgtcgccggatagattcactctggcgagtgtgttatctgcttgtgccaatcttgagaaactttgtattgggaagcagattcattcgcacattgttactacagggtttgatatttccggaatcgtgttaaatgcattgatctcgatgtattcgaggttcgcatggaccgccatgattgtaggatatgagcaacacggttcgtatggtgaagctataaaccttttcagatcaatggttggaggagggcagagaccaaacagttacactcttgcagcaatgttaagtgtagcttcaagtttggcatcattgagccatggcaagcaaatccatgggagtgctgtaaagtcaggggaaatttattcagtttctgtcagcaatgcattgataacaatgtatgcaaaggcgggtaacattacatcggcaagccgggcatttgatttgatacgctgtgagagggatacagtatcgtggacatccatgattatcgcgttggcacagcacggtcacgcagaagaagcacttgagctttttgagacaatgctgatggaaggactaagacctgatcacataacatatgttggtgttttctctgcctgtactcatgccggtttggtcaaccaaggtcgtcaatacttcgatatgatgaaggacgttgataagattatacctacccttagccactatgcttgtatggtggacctgtttggacgtgctggtttattgcaggaagcacaagagttcatcgaaaagatgcctattgagcctgatgtagtgacatggggttcactgctttctgcttgcagagttcacaagaacatcgatcttgggaaagttgcagcagagagattgcttcttctcgagccagagaacagcggggcatactcagccttggctaacttatactcagcttgtggaaaatgggaagaagctgctaagataagaaaatcaatgaaagatggaagagtaaagaaggaacaagggtttagctggattgaagtgaagcataaagtccatgtctttggagtggaagacgggactcatccagagaagaacgagatctacatgaccatgaagaagatttgggacgagatcaagaaaatgggttatgttcccgacacagcttctgtactacacgacctcgaagaagaggttaaagaacagattctaaggcaccacagcgagaaactagcaatcgcatttggactaattagcactccggataaaaccacattgaggatcatgaagaatctcagagtgtgcaatgattgccacacggctataaagttcatttccaagcttgtgggaagggaaatcatagtgagagatacaacaagatttcaccatttcaaagatgggttttgttcttgccgagattattggtga

SEQ ID NO: 79009 - protein, 734 aa, Arabidopsis thaliana
  peptide (1)..(734): Ceres Seq. ID no. 12647845
  misc_feature (500)..(534): Pfam Name: PPR repeat Pfam Description: PPR repeat
  misc_feature (328)..(734): Homolog of NCBI NO: 34896896 NR Description: hypothetical protein [Oryza sativa (japonica group)] >gi|24899461|gb|AAN65031.1| hypothetical protein [Oryza
  misc_feature (12)..(326): Homolog of NCBI NO: 34896896 NR Description: hypothetical protein [Oryza sativa (japonica group)] >gi|24899461|gb|AAN65031.1| hypothetical protein [Oryza
  misc_feature (318)..(734): Homolog of NCBI NO: 15227144 NR Description: hypothetical protein; protein id: At2g22070.1
  misc_feature (1)..(591): Homolog of NCBI NO: 15227144 NR Description: hypothetical protein; protein id: At2g22070.1
  misc_feature (328)..(734): Homolog of NCBI NO: 15221566 NR Description: hypothetical protein; protein id: At1g68930.1
  misc_feature (26)..(326): Homolog of NCBI NO: 15221566 NR Description: hypothetical protein; protein id: At1g68930.1
  misc_feature (328)..(734): Homolog of NCBI NO: 15223099 NR Description: unknown protein; protein id: At1g08070.1 thaliana] >gi|8778839|gb|AAF79838.1|AC026875_18 T6D22.15
  misc_feature (103)..(368): Homolog of NCBI NO: 15223099 NR Description: unknown protein; protein id: At1g08070.1 thaliana] >gi|8778839|gb|AAF79838.1|AC026875_18 T6D22.15
  misc_feature (39)..(734): Homolog of NCBI NO: 15235498 NR Description: hypothetical protein; protein id: At4g02750.1
  misc_feature (61)..(734): Homolog of NCBI NO: 37535570 NR Description: hypothetical protein [Oryza sativa (japonica group)] >gi|16905194|gb|AAL31064.1| hypothetical protein [Oryza >gi|31432781|gb|AAP54374.1| hypothetical protein [Oryza sativa
MDAPVPLSLSTLLELCTNLLQKSVNKSNGRFTAQLVHCRVIKSGLMFSVYLMNNLMNVYSKTGYALHARKLFDEMPLRTAFSWNTVLSAYSKRGDMDSTCEFFDQLPQRDSVSWTTMIVGYKNIGQYHKAIRVMGDMVKEGIEPTQFTLTNVLASVAATRCMETGKKVHSFIVKLGLRGNVSVSNSLLNMYAKCGDPMMAKFVFDRMVVRDISSWNAMIALHMQVGQMDLAMAQFEQMAERDIVTWNSMISGFNQRGYDLRALDIFSKMLRDSLLSPDRFTLASVLSACANLEKLCIGKQIHSHIVTTGFDISGIVLNALISMYSRFAWTAMIVGYEQHGSYGEAINLFRSMVGGGQRPNSYTLAAMLSVASSLASLSHGKQIHGSAVKSGEIYSVSVSNALITMYAKAGNITSASRAFDLIRCERDTVSWTSMIIALAQHGHAEEALELFETMLMEGLRPDHITYVGVFSACTHAGLVNQGRQYFDMMKDVDKIIPTLSHYACMVDLFGRAGLLQEAQEFIEKMPIEPDVVTWGSLLSACRVHKNIDLGKVAAERLLLLEPENSGAYSALANLYSACGKWEEAAKIRKSMKDGRVKKEQGFSWIEVKHKVHVFGVEDGTHPEKNEIYMTMKKIWDEIKKMGYVPDTASVLHDLEEEVKEQILRHHSEKLAIAFGLISTPDKTTLRIMKNLRVCNDCHTAIKFISKLVGREIIVRDTTRFHHFKDGFCSCRDYW

SEQ ID NO: 79010 - protein, 689 aa, Arabidopsis thaliana
  peptide (1)..(689): Ceres Seq. ID no. 12647846
  misc_feature (455)..(489): Pfam Name: PPR repeat Pfam Description: PPR repeat
  misc_feature (283)..(689): Homolog of NCBI NO: 34896896 NR Description: hypothetical protein [Oryza sativa (japonica group)] >gi|24899461|gb|AAN65031.1| hypothetical protein [Oryza
  misc_feature (1)..(281): Homolog of NCBI NO: 34896896 NR Description: hypothetical protein [Oryza sativa (japonica group)] >gi|24899461|gb|AAN65031.1| hypothetical protein [Oryza
  misc_feature (273)..(689): Homolog of NCBI NO: 15227144 NR Description: hypothetical protein; protein id: At2g22070.1
  misc_feature (1)..(546): Homolog of NCBI NO: 15227144 NR Description: hypothetical protein; protein id: At2g22070.1
  misc_feature (283)..(689): Homolog of NCBI NO: 15221566 NR Description: hypothetical protein; protein id: At1g68930.1
  misc_feature (1)..(281): Homolog of NCBI NO: 15221566 NR Description: hypothetical protein; protein id: At1g68930.1
  misc_feature (283)..(689): Homolog of NCBI NO: 15223099 NR Description: unknown protein; protein id: At1g08070.1 thaliana] >gi|8778839|gb|AAF79838.1|AC026875_18 T6D22.15
  misc_feature (58)..(323): Homolog of NCBI NO: 15223099 NR Description: unknown protein; protein id: At1g08070.1 thaliana] >gi|8778839|gb|AAF79838.1|AC026875_18 T6D22.15
  misc_feature (1)..(689): Homolog of NCBI NO: 15235498 NR Description: hypothetical protein; protein id: At4g02750.1
  misc_feature (16)..(689): Homolog of NCBI NO: 37535570 NR Description: hypothetical protein [Oryza sativa (japonica group)] >gi|16905194|gb|AAL31064.1| hypothetical protein [Oryza >gi|31432781|gb|AAP54374.1| hypothetical protein [Oryza sativa
MFSVYLMNNLMNVYSKTGYALHARKLFDEMPLRTAFSWNTVLSAYSKRGDMDSTCEFFDQLPQRDSVSWTTMIVGYKNIGQYHKAIRVMGDMVKEGIEPTQFTLTNVLASVAATRCMETGKKVHSFIVKLGLRGNVSVSNSLLNMYAKCGDPMMAKFVFDRMVVRDISSWNAMIALHMQVGQMDLAMAQFEQMAERDIVTWNSMISGFNQRGYDLRALDIFSKMLRDSLLSPDRFTLASVLSACANLEKLCIGKQIHSHIVTTGFDISGIVLNALISMYSRFAWTAMIVGYEQHGSYGEAINLFRSMVGGGQRPNSYTLAAMLSVASSLASLSHGKQIHGSAVKSGEIYSVSVSNALITMYAKAGNITSASRAFDLIRCERDTVSWTSMIIALAQHGHAEEALELFETMLMEGLRPDHITYVGVFSACTHAGLVNQGRQYFDMMKDVDKIIPTLSHYACMVDLFGRAGLLQEAQEFIEKMPIEPDVVTWGSLLSACRVHKNIDLGKVAAERLLLLEPENSGAYSALANLYSACGKWEEAAKIRKSMKDGRVKKEQGFSWIEVKHKVHVFGVEDGTHPEKNEIYMTMKKIWDEIKKMGYVPDTASVLHDLEEEVKEQILRHHSEKLAIAFGLISTPDKTTLRIMKNLRVCNDCHTAIKFISKLVGREIIVRDTTRFHHFKDGFCSCRDYW

SEQ ID NO: 79011 - protein, 683 aa, Arabidopsis thaliana
  peptide (1)..(683): Ceres Seq. ID no. 12647847
  misc_feature (449)..(483): Pfam Name: PPR repeat Pfam Description: PPR repeat
  misc_feature (277)..(683): Homolog of NCBI NO: 34896896 NR Description: hypothetical protein [Oryza sativa (japonica group)] >gi|24899461|gb|AAN65031.1| hypothetical protein [Oryza
  misc_feature (1)..(275): Homolog of NCBI NO: 34896896 NR Description: hypothetical protein [Oryza sativa (japonica group)] >gi|24899461|gb|AAN65031.1| hypothetical protein [Oryza
  misc_feature (267)..(683): Homolog of NCBI NO: 15227144 NR Description: hypothetical protein; protein id: At2g22070.1
  misc_feature (1)..(540): Homolog of NCBI NO: 15227144 NR Description: hypothetical protein; protein id: At2g22070.1
  misc_feature (277)..(683): Homolog of NCBI NO: 15221566 NR Description: hypothetical protein; protein id: At1g68930.1
  misc_feature (1)..(275): Homolog of NCBI NO: 15221566 NR Description: hypothetical protein; protein id: At1g68930.1
  misc_feature (277)..(683): Homolog of NCBI NO: 15223099 NR Description: unknown protein; protein id: At1g08070.1 thaliana] >gi|8778839|gb|AAF79838.1|AC026875_18 T6D22.15
  misc_feature (52)..(317): Homolog of NCBI NO: 15223099 NR Description: unknown protein; protein id: At1g08070.1 thaliana] >gi|8778839|gb|AAF79838.1|AC026875_18 T6D22.15
  misc_feature (1)..(683): Homolog of NCBI NO: 15235498 NR Description: hypothetical protein; protein id: At4g02750.1
  misc_feature (10)..(683): Homolog of NCBI NO: 37535570 NR Description: hypothetical protein [Oryza sativa (japonica group)] >gi|16905194|gb|AAL31064.1| hypothetical protein [Oryza >gi|31432781|gb|AAP54374.1| hypothetical protein [Oryza sativa
MNNLMNVYSKTGYALHARKLFDEMPLRTAFSWNTVLSAYSKRGDMDSTCEFFDQLPQRDSVSWTTMIVGYKNIGQYHKAIRVMGDMVKEGIEPTQFTLTNVLASVAATRCMETGKKVHSFIVKLGLRGNVSVSNSLLNMYAKCGDPMMAKFVFDRMVVRDISSWNAMIALHMQVGQMDLAMAQFEQMAERDIVTWNSMISGFNQRGYDLRALDIFSKMLRDSLLSPDRFTLASVLSACANLEKLCIGKQIHSHIVTTGFDISGIVLNALISMYSRFAWTAMIVGYEQHGSYGEAINLFRSMVGGGQRPNSYTLAAMLSVASSLASLSHGKQIHGSAVKSGEIYSVSVSNALITMYAKAGNITSASRAFDLIRCERDTVSWTSMIIALAQHGHAEEALELFETMLMEGLRPDHITYVGVFSACTHAGLVNQGRQYFDMMKDVDKIIPTLSHYACMVDLFGRAGLLQEAQEFIEKMPIEPDVVTWGSLLSACRVHKNIDLGKVAAERLLLLEPENSGAYSALANLYSACGKWEEAAKIRKSMKDGRVKKEQGFSWIEVKHKVHVFGVEDGTHPEKNEIYMTMKKIWDEIKKMGYVPDTASVLHDLEEEVKEQILRHHSEKLAIAFGLISTPDKTTLRIMKNLRVCNDCHTAIKFISKLVGREIIVRDTTRFHHFKDGFCSCRDYW

SEQ ID NO: 79012 - DNA, 1674 bp, Arabidopsis thaliana
  misc_feature (1)..(1674): Ceres Seq. ID no. 12648005
  misc_feature: MA Experiment ID: 20000184 Result: Down-regulated in Transcription
  misc_feature: MA Experiment 20000184 PARAMETER Experiment Name: At_Shoots__P Parameter: Age (day) Value: 7
  misc_feature: MA Experiment 20000184 PARAMETER Experiment Name: At_Shoots__P Parameter: Tissue Value: Shoots vs. Whole Plant
  misc_feature: MA Experiment ID: 20000234 Result: Down-regulated in Transcription
  misc_feature: MA Experiment 20000234 PARAMETER Experiment Name: At_Siliques_P Parameter: Age (day) Value: 21
  misc_feature: MA Experiment 20000234 PARAMETER Experiment Name: At_Siliques_P Parameter: Organism Value: A. thaliana
  misc_feature: MA Experiment 20000234 PARAMETER Experiment Name: At_Siliques_P Parameter: Plant Line Value: WS
  misc_feature: MA Experiment 20000234 PARAMETER Experiment Name: At_Siliques_P Parameter: Tissue Value: Less Than 5mm Siliques vs. Whole Plant
  misc_feature: MA Experiment ID: 20000235 Result: Down-regulated in Transcription
  misc_feature: MA Experiment 20000235 PARAMETER Experiment Name: At_Siliques_P Parameter: Age (day) Value: 21
  misc_feature: MA Experiment 20000235 PARAMETER Experiment Name: At_Siliques_P Parameter: Organism Value: A. thaliana
  misc_feature: MA Experiment 20000235 PARAMETER Experiment Name: At_Siliques_P Parameter: Plant Line Value: WS
  misc_feature: MA Experiment 20000235 PARAMETER Experiment Name: At_Siliques_P Parameter: Tissue Value: 5-10mm Siliques vs. Whole Plant
  misc_feature: MA Experiment ID: 20000264 Result: Down-regulated in Transcription
  misc_feature: MA Experiment 20000264 PARAMETER Experiment Name: At_Open_Flower_P Parameter: Age (day) Value: 21
  misc_feature: MA Experiment 20000264 PARAMETER Experiment Name: At_Open_Flower_P Parameter: Plant Line Value: WS
  misc_feature: MA Experiment 20000264 PARAMETER Experiment Name: At_Open_Flower_P Parameter: Tissue Value: Open Flower vs. Whole Plant
  misc_feature: MA Experiment ID: 20000265 Result: Down-regulated in Transcription
  misc_feature: MA Experiment 20000265 PARAMETER Experiment Name: At_Open_Flower_P Parameter: Age (day) Value: 21
  misc_feature: MA Experiment 20000265 PARAMETER Experiment Name: At_Open_Flower_P Parameter: Plant Line Value: WS
  misc_feature: MA Experiment 20000265 PARAMETER Experiment Name: At_Open_Flower_P Parameter: Tissue Value: Closed Flower vs. Whole Plant
  misc_feature: MA Experiment ID: 20000286 Result: Down-regulated in Transcription
  misc_feature: MA Experiment 20000286 PARAMETER Experiment Name: At_Open_Flower_P Parameter: Age (day) Value: 21
  misc_feature: MA Experiment 20000286 PARAMETER Experiment Name: At_Open_Flower_P Parameter: Plant Line Value: WS
  misc_feature: MA Experiment 20000286 PARAMETER Experiment Name: At_Open_Flower_P Parameter: Tissue Value: Half Open vs. Whole Plant
  misc_feature: MA Experiment ID: 20000495 Result: Down-regulated in Transcription
  misc_feature: MA Experiment 20000495 PARAMETER Experiment Name: At_Guard_Cells_P Parameter: Harvest Date Value: 8/2/2002
  misc_feature: MA Experiment 20000495 PARAMETER Experiment Name: At_Guard_Cells_P Parameter: Organism Value: A. thaliana
  misc_feature: MA Experiment 20000495 PARAMETER Experiment Name: At_Guard_Cells_P Parameter: Tissue Value: Guard Cells vs. Leaves
  misc_feature: MA Experiment ID: 20000496 Result: Down-regulated in Transcription
  misc_feature: MA Experiment 20000496 PARAMETER Experiment Name: At_Guard_Cells_P Parameter: Harvest Date Value: 7/19/2002
  misc_feature: MA Experiment 20000496 PARAMETER Experiment Name: At_Guard_Cells_P Parameter: Organism Value: Canola
  misc_feature: MA Experiment 20000496 PARAMETER Experiment Name: At_Guard_Cells_P Parameter: Tissue Value: Guard Cells vs. Leaves
atggcacatcttcaaagaacatttcctactgagatgtcaaaaggtagagctagctttccaaaaggctttctctttggaactgcttcatcttcttatcagtacgaaggagcagtgaatgaaggtgcgagaggacaaagcgtgtgggatcatttctccaacaggtttcctcacagaatcagtgattctagcgacggaaacgttgccgttgatttctaccatcgttacaaggaagatattaagagaatgaaggatataaacatggattcgtttcggctttccattgcttggccacgagttctaccttatggcaaaagggatagaggagttagtgaagaaggaattaagttttacaatgatgttattgatgaactcttagccaatgaaatcactcctcttgttactatctttcattgggacataccacaggatcttgaagatgaatacggcggttttctaagcgaagatgacttcagagactatgcgagtctctgcttcgagagatttggggacagagtgagtctgtggtgcacaatgaatgagccgtgggtctacagtgtcgcgggctatgacacaggaaggaaagcgccaggacggtgctccaagtatgttaatggcgctagtgttgctggaatgtcgggatacgaggcatatattgtgagccataacatgcttctagcgcacgcagaagcagtggaagtgtttagaaaatgtgaccatattaaaaacggacaaattgggattgcgcataatccactttggtacgagccatatgatccgagtgatccagatgatgtcgaaggatgtaatcgagctatggacttcatgcttggttggcatcagcatccgactgcttgtggagactatccagaaacgatgaagaaatcagttggagatagattaccgagttttacaccagaacaatctaagaaacttataggctcttgcgattacgttggtataaactactatagctcgcttttcgtgaagagtatcaaacacgtggatcctacgcaacctacttggagaactgaccaaggcgttgattggatgaaaaccaacatagatgggaaacaaatagcaaaacaaggaggatcagagtggagtttcacatatccaacaggactcagaaacattttgaagtatgtgaaaaaaacttatggcaatcctcccattctcataactgaaaacgggtatggtgaagtagcggaacagagtcagagtctttatatgtacaatccttcaatcgacacagagagattggagtacattgaaggacatatccacgctattcatcaagccatccatgaagatggagtaagagtggaaggttattacgtatggtcattgctagataacttcgagtggaacagtggatatggtgtgagatatggtttatattacattgattacaaagatgggcttagacgatacccgaaaatgtcggcgttatggttgaaagagttcttgaggtttgatcaagaagacgattcttcgacgtctaagaaagaagagaagaaagagagctatggaaaacagttattgcattctgttcaggacagtcaatttgttcattcgattaaagacagtggtgcgttacctgcggttttggggagcttgttcgttgtgtctgcaactgttggtacttctctgttcttcaaaggagctaataattga

SEQ ID NO: 79013 - protein, 557 aa, Arabidopsis thaliana
  peptide (1)..(557): Ceres Seq. ID no. 12648006
  misc_feature (1)..(557): Homolog of NCBI NO: 15224886 NR Description: glycosyl hydrolase family 1; protein id: supported by cDNA: gi_20259434 [Arabidopsis thaliana]
  misc_feature (13)..(512): Homolog of NCBI NO: 15232260 NR Description: glycosyl hydrolase family 1; protein id:
  misc_feature (10)..(489): Homolog of NCBI NO: 25289457 NR Description: probable beta-glucosidase (EC 3.2.1.21) ATA27 - Arabidopsis thaliana >gi|2746341|gb|AAC39504.1| ATA27
  misc_feature (10)..(489): Homolog of NCBI NO: 15222905 NR Description: glycosyl hydrolase family 1, protein id: At1g75940.1, supported by cDNA: gi_2746340
  misc_feature (10)..(489): Homolog of NCBI NO: 25404995 NR Description: protein T4O12.15 [imported] - Arabidopsis >gi|8778810|gb|AAF26759.2|AC007396_8 T4O12.15 [Arabidopsis
  misc_feature (16)..(489): Homolog of NCBI NO: 18377977 NR Description: putative beta-glucosidase [Arabidopsis thaliana]
  misc_feature (9)..(504): Homolog of NCBI NO: 15232626 NR Description: glycosyl hydrolase family 1; protein id: supported by cDNA: gi_14423459, supported by cDNA: gi_1732569 thaliana] >gi|6478919|gb|AAF14024.1|AC011436_8 thioglucosidase 3D
  misc_feature (16)..(490): Homolog of NCBI NO: 22327030 NR Description: glycosyl hydrolase family 1; protein id:
  misc_feature (9)..(504): Homolog of NCBI NO: 22331243 NR Description: glycosyl hydrolase family 1; protein id: supported by cDNA: gi_16604492, supported by cDNA: gi_17381179,
  misc_feature (9)..(504): Homolog of NCBI NO: 1363489 NR Description: thioglucosidase (EC 3.2.1.147) 3D precursor - thaliana >gi|984052|emb|CAA61592.1| thioglucoside glucohydrolase thaliana] >gi|5524767|emb|CAB50792.1| thioglucoside
MAHLQRTFPTEMSKGRASFPKGFLFGTASSSYQYEGAVNEGARGQSVWDHFSNRFPHRISDSSDGNVAVDFYHRYKEDIKRMKDINMDSFRLSIAWPRVLPYGKRDRGVSEEGIKFYNDVIDELLANEITPLVTIFHWDIPQDLEDEYGGFLSEDDFRDYASLCFERFGDRVSLWCTMNEPWVYSVAGYDTGRKAPGRCSKYVNGASVAGMSGYEAYIVSHNMLLAHAEAVEVFRKCDHIKNGQIGIAHNPLWYEPYDPSDPDDVEGCNRAMDFMLGWHQHPTACGDYPETMKKSVGDRLPSFTPEQSKKLIGSCDYVGINYYSSLFVKSIKHVDPTQPTWRTDQGVDWMKTNIDGKQIAKQGGSEWSFTYPTGLRNILKYVKKTYGNPPILITENGYGEVAEQSQSLYMYNPSIDTERLEYIEGHIHAIHQAIHEDGVRVEGYYVWSLLDNFEWNSGYGVRYGLYYIDYKDGLRRYPKMSALWLKEFLRFDQEDDSSTSKKEEKKESYGKQLLHSVQDSQFVHSIKDSGALPAVLGSLFVVSATVGTSLFFKGANN

SEQ ID NO: 79014 - protein, 546 aa, Arabidopsis thaliana
  peptide (1)..(546): Ceres Seq. ID no. 12648007
  misc_feature (1)..(546): Homolog of NCBI NO: 15224886 NR Description: glycosyl hydrolase family 1; protein id: supported by cDNA: gi_20259434 [Arabidopsis thaliana]
  misc_feature (2)..(501): Homolog of NCBI NO: 15232260 NR Description: glycosyl hydrolase family 1; protein id:
  misc_feature (1)..(478): Homolog of NCBI NO: 25289457 NR Description: probable beta-glucosidase (EC 3.2.1.21) ATA27 - Arabidopsis thaliana >gi|2746341|gb|AAC39504.1| ATA27
  misc_feature (1)..(478): Homolog of NCBI NO: 15222905 NR Description: glycosyl hydrolase family 1, protein id: At1g75940.1, supported by cDNA: gi_2746340
  misc_feature (1)..(478): Homolog of NCBI NO: 25404995 NR Description: protein T4O12.15 [imported] - Arabidopsis >gi|8778810|gb|AAF26759.2|AC007396_8 T4O12.15 [Arabidopsis
  misc_feature (5)..(478): Homolog of NCBI NO: 18377977 NR Description: putative beta-glucosidase [Arabidopsis thaliana]
  misc_feature (1)..(493): Homolog of NCBI NO: 15232626 NR Description: glycosyl hydrolase family 1; protein id: supported by cDNA: gi_14423459, supported by cDNA: gi_1732569 thaliana] >gi|6478919|gb|AAF14024.1|AC011436_8 thioglucosidase 3D
  misc_feature (5)..(479): Homolog of NCBI NO: 22327030 NR Description: glycosyl hydrolase family 1; protein id:
  misc_feature (1)..(493): Homolog of NCBI NO: 22331243 NR Description: glycosyl hydrolase family 1; protein id: supported by cDNA: gi_16604492, supported by cDNA: gi_17381179,
  misc_feature (1)..(493): Homolog of NCBI NO: 1363489 NR Description: thioglucosidase (EC 3.2.1.147) 3D precursor - thaliana >gi|984052|emb|CAA61592.1| thioglucoside glucohydrolase thaliana] >gi|5524767|emb|CAB50792.1| thioglucoside
MSKGRASFPKGFLFGTASSSYQYEGAVNEGARGQSVWDHFSNRFPHRISDSSDGNVAVDFYHRYKEDIKRMKDINMDSFRLSIAWPRVLPYGKRDRGVSEEGIKFYNDVIDELLANEITPLVTIFHWDIPQDLEDEYGGFLSEDDFRDYASLCFERFGDRVSLWCTMNEPWVYSVAGYDTGRKAPGRCSKYVNGASVAGMSGYEAYIVSHNMLLAHAEAVEVFRKCDHIKNGQIGIAHNPLWYEPYDPSDPDDVEGCNRAMDFMLGWHQHPTACGDYPETMKKSVGDRLPSFTPEQSKKLIGSCDYVGINYYSSLFVKSIKHVDPTQPTWRTDQGVDWMKTNIDGKQIAKQGGSEWSFTYPTGLRNILKYVKKTYGNPPILITENGYGEVAEQSQSLYMYNPSIDTERLEYIEGHIHAIHQAIHEDGVRVEGYYVWSLLDNFEWNSGYGVRYGLYYIDYKDGLRRYPKMSALWLKEFLRFDQEDDSSTSKKEEKKESYGKQLLHSVQDSQFVHSIKDSGALPAVLGSLFVVSATVGTSLFFKGANN

SEQ ID NO: 79015 - protein, 476 aa, Arabidopsis thaliana
  peptide (1)..(476): Ceres Seq. ID no. 12648008
  misc_feature (1)..(476): Homolog of NCBI NO: 15224886 NR Description: glycosyl hydrolase family 1; protein id: supported by cDNA: gi_20259434 [Arabidopsis thaliana]
  misc_feature (1)..(431): Homolog of NCBI NO: 15232260 NR Description: glycosyl hydrolase family 1; protein id:
  misc_feature (1)..(408): Homolog of NCBI NO: 25289457 NR Description: probable beta-glucosidase (EC 3.2.1.21) ATA27 - Arabidopsis thaliana >gi|2746341|gb|AAC39504.1| ATA27
  misc_feature (1)..(408): Homolog of NCBI NO: 15222905 NR Description: glycosyl hydrolase family 1, protein id: At1g75940.1, supported by cDNA: gi_2746340
  misc_feature (1)..(408): Homolog of NCBI NO: 25404995 NR Description: protein T4O12.15 [imported] - Arabidopsis >gi|8778810|gb|AAF26759.2|AC007396_8 T4O12.15 [Arabidopsis
  misc_feature (1)..(408): Homolog of NCBI NO: 18377977 NR Description: putative beta-glucosidase [Arabidopsis thaliana]
  misc_feature (1)..(423): Homolog of NCBI NO: 15232626 NR Description: glycosyl hydrolase family 1; protein id: supported by cDNA: gi_14423459, supported by cDNA: gi_1732569 thaliana] >gi|6478919|gb|AAF14024.1|AC011436_8 thioglucosidase 3D
  misc_feature (1)..(409): Homolog of NCBI NO: 22327030 NR Description: glycosyl hydrolase family 1; protein id:
  misc_feature (1)..(423): Homolog of NCBI NO: 22331243 NR Description: glycosyl hydrolase family 1; protein id: supported by cDNA: gi_16604492, supported by cDNA: gi_17381179,
  misc_feature (1)..(423): Homolog of NCBI NO: 1363489 NR Description: thioglucosidase (EC 3.2.1.147) 3D precursor - thaliana >gi|984052|emb|CAA61592.1| thioglucoside glucohydrolase thaliana] >gi|5524767|emb|CAB50792.1| thioglucoside
MKDINMDSFRLSIAWPRVLPYGKRDRGVSEEGIKFYNDVIDELLANEITPLVTIFHWDIPQDLEDEYGGFLSEDDFRDYASLCFERFGDRVSLWCTMNEPWVYSVAGYDTGRKAPGRCSKYVNGASVAGMSGYEAYIVSHNMLLAHAEAVEVFRKCDHIKNGQIGIAHNPLWYEPYDPSDPDDVEGCNRAMDFMLGWHQHPTACGDYPETMKKSVGDRLPSFTPEQSKKLIGSCDYVGINYYSSLFVKSIKHVDPTQPTWRTDQGVDWMKTNIDGKQIAKQGGSEWSFTYPTGLRNILKYVKKTYGNPPILITENGYGEVAEQSQSLYMYNPSIDTERLEYIEGHIHAIHQAIHEDGVRVEGYYVWSLLDNFEWNSGYGVRYGLYYIDYKDGLRRYPKMSALWLKEFLRFDQEDDSSTSKKEEKKESYGKQLLHSVQDSQFVHSIKDSGALPAVLGSLFVVSATVGTSLFFKGANN

SEQ ID NO: 79016 - DNA, 913 bp, Arabidopsis thaliana
  misc_feature (1)..(913): Ceres Seq. ID no. 12648035
  misc_feature: MA Experiment ID: 108574 Result: Up-regulated in Transcription
  misc_feature: MA Experiment 108574 PARAMETER Experiment Name: At_Wounding__cDNA_P Parameter: Timepoint (hr) Value: 1
  misc_feature: MA Experiment 108574 PARAMETER Experiment Name: At_Wounding__cDNA_P Parameter: Tissue Value: Aerial
  misc_feature: MA Experiment 108574 PARAMETER Experiment Name: At_Wounding__cDNA_P Parameter: Treatment Value: Wounding vs. No Wounding
  misc_feature: MA Experiment ID: 108585 Result: Up-regulated in Transcription
  misc_feature: MA Experiment 108585 PARAMETER Experiment Name: At_5mM_NaNP_cDNA_P Parameter: Timepoint (hr) Value: 6
  misc_feature: MA Experiment 108585 PARAMETER Experiment Name: At_5mM_NaNP_cDNA_P Parameter: Tissue Value: Aerial
  misc_feature: MA Experiment 108585 PARAMETER Experiment Name: At_5mM_NaNP_cDNA_P Parameter: Treatment Value: null
  misc_feature: MA Experiment ID: 108667 Result: Up-regulated in Transcription
  misc_feature: MA Experiment 108667 PARAMETER Experiment Name: At_2mM_SA_cDNA_P Parameter: Plant Line Value: WS
  misc_feature: MA Experiment 108667 PARAMETER Experiment Name: At_2mM_SA_cDNA_P Parameter: Timepoint (hr) Value: 1
  misc_feature: MA Experiment 108667 PARAMETER Experiment Name: At_2mM_SA_cDNA_P Parameter: Treatment Value: 2mM SA vs. No Treatment
  misc_feature: MA Experiment ID: 20000171 Result: Down-regulated in Transcription
  misc_feature: MA Experiment 20000171 PARAMETER Experiment Name: At_42deg_Heat_P Parameter: Age (day) Value: 14
  misc_feature: MA Experiment 20000171 PARAMETER Experiment Name: At_42deg_Heat_P Parameter: Organism Value: A. thaliana
  misc_feature: MA Experiment 20000171 PARAMETER Experiment Name: At_42deg_Heat_P Parameter: Plant Line Value: WS
  misc_feature: MA Experiment 20000171 PARAMETER Experiment Name: At_42deg_Heat_P Parameter: Temperature (deg C) Value: 42 vs. 22
  misc_feature: MA Experiment 20000171 PARAMETER Experiment Name: At_42deg_Heat_P Parameter: Timepoint (hr) Value: 1
  misc_feature: MA Experiment 20000171 PARAMETER Experiment Name: At_42deg_Heat_P Parameter: Tissue Value: Aerial
  misc_feature: MA Experiment ID: 20000182 Result: Up-regulated in Transcription
  misc_feature: MA Experiment 20000182 PARAMETER Experiment Name: At_2mM_SA_P Parameter: Age (day) Value: 14
  misc_feature: MA Experiment 20000182 PARAMETER Experiment Name: At_2mM_SA_P Parameter: Organism Value: A. thaliana
  misc_feature: MA Experiment 20000182 PARAMETER Experiment Name: At_2mM_SA_P Parameter: Plant Line Value: WS
  misc_feature: MA Experiment 20000182 PARAMETER Experiment Name: At_2mM_SA_P Parameter: Timepoint (hr) Value: 6
  misc_feature: MA Experiment 20000182 PARAMETER Experiment Name: At_2mM_SA_P Parameter: Tissue Value: Aerial
  misc_feature: MA Experiment 20000182 PARAMETER Experiment Name: At_2mM_SA_P Parameter: Treatment Value: 2mM SA vs. No Treatment
  misc_feature: MA Experiment ID: 20000184 Result: Down-regulated in Transcription
  misc_feature: MA Experiment 20000184 PARAMETER Experiment Name: At_Shoots__P Parameter: Age (day) Value: 7
  misc_feature: MA Experiment 20000184 PARAMETER Experiment Name: At_Shoots__P Parameter: Tissue Value: Shoots vs. Whole Plant
  misc_feature: MA Experiment ID: 20000234 Result: Down-regulated in Transcription
  misc_feature: MA Experiment 20000234 PARAMETER Experiment Name: At_Siliques_P Parameter: Age (day) Value: 21
  misc_feature: MA Experiment 20000234 PARAMETER Experiment Name: At_Siliques_P Parameter: Organism Value: A. thaliana
  misc_feature: MA Experiment 20000234 PARAMETER Experiment Name: At_Siliques_P Parameter: Plant Line Value: WS
  misc_feature: MA Experiment 20000234 PARAMETER Experiment Name: At_Siliques_P Parameter: Tissue Value: Less Than 5mm Siliques vs. Whole Plant
  misc_feature: MA Experiment ID: 20000235 Result: Down-regulated in Transcription
  misc_feature: MA Experiment 20000235 PARAMETER Experiment Name: At_Siliques_P Parameter: Age (day) Value: 21
  misc_feature: MA Experiment 20000235 PARAMETER Experiment Name: At_Siliques_P Parameter: Organism Value: A. thaliana
  misc_feature: MA Experiment 20000235 PARAMETER Experiment Name: At_Siliques_P Parameter: Plant Line Value: WS
  misc_feature: MA Experiment 20000235 PARAMETER Experiment Name: At_Siliques_P Parameter: Tissue Value: 5-10mm Siliques vs. Whole Plant
  misc_feature: MA Experiment ID: 20000264 Result: Down-regulated in Transcription
  misc_feature: MA Experiment 20000264 PARAMETER Experiment Name: At_Open_Flower_P Parameter: Age (day) Value: 21
  misc_feature: MA Experiment 20000264 PARAMETER Experiment Name: At_Open_Flower_P Parameter: Plant Line Value: WS
  misc_feature: MA Experiment 20000264 PARAMETER Experiment Name: At_Open_Flower_P Parameter: Tissue Value: Open Flower vs. Whole Plant
  misc_feature: MA Experiment ID: 20000265 Result: Down-regulated in Transcription
  misc_feature: MA Experiment 20000265 PARAMETER Experiment Name: At_Open_Flower_P Parameter: Age (day) Value: 21
  misc_feature: MA Experiment 20000265 PARAMETER Experiment Name: At_Open_Flower_P Parameter: Plant Line Value: WS
  misc_feature: MA Experiment 20000265 PARAMETER Experiment Name: At_Open_Flower_P Parameter: Tissue Value: Closed Flower vs. Whole Plant
  misc_feature: MA Experiment ID: 20000267 Result: Up-regulated in Transcription
  misc_feature: MA Experiment 20000267 PARAMETER Experiment Name: At_Drought_P Parameter: Age (day) Value: 7
  misc_feature: MA Experiment 20000267 PARAMETER Experiment Name: At_Drought_P Parameter: Organism Value: A. thaliana
  misc_feature: MA Experiment 20000267 PARAMETER Experiment Name: At_Drought_P Parameter: Plant Line Value: WS
  misc_feature: MA Experiment 20000267 PARAMETER Experiment Name: At_Drought_P Parameter: Timepoint (hr) Value: 6
  misc_feature: MA Experiment 20000267 PARAMETER Experiment Name: At_Drought_P Parameter: Tissue Value: Whole Plant
  misc_feature: MA Experiment 20000267 PARAMETER Experiment Name: At_Drought_P Parameter: Treatment Value: Drought vs. No Drought
  misc_feature: MA Experiment ID: 20000286 Result: Down-regulated in Transcription
  misc_feature: MA Experiment 20000286 PARAMETER Experiment Name: At_Open_Flower_P Parameter: Age (day) Value: 21
  misc_feature: MA Experiment 20000286 PARAMETER Experiment Name: At_Open_Flower_P Parameter: Plant Line Value: WS
  misc_feature: MA Experiment 20000286 PARAMETER Experiment Name: At_Open_Flower_P Parameter: Tissue Value: Half Open vs. Whole Plant
  misc_feature: MA Experiment ID: 20000438 Result: Down-regulated in Transcription
  misc_feature: MA Experiment 20000438 PARAMETER Experiment Name: At_Shoots__P Parameter: Age (day) Value: 14
  misc_feature: MA Experiment 20000438 PARAMETER Experiment Name: At_Shoots__P Parameter: Tissue Value: Shoots vs. Whole Plant
  misc_feature: MA Experiment ID: 20000441 Result: Up-regulated in Transcription
  misc_feature: MA Experiment 20000441 PARAMETER Experiment Name: At_1uM_BR-BRZ__P Parameter: Tissue Value: Shoot Apices
  misc_feature: MA Experiment 20000441 PARAMETER Experiment Name: At_1uM_BR-BRZ__P Parameter: Treatment Value: 1uM BR vs. No Treatment
  misc_feature: MA Experiment ID: 20000460 Result: Up-regulated in Transcription
  misc_feature: MA Experiment 20000460 PARAMETER Experiment Name: At_10percent_PEG_P Parameter: Age (day) Value: 12
  misc_feature: MA Experiment 20000460 PARAMETER Experiment Name: At_10percent_PEG_P Parameter: Organism Value: A. thaliana
  misc_feature: MA Experiment 20000460 PARAMETER Experiment Name: At_10percent_PEG_P Parameter: Plant Line Value: WS
  misc_feature: MA Experiment 20000460 PARAMETER Experiment Name: At_10percent_PEG_P Parameter: Timepoint (day) Value: 12
  misc_feature: MA Experiment 20000460 PARAMETER Experiment Name: At_10percent_PEG_P Parameter: Tissue Value: Whole Plant
  misc_feature: MA Experiment 20000460 PARAMETER Experiment Name: At_10percent_PEG_P Parameter: Treatment Value: 10percent PEG vs. No Treatment
  misc_feature: MA Experiment ID: 20000527 Result: Up-regulated in Transcription
  misc_feature: MA Experiment 20000527 PARAMETER Experiment Name: At_10percent_PEG_P Parameter: Age (day) Value: 20
  misc_feature: MA Experiment 20000527 PARAMETER Experiment Name: At_10percent_PEG_P Parameter: Organism Value: A. thaliana
  misc_feature: MA Experiment 20000527 PARAMETER Experiment Name: At_10percent_PEG_P Parameter: Plant Line Value: WS
  misc_feature: MA Experiment 20000527 PARAMETER Experiment Name: At_10percent_PEG_P Parameter: Timepoint (day) Value: 20
  misc_feature: MA Experiment 20000527 PARAMETER Experiment Name: At_10percent_PEG_P Parameter: Tissue Value: Whole Plant
  misc_feature: MA Experiment 20000527 PARAMETER Experiment Name: At_10percent_PEG_P Parameter: Treatment Value: 10percent PEG vs. No Treatment
  misc_feature: MA Experiment ID: 20000573 Result: Down-regulated in Transcription
  misc_feature: MA Experiment 20000573 PARAMETER Experiment Name: At_100uM_ABA_Mutants__P Parameter: Organism Value: A. thaliana
  misc_feature: MA Experiment 20000573 PARAMETER Experiment Name: At_100uM_ABA_Mutants__P Parameter: Plant Line Value: CS22 vs. Ler wt
  misc_feature: MA Experiment 20000573 PARAMETER Experiment Name: At_100uM_ABA_Mutants__P Parameter: Timepoint (hr) Value: N/A
  misc_feature: MA Experiment 20000573 PARAMETER Experiment Name: At_100uM_ABA_Mutants__P Parameter: Tissue Value: Whole Plant
  misc_feature: MA Experiment 20000573 PARAMETER Experiment Name: At_100uM_ABA_Mutants__P Parameter: Treatment Value: None
  misc_feature: MA Experiment ID: 20000574 Result: Down-regulated in Transcription
  misc_feature: MA Experiment 20000574 PARAMETER Experiment Name: At_100uM_ABA_Mutants__P Parameter: Organism Value: A. thaliana
  misc_feature: MA Experiment 20000574 PARAMETER Experiment Name: At_100uM_ABA_Mutants__P Parameter: Plant Line Value: CS23 vs. Ler wt
  misc_feature: MA Experiment 20000574 PARAMETER Experiment Name: At_100uM_ABA_Mutants__P Parameter: Timepoint (hr) Value: N/A
  misc_feature: MA Experiment 20000574 PARAMETER Experiment Name: At_100uM_ABA_Mutants__P Parameter: Tissue Value: Whole Plant
  misc_feature: MA Experiment 20000574 PARAMETER Experiment Name: At_100uM_ABA_Mutants__P Parameter: Treatment Value: None
  misc_feature: MA Experiment ID: 20001773 Result: Down-regulated in Transcription
  misc_feature: MA Experiment 20001773 PARAMETER Experiment Name: At_Far-red-enriched-adult_P Parameter: Age (day) Value: 30
  misc_feature: MA Experiment 20001773 PARAMETER Experiment Name: At_Far-red-enriched-adult_P Parameter: Light Value: Far-red enriched vs. White
  misc_feature: MA Experiment 20001773 PARAMETER Experiment Name: At_Far-red-enriched-adult_P Parameter: Organism Value: A. thaliana
  misc_feature: MA Experiment 20001773 PARAMETER Experiment Name: At_Far-red-enriched-adult_P Parameter: Plant Line Value: Columbia
  misc_feature: MA Experiment 20001773 PARAMETER Experiment Name: At_Far-red-enriched-adult_P Parameter: Timepoint (hr) Value: 48
  misc_feature: MA Experiment 20001773 PARAMETER Experiment Name: At_Far-red-enriched-adult_P Parameter: Tissue Value: Aerial
acttcattagtctccaagaagaaaacatctctcactctctaaaatacacactctcatcaaaaaccttctcttcggttcagaagcattcaagaatccattatgagctcatctgattccgttaataacggcgttaactcacggatgtacttccgtaacccgagtttcagcaacgttatcttaaacgataactggagcgacttgccgttaagtgtcgacgattctcaagacatggctatttacaacactctccgtgatgccgttagctccggctggacaccctccgttcctcccgttacctctccggcggaggaaaataagcctccggcgacgaaggcgagtggctcacacgcgccgaggcagaaggggatgcagtacagaggagtgaggaggaggccgtgggggaaattcgcggcggagattagggatccgaagaagaacggagctagggtttggctcgggacttacgagacgccggaggacgcggcggtggcgtacgaccgagcggcgtttcagctcagaggatcgaaagctaagctgaattttccgcatttgattggttcttgtaagtatgagccggttaggattaggcctcgccgtcgctcgccggaaccgtcagtctccgatcagttaacgtcggagcagaagagggaaagccacgtggatgacggcgagtctagtttggttgtaccggagttggatttcacggtggatcagttttacttcgatggtagtttattaatggaccaatcagaatgttcttattctgataatcggatataattagttttaagattaagcaaaatttgtccaacgagttttgctgtatgaaatatctatcgatgactcaacaggttttgatcatgatcatatgtaatgtgatggaaattaaatattgacgtttgtttttttcttc

SEQ ID NO: 79017 - protein, 226 aa, Arabidopsis thaliana; identical to SEQ ID NO: 27387
  peptide (1)..(226): Ceres Seq. ID no. 12648036
  misc_feature (89)..(154): Pfam Name: AP2 domain Pfam Description: AP2 domain
  misc_feature (1)..(226): Homolog of NCBI NO: 15225361 NR Description: putative ethylene response element binding (EREBP); protein id: At2g44840.1, supported by cDNA: 6397., by cDNA: gi_13272436, supported by cDNA: gi_13899090, supported
  misc_feature (1)..(226): Homolog of NCBI NO: 21594007 NR Description: putative ethylene response element binding
  misc_feature (15)..(198): Homolog of NCBI NO: 7489123 NR Description: ethylene-responsive transcription factor ERF1 -
  misc_feature (8)..(191): Homolog of NCBI NO: 7489077 NR Description: transcription factor Pti4 - tomato (fragment)
  misc_feature (15)..(174): Homolog of NCBI NO: 8809571 NR Description: ethylene-responsive element binding factor
  misc_feature (21)..(196): Homolog of NCBI NO: 7489113 NR Description: DNA binding protein EREBP-2 - common tobacco
  misc_feature (15)..(185): Homolog of NCBI NO: 28274828 NR Description: ethylene response factor 1 [Lycopersicon
  misc_feature (29)..(198): Homolog of NCBI NO: 3695034 NR Description: ethylene response element binding protein 1
  misc_feature (15)..(172): Homolog of NCBI NO: 17385636 NR Description: ethylene-responsive element binding protein1
  misc_feature (74)..(185): Homolog of NCBI NO: 8980313 NR Description: AP2-domain DNA-binding protein [Catharanthus

SEQ ID NO: 79018 - protein, 212 aa, Arabidopsis thaliana; identical to SEQ ID NO: 27388
  peptide (1)..(212): Ceres Seq. ID no. 12648037
  misc_feature (75)..(140): Pfam Name: AP2 domain Pfam Description: AP2 domain
  misc_feature (1)..(212): Homolog of NCBI NO: 15225361 NR Description: putative ethylene response element binding (EREBP); protein id: At2g44840.1, supported by cDNA: 6397., by cDNA: gi_13272436, supported by cDNA: gi_13899090, supported
  misc_feature (1)..(212): Homolog of NCBI NO: 21594007 NR Description: putative ethylene response element binding
  misc_feature (1)..(184): Homolog of NCBI NO: 7489123 NR Description: ethylene-responsive transcription factor ERF1 -
  misc_feature (1)..(177): Homolog of NCBI NO: 7489077 NR Description: transcription factor Pti4 - tomato (fragment)
  misc_feature (1)..(160): Homolog of NCBI NO: 8809571 NR Description: ethylene-responsive element binding factor
  misc_feature (7)..(182): Homolog of NCBI NO: 7489113 NR Description: DNA binding protein EREBP-2 - common tobacco
  misc_feature (1)..(171): Homolog of NCBI NO: 28274828 NR Description: ethylene response factor 1 [Lycopersicon
  misc_feature (15)..(184): Homolog of NCBI NO: 3695034 NR Description: ethylene response element binding protein 1
  misc_feature (1)..(158): Homolog of NCBI NO: 17385636 NR Description: ethylene-responsive element binding protein1
  misc_feature (60)..(171): Homolog of NCBI NO: 8980313 NR Description: AP2-domain DNA-binding protein [Catharanthus

SEQ ID NO: 79019 - protein, 183 aa, Arabidopsis thaliana; identical to SEQ ID NO: 27389
  peptide (1)..(183): Ceres Seq. ID no. 12648038
  misc_feature (46)..(111): Pfam Name: AP2 domain Pfam Description: AP2 domain
  misc_feature (1)..(183): Homolog of NCBI NO: 15225361 NR Description: putative ethylene response element binding (EREBP); protein id: At2g44840.1, supported by cDNA: 6397., by cDNA: gi_13272436, supported by cDNA: gi_13899090, supported
  misc_feature (1)..(183): Homolog of NCBI NO: 21594007 NR Description: putative ethylene response element binding
  misc_feature (1)..(155): Homolog of NCBI NO: 7489123 NR Description: ethylene-responsive transcription factor ERF1 -
  misc_feature (1)..(148): Homolog of NCBI NO: 7489077 NR Description: transcription factor Pti4 - tomato (fragment)
  misc_feature (1)..(131): Homolog of NCBI NO: 8809571 NR Description: ethylene-responsive element binding factor
  misc_feature (1)..(153): Homolog of NCBI NO: 7489113 NR Description: DNA binding protein EREBP-2 - common tobacco
  misc_feature (1)..(142): Homolog of NCBI NO: 28274828 NR Description: ethylene response factor 1 [Lycopersicon
  misc_feature (1)..(155): Homolog of NCBI NO: 3695034 NR Description: ethylene response element binding protein 1
  misc_feature (1)..(129): Homolog of NCBI NO: 17385636 NR Description: ethylene-responsive element binding protein1
  misc_feature (31)..(142): Homolog of NCBI NO: 8980313 NR Description: AP2-domain DNA-binding protein [Catharanthus

SEQ ID NO: 79020 - DNA, 1117 bp, Arabidopsis thaliana
  misc_feature (1)..(1117): Ceres Seq. ID no. 12648042
  misc_feature: MA Experiment ID: 108595 Result: Down-regulated in Transcription
  misc_feature: MA Experiment 108595 PARAMETER Experiment Name: At_Ler-pi_Ovule_cDNA_P Parameter: Plant Line Value: null
  misc_feature: MA Experiment ID: 20000087 Result: Down-regulated in Transcription
  misc_feature: MA Experiment 20000087 PARAMETER Experiment Name: At_100uM_ABA_Mutants_cDNA_P Parameter: Plant Line Value: WS
  misc_feature: MA Experiment 20000087 PARAMETER Experiment Name: At_100uM_ABA_Mutants_cDNA_P Parameter: Timepoint (hr) Value: 6
  misc_feature: MA Experiment 20000087 PARAMETER Experiment Name: At_100uM_ABA_Mutants_cDNA_P Parameter: Tissue Value: Aerial
  misc_feature: MA Experiment 20000087 PARAMETER Experiment Name: At_100uM_ABA_Mutants_cDNA_P Parameter: Treatment Value: 100uM ABA vs. No Treatment
  misc_feature: MA Experiment ID: 20000113 Result: Up-regulated in Transcription
  misc_feature: MA Experiment 20000113 PARAMETER Experiment Name: At_42deg_Heat_cDNA_P Parameter: Temperature (deg C) Value: 42 vs. 22
  misc_feature: MA Experiment 20000113 PARAMETER Experiment Name: At_42deg_Heat_cDNA_P Parameter: Timepoint (hr) Value: 8
  misc_feature: MA Experiment 20000113 PARAMETER Experiment Name: At_42deg_Heat_cDNA_P Parameter: Tissue Value: Aerial
  misc_feature: MA Experiment ID: 20000185 Result: Down-regulated in Transcription
  misc_feature: MA Experiment 20000185 PARAMETER Experiment Name: At_Roots__P Parameter: Age (day) Value: 7 vs. 21
  misc_feature: MA Experiment 20000185 PARAMETER Experiment Name: At_Roots__P Parameter: Organism Value: A. thaliana
  misc_feature: MA Experiment 20000185 PARAMETER Experiment Name: At_Roots__P Parameter: Tissue Value: Roots vs. Whole Plant
  misc_feature: MA Experiment ID: 20000439 Result: Down-regulated in Transcription
  misc_feature: MA Experiment 20000439 PARAMETER Experiment Name: At_Roots__P Parameter: Age (day) Value: 14 vs. 21
  misc_feature: MA Experiment 20000439 PARAMETER Experiment Name: At_Roots__P Parameter: Organism Value: A. thaliana
  misc_feature: MA Experiment 20000439 PARAMETER Experiment Name: At_Roots__P Parameter: Tissue Value: Roots vs. Whole Plant
aggatcttcgagctgataattctattttctcaattcatcttctaagacttgtggtttctccttccttggagttcacagagaattgggatttatcctcccttgtccggtttctatgtggccttccacatcacctagattcaccatcaccacaccttatccacacccacgcgccgcctcttctttcttacaggtgaaagctttccaacgcggcgactttgaccgtttggctgataacgttaagtcaggtaaagcatggagagacgcgtggagaagcgctaacgatggattcgagcaattcgtttttgaggctaagaaaaccgctgagcgaattgatcgccaatacgctgtttctcgccgctttagctccgctgctagctcagccgctgaccgtgctcgtgagattgatcgtgagtttgggattactcctcgtgttaggactgtctctgccgatttcagtagaaatttccctaagtacaggaagcaattcagtgcattcttgaatacaccgcttggtggaagttttgctactattttcttcctttggtttgctctctctggatggctgttccgagttataataatcgccacttgggttcttccaattgctggccctcttctcattggtgcagtcgccaacaactttgtcatcaagggagaatgcccagcatgtaagaggcagtttatagggtacaagaaccaaatcatcagatgtgagggatgtgggaacatagtgtggcaaccacaaggcgatttcttctcaaaagatggcaacaacaacaacaacaataataatagcaagggaaactctaaaaagccacctaagtcccaaatcattgatgtcgattttgaggagaaatgattattagagacgagaatgaagcagaaggctctattggtgcactaatattcaagtgaagataaaaatatgtgtttatagctgaatcgtttactgtttttgtctgttttgagctgtagcaatcgtgttgcttgttgtgtacatgataaggtttctttgtagacgaacaaatctagtttccacaagcctagagacttgattgaaactctgaaagttcttacatgttagacaaatcatattatgaaaacaatttacatctcc

SEQ ID NO: 79021 - protein, 248 aa, Arabidopsis thaliana; identical to SEQ ID NO: 22558
  peptide (1)..(248): Ceres Seq. ID no. 12648043
  misc_feature (1)..(248): Homolog of NCBI NO: 18406650 NR Description: expressed protein; protein id: At2g44870.1, by cDNA: 33789., supported by cDNA: gi_13899074, supported by gi_18377519 [Arabidopsis thaliana]
  misc_feature (1)..(229): Homolog of NCBI NO: 7486940 NR Description: hypothetical protein At2g44870 [imported] -
  misc_feature (83)..(248): Homolog of NCBI NO: 7486940 NR Description: hypothetical protein At2g44870 [imported] -
  misc_feature (3)..(248): Homolog of NCBI NO: 37537000 NR Description: unknown protein [Oryza sativa (japonica

SEQ ID NO: 79022 - DNA, 1197 bp, Arabidopsis thaliana
  misc_feature (1)..(1197): Ceres Seq. ID no. 12648090
  misc_feature: MA Experiment ID: 108434 Result: Up-regulated in Transcription
  misc_feature: MA Experiment 108434 PARAMETER Experiment Name: At_Root_Tips_cDNA_P Parameter: Tissue Value: Root Tips
  misc_feature: MA Experiment ID: 108462 Result: Down-regulated in Transcription
  misc_feature: MA Experiment 108462 PARAMETER Experiment Name: At_Germinating_Seeds_cDNA_P Parameter: Age (day) Value: 2 vs. 0
  misc_feature: MA Experiment 108462 PARAMETER Experiment Name: At_Germinating_Seeds_cDNA_P Parameter: Tissue Value: Germinating Seeds
  misc_feature: MA Experiment ID: 108463 Result: Down-regulated in Transcription
  misc_feature: MA Experiment 108463 PARAMETER Experiment Name: At_Germinating_Seeds_cDNA_P Parameter: Age (day) Value: 3 vs. 0
  misc_feature: MA Experiment 108463 PARAMETER Experiment Name: At_Germinating_Seeds_cDNA_P Parameter: Tissue Value: Germinating Seeds
  misc_feature: MA Experiment ID: 108464 Result: Down-regulated in Transcription
  misc_feature: MA Experiment 108464 PARAMETER Experiment Name: At_Germinating_Seeds_cDNA_P Parameter: Age (day) Value: 4 vs. 0
  misc_feature: MA Experiment 108464 PARAMETER Experiment Name: At_Germinating_Seeds_cDNA_P Parameter: Tissue Value: Germinating Seeds
  misc_feature: MA Experiment ID: 108595 Result: Down-regulated in Transcription
  misc_feature: MA Experiment 108595 PARAMETER Experiment Name: At_Ler-pi_Ovule_cDNA_P Parameter: Plant Line Value: null
  misc_feature: MA Experiment ID: 20000224 Result: Down-regulated in Transcription
atggccagtgaatcagatgcatcgagcattgctactctttcctgtgctcgctgcgagaagcctgcacatcttcagtgtccgaaatgcatagacttaaagcttcctcgtgaacaagcctctttctgcactcaagaatgtttcaaggcagcttggagctcgcacaaatcagtacatgtgaaagctcagctgtcttcaatcggtgatcagaactctgatcttatttctcaaggctggctctattgcgtcaagaaaggccaggctagaacacctaagcttccacactttgattggactgggcctctaaagcaatatcccatatctaccaagcgtgttgtgcctgctgagattgagaaacctgactgggcaattgatgggactcccaaagttgaaccgaatagtgatctacaacatgttgttgagataaaaacgcctgaacaaatccagagaatgcgtgaaacctgtaaaattgccagagaggtcctggatgcagccgctagggtgattcaccccggtgtgactactgatgagattgatcgagtagttcatgaagcaactattgcagcaggaggatatccatcgcccctcaactactatttctttccgaaatcttgctgcacatctgttaatgaagtaatttgtcatggaattccggatgctaggaaactagaagatggtgatatagtaaatgtggatgtaacagtctgttataaaggttgccatggtgaccttaatgagacatactttgttggaaacgttgacgaagcatcacgtcaactggttaagtgcacatacgagtgcctggagaaagctatagcaattgttaaacctggagtaagatttcgtgaaattggagagatagtcaaccgccatgctacaatgtctgggttatcagtggtgagatcttattgtggtcatggtattggagatctcttccattgtgctccaaacattcctcactatgcaagaaacaaagcagttggagtgatgaaagcaggtcagactttcacaatcgagccaatgatcaacgcaggggggtggagggatcgaacatggcctgatggatggactgcagttaccgcagatggaaaacgcagcgctcagtttgagcataccctattggtaacggagactggtgttgaggttttaacagcgaggcttccttcatcgcctgacgtatatccttggcttaccaagtga

SEQ ID NO: 79023 - protein, 398 aa, Arabidopsis thaliana; identical to SEQ ID NO: 24085
  peptide (1)..(398): Ceres Seq. ID no. 12648091
  misc_feature (1)..(398): Homolog of NCBI NO: 15225437 NR Description: putative methionine aminopeptidase; protein id: supported by cDNA: 37621., supported by cDNA: gi_11320953, by cDNA: gi_20466152 [Arabidopsis thaliana]
  misc_feature (1)..(398): Homolog of NCBI NO: 21593270 NR Description: putative methionine aminopeptidase [Arabidopsis
  misc_feature (76)..(396): Homolog of NCBI NO: 37535920 NR Description: putative methionine aminopeptidase [Oryza sativa
  misc_feature (8)..(389): Homolog of NCBI NO: 577315 NR Description: KIAA0094 gene product is related to S.cerevisiae
  misc_feature (8)..(389): Homolog of NCBI NO: 33302602 NR Description: Methionine aminopeptidase 1 (MetAP 1) (MAP 1)
  misc_feature (18)..(393): Homolog of NCBI NO: 28436769 NR Description: Unknown (protein for IMAGE:5542221) [Xenopus
  misc_feature (8)..(389): Homolog of NCBI NO: 28202007 NR Description: methionyl aminopeptidase 1 [Mus musculus]
  misc_feature (93)..(390): Homolog of NCBI NO: 39583678 NR Description: Hypothetical protein CBG08323 [Caenorhabditis
  misc_feature (9)..(58): Homolog of NCBI NO: 39583678 NR Description: Hypothetical protein CBG08323 [Caenorhabditis
  misc_feature (93)..(390): Homolog of NCBI NO: 17543082 NR Description: Metallopeptidase family M24 [Caenorhabditis >gi|14574279|gb|AAK68429.1|AC024757_8 Hypothetical protein

SEQ ID NO: 79024 - protein, 249 aa, Arabidopsis thaliana; identical to SEQ ID NO: 24086
  peptide (1)..(249): Ceres Seq. ID no. 12648092
  misc_feature (1)..(249): Homolog of NCBI NO: 15225437 NR Description: putative methionine aminopeptidase; protein id: supported by cDNA: 37621., supported by cDNA: gi_11320953, by cDNA: gi_20466152 [Arabidopsis thaliana]
  misc_feature (1)..(249): Homolog of NCBI NO: 21593270 NR Description: putative methionine aminopeptidase [Arabidopsis
  misc_feature (1)..(247): Homolog of NCBI NO: 37535920 NR Description: putative methionine aminopeptidase [Oryza sativa
  misc_feature (1)..(240): Homolog of NCBI NO: 577315 NR Description: KIAA0094 gene product is related to S.cerevisiae
  misc_feature (1)..(240): Homolog of NCBI NO: 33302602 NR Description: Methionine aminopeptidase 1 (MetAP 1) (MAP 1)
  misc_feature (1)..(244): Homolog of NCBI NO: 28436769 NR Description: Unknown (protein for IMAGE:5542221) [Xenopus
  misc_feature (1)..(240): Homolog of NCBI NO: 28202007 NR Description: methionyl aminopeptidase 1 [Mus musculus]
  misc_feature (1)..(241): Homolog of NCBI NO: 39583678 NR Description: Hypothetical protein CBG08323 [Caenorhabditis
  misc_feature (1)..(241): Homolog of NCBI NO: 17543082 NR Description: Metallopeptidase family M24 [Caenorhabditis >gi|14574279|gb|AAK68429.1|AC024757_8 Hypothetical protein
  misc_feature (1)..(241): Homolog of NCBI NO: 30025090 NR Description: Hypothetical protein Y37E11AL.7 [Caenorhabditis

SEQ ID NO: 79025 - DNA, 1450 bp, Arabidopsis thaliana
  misc_feature (1)..(1450): Ceres Seq. ID no. 12648095
  misc_feature: MA Experiment ID: 108434 Result: Up-regulated in Transcription
  misc_feature: MA Experiment 108434 PARAMETER Experiment Name: At_Root_Tips_cDNA_P Parameter: Tissue Value: Root Tips
  misc_feature: MA Experiment ID: 108462 Result: Down-regulated in Transcription
  misc_feature: MA Experiment 108462 PARAMETER Experiment Name: At_Germinating_Seeds_cDNA_P Parameter: Age (day) Value: 2 vs. 0
  misc_feature: MA Experiment 108462 PARAMETER Experiment Name: At_Germinating_Seeds_cDNA_P Parameter: Tissue Value: Germinating Seeds
  misc_feature: MA Experiment ID: 108463 Result: Down-regulated in Transcription
  misc_feature: MA Experiment 108463 PARAMETER Experiment Name: At_Germinating_Seeds_cDNA_P Parameter: Age (day) Value: 3 vs. 0
  misc_feature: MA Experiment 108463 PARAMETER Experiment Name: At_Germinating_Seeds_cDNA_P Parameter: Tissue Value: Germinating Seeds
  misc_feature: MA Experiment ID: 108464 Result: Down-regulated in Transcription
  misc_feature: MA Experiment 108464 PARAMETER Experiment Name: At_Germinating_Seeds_cDNA_P Parameter: Age (day) Value: 4 vs. 0
  misc_feature: MA Experiment 108464 PARAMETER Experiment Name: At_Germinating_Seeds_cDNA_P Parameter: Tissue Value: Germinating Seeds
  misc_feature: MA Experiment ID: 108595 Result: Down-regulated in Transcription
  misc_feature: MA Experiment 108595 PARAMETER Experiment Name: At_Ler-pi_Ovule_cDNA_P Parameter: Plant Line Value: null
  misc_feature: MA Experiment ID: 20000224 Result: Down-regulated in Transcription
tctctatttctctatcaaaattcacaccggcgattttgagattgttctctgattggcttaatccgagagaatcaaggaattgaatggccagtgaatcagatgcatcgagcattgctactctttcctgtgctcgctgcgagaagcctgcacatcttcagtgtccgaaatgcatagacttaaagcttcctcgtgaacaagcctctttctgcactcaagaatgtttcaaggcagcttggagctcgcacaaatcagtacatgtgaaagctcagctgtcttcaatcggtgatcagaactctgatcttatttctcaaggctggctctattgcgtcaagaaaggccaggctagaacacctaagcttccacactttgattggactgggcctctaaagcaatatcccatatctaccaagcgtgttgtgcctgctgagattgagaaacctgactgggcaattgatgggactcccaaagttgaaccgaatagtgatctacaacatgttgttgagataaaaacgcctgaacaaatccagagaatgcgtgaaacctgtaaaattgccagagaggtcctggatgcagccgctagggtgattcaccccggtgtgactactgatgagattgatcgagtagttcatgaagcaactattgcagcaggaggatatccatcgcccctcaactactatttctttccgaaatcttgctgcacatctgttaatgaagtaatttgtcatggaattccggatgctaggaaactagaagatggtgatatagtaaatgtggatgtaacagtctgttataaaggttgccatggtgaccttaatgagacatactttgttggaaacgttgacgaagcatcacgtcaactggttaagtgcacatacgagtgcctggagaaagctatagcaattgttaaacctggagtaagatttcgtgaaattggagagatagtcaaccgccatgctacaatgtctgggttatcagtggtgagatcttattgtggtcatggtattggagatctcttccattgtgctccaaacattcctcactatgcaagaaacaaagcagttggagtgatgaaagcaggtcagactttcacaatcgagccaatgatcaacgcaggggggtggagggatcgaacatggcctgatggatggactgcagttaccgcagatggaaaacgcagcgctcagtttgagcataccctattggtaacggagactggtgttgaggttttaacagcgaggcttccttcatcgcctgacgtatatccttggcttaccaagtgattaagtgtttggttcctttttggttgtgattcgtaaacttgggaataatagtgtcatctttttgccattatagaccatttgatgttgttaccttgttgtctttgtttatgtaattttattattactatctgaaactgaatcttaaagacagagtcatactgtttcaaacc

SEQ ID NO: 79026 - protein, 398 aa, Arabidopsis thaliana; identical to SEQ ID NO: 24085
  peptide (1)..(398): Ceres Seq. ID no. 12648096
  misc_feature (1)..(398): Homolog of NCBI NO: 15225437 NR Description: putative methionine aminopeptidase; protein id: supported by cDNA: 37621., supported by cDNA: gi_11320953, by cDNA: gi_20466152 [Arabidopsis thaliana]
  misc_feature (1)..(398): Homolog of NCBI NO: 21593270 NR Description: putative methionine aminopeptidase [Arabidopsis
  misc_feature (76)..(396): Homolog of NCBI NO: 37535920 NR Description: putative methionine aminopeptidase [Oryza sativa
  misc_feature (8)..(389): Homolog of NCBI NO: 577315 NR Description: KIAA0094 gene product is related to S.cerevisiae
  misc_feature (8)..(389): Homolog of NCBI NO: 33302602 NR Description: Methionine aminopeptidase 1 (MetAP 1) (MAP 1)
  misc_feature (18)..(393): Homolog of NCBI NO: 28436769 NR Description: Unknown (protein for IMAGE:5542221) [Xenopus
  misc_feature (8)..(389): Homolog of NCBI NO: 28202007 NR Description: methionyl aminopeptidase 1 [Mus musculus]
  misc_feature (93)..(390): Homolog of NCBI NO: 39583678 NR Description: Hypothetical protein CBG08323 [Caenorhabditis
  misc_feature (9)..(58): Homolog of NCBI NO: 39583678 NR Description: Hypothetical protein CBG08323 [Caenorhabditis
  misc_feature (93)..(390): Homolog of NCBI NO: 17543082 NR Description: Metallopeptidase family M24 [Caenorhabditis >gi|14574279|gb|AAK68429.1|AC024757_8 Hypothetical protein

SEQ ID NO: 79027 - protein, 249 aa, Arabidopsis thaliana; identical to SEQ ID NO: 24086
  peptide (1)..(249): Ceres Seq. ID no. 12648097
  misc_feature (1)..(249): Homolog of NCBI NO: 15225437 NR Description: putative methionine aminopeptidase; protein id: supported by cDNA: 37621., supported by cDNA: gi_11320953, by cDNA: gi_20466152 [Arabidopsis thaliana]
  misc_feature (1)..(249): Homolog of NCBI NO: 21593270 NR Description: putative methionine aminopeptidase [Arabidopsis
  misc_feature (1)..(247): Homolog of NCBI NO: 37535920 NR Description: putative methionine aminopeptidase [Oryza sativa
  misc_feature (1)..(240): Homolog of NCBI NO: 577315 NR Description: KIAA0094 gene product is related to S.cerevisiae
  misc_feature (1)..(240): Homolog of NCBI NO: 33302602 NR Description: Methionine aminopeptidase 1 (MetAP 1) (MAP 1)
  misc_feature (1)..(244): Homolog of NCBI NO: 28436769 NR Description: Unknown (protein for IMAGE:5542221) [Xenopus
  misc_feature (1)..(240): Homolog of NCBI NO: 28202007 NR Description: methionyl aminopeptidase 1 [Mus musculus]
  misc_feature (1)..(241): Homolog of NCBI NO: 39583678 NR Description: Hypothetical protein CBG08323 [Caenorhabditis
  misc_feature (1)..(241): Homolog of NCBI NO: 17543082 NR Description: Metallopeptidase family M24 [Caenorhabditis >gi|14574279|gb|AAK68429.1|AC024757_8 Hypothetical protein
  misc_feature (1)..(241): Homolog of NCBI NO: 30025090 NR Description: Hypothetical protein Y37E11AL.7 [Caenorhabditis

SEQ ID NO: 79028 - DNA, 1524 bp, Arabidopsis thaliana
  misc_feature (1)..(1524): Ceres Seq. ID no. 12648141
  misc_feature: MA Experiment ID: 20000184 Result: Down-regulated in Transcription
  misc_feature: MA Experiment 20000184 PARAMETER Experiment Name: At_Shoots__P Parameter: Age (day) Value: 7
  misc_feature: MA Experiment 20000184 PARAMETER Experiment Name: At_Shoots__P Parameter: Tissue Value: Shoots vs. Whole Plant
  misc_feature: MA Experiment ID: 20000264 Result: Up-regulated in Transcription
  misc_feature: MA Experiment 20000264 PARAMETER Experiment Name: At_Open_Flower_P Parameter: Age (day) Value: 21
  misc_feature: MA Experiment 20000264 PARAMETER Experiment Name: At_Open_Flower_P Parameter: Plant Line Value: WS
  misc_feature: MA Experiment 20000264 PARAMETER Experiment Name: At_Open_Flower_P Parameter: Tissue Value: Open Flower vs. Whole Plant
  misc_feature: MA Experiment ID: 20000265 Result: Up-regulated in Transcription
  misc_feature: MA Experiment 20000265 PARAMETER Experiment Name: At_Open_Flower_P Parameter: Age (day) Value: 21
  misc_feature: MA Experiment 20000265 PARAMETER Experiment Name: At_Open_Flower_P Parameter: Plant Line Value: WS
  misc_feature: MA Experiment 20000265 PARAMETER Experiment Name: At_Open_Flower_P Parameter: Tissue Value: Closed Flower vs. Whole Plant
  misc_feature: MA Experiment ID: 20000286 Result: Up-regulated in Transcription
  misc_feature: MA Experiment 20000286 PARAMETER Experiment Name: At_Open_Flower_P Parameter: Age (day) Value: 21
  misc_feature: MA Experiment 20000286 PARAMETER Experiment Name: At_Open_Flower_P Parameter: Plant Line Value: WS
  misc_feature: MA Experiment 20000286 PARAMETER Experiment Name: At_Open_Flower_P Parameter: Tissue Value: Half Open vs. Whole Plant
  misc_feature: MA Experiment ID: 20000443 Result: Down-regulated in Transcription
  misc_feature: MA Experiment 20000443 PARAMETER Experiment Name: At_1uM_BR-BRZ__P Parameter: Tissue Value: Shoot Apices
  misc_feature: MA Experiment 20000443 PARAMETER Experiment Name: At_1uM_BR-BRZ__P Parameter: Treatment Value: 1uM BRZ vs. No Treatment
  misc_feature: MA Experiment ID: 20000794 Result: Up-regulated in Transcription
  misc_feature: MA Experiment 20000794 PARAMETER Experiment Name: At_Petals_P Parameter: Age (day) Value: 23-25 days
  misc_feature: MA Experiment 20000794 PARAMETER Experiment Name: At_Petals_P Parameter: Plant Line Value: WS
  misc_feature: MA Experiment 20000794 PARAMETER Experiment Name: At_Petals_P Parameter: Tissue Value: Petals vs. Whole plant
  misc_feature: MA Experiment ID: 20001773 Result: Up-regulated in Transcription
  misc_feature: MA Experiment 20001773 PARAMETER Experiment Name: At_Far-red-enriched-adult_P Parameter: Age (day) Value: 30
  misc_feature: MA Experiment 20001773 PARAMETER Experiment Name: At_Far-red-enriched-adult_P Parameter: Light Value: Far-red enriched vs. White
  misc_feature: MA Experiment 20001773 PARAMETER Experiment Name: At_Far-red-enriched-adult_P Parameter: Organism Value: A. thaliana
  misc_feature: MA Experiment 20001773 PARAMETER Experiment Name: At_Far-red-enriched-adult_P Parameter: Plant Line Value: Columbia
  misc_feature: MA Experiment 20001773 PARAMETER Experiment Name: At_Far-red-enriched-adult_P Parameter: Timepoint (hr) Value: 48
  misc_feature: MA Experiment 20001773 PARAMETER Experiment Name: At_Far-red-enriched-adult_P Parameter: Tissue Value: Aerial
  misc_feature: MA Experiment ID: 20001904 Result: Up-regulated in Transcription
  misc_feature: MA Experiment 20001904 PARAMETER Experiment Name: At_Drought_Reproduction_P Parameter: Age (day) Value: 37
  misc_feature: MA Experiment 20001904 PARAMETER Experiment Name: At_Drought_Reproduction_P Parameter: Organism Value: A. thaliana
  misc_feature: MA Experiment 20001904 PARAMETER Experiment Name: At_Drought_Reproduction_P Parameter: Plant Line Value: WS
  misc_feature: MA Experiment 20001904 PARAMETER Experiment Name: At_Drought_Reproduction_P Parameter: Timepoint (day) Value: 7
  misc_feature: MA Experiment 20001904 PARAMETER Experiment Name: At_Drought_Reproduction_P Parameter: Tissue Value: Rosettes
  misc_feature: MA Experiment 20001904 PARAMETER Experiment Name: At_Drought_Reproduction_P Parameter: Treatment Value: Drought vs. No Drought
  misc_feature: MA Experiment ID: 20001909 Result: Up-regulated in Transcription
  misc_feature: MA Experiment 20001909 PARAMETER Experiment Name: At_Drought_Reproduction_P Parameter: Age (day) Value: 35
  misc_feature: MA Experiment 20001909 PARAMETER Experiment Name: At_Drought_Reproduction_P Parameter: Organism Value: A. thaliana
  misc_feature: MA Experiment 20001909 PARAMETER Experiment Name: At_Drought_Reproduction_P Parameter: Plant Line Value: WS
  misc_feature: MA Experiment 20001909 PARAMETER Experiment Name: At_Drought_Reproduction_P Parameter: Timepoint (day) Value: 5
  misc_feature: MA Experiment 20001909 PARAMETER Experiment Name: At_Drought_Reproduction_P Parameter: Tissue Value: Flowers
  misc_feature: MA Experiment 20001909 PARAMETER Experiment Name: At_Drought_Reproduction_P Parameter: Treatment Value: Drought vs. No Drought
  misc_feature: MA Experiment ID: 20001911 Result: Down-regulated in Transcription
  misc_feature: MA Experiment 20001911 PARAMETER Experiment Name: At_Drought_Reproduction_P Parameter: Age (day) Value: 40
  misc_feature: MA Experiment 20001911 PARAMETER Experiment Name: At_Drought_Reproduction_P Parameter: Organism Value: A. thaliana
  misc_feature: MA Experiment 20001911 PARAMETER Experiment Name: At_Drought_Reproduction_P Parameter: Plant Line Value: WS
  misc_feature: MA Experiment 20001911 PARAMETER Experiment Name: At_Drought_Reproduction_P Parameter: Timepoint (day) Value: 10
  misc_feature: MA Experiment 20001911 PARAMETER Experiment Name: At_Drought_Reproduction_P Parameter: Tissue Value: Flowers
  misc_feature: MA Experiment 20001911 PARAMETER Experiment Name: At_Drought_Reproduction_P Parameter: Treatment Value: Drought vs. No Drought
atgtctctgcctctctattttctcttaacattattctttttcttctttgctaccgcaaaaacgcggagaagctctagcaccggcacgcttccaccgggtcctccgatactgccattggtcggaaacatattccaactcggattcaatcctcaccgttcacttgctgccttttcgaaaacgtacggacctataatgagtttgaagcttggaaggttaaccgcagtggttatatcttcaccagaagcagctaaagaggcacttagaacacacgaccatgtcatgtccgctcgaacctttaacgacgctcttcgagcctttgatcaccataaacattctattgtctggattcccccctctgctcgttggaggtttctgaagaaaacaataacaaaatatttgttatcaccgcaaaacttagatgctattcaatctttaagaatgagaaaggtggaggaactagtgagtttagtaaatgaatttcgcgagagaggagaagctattgacctggctcgtgcttccttcgtcacatctttcaatatcatctcaaatgctctgttttcagtagatttagcgacgtatgactctaactcctcgtcttacgaatttcacaacacagtggttcacctgacggatatcgccggtatacccaacgtaggagactatttccagtatatgaggtttcttgatttgcaaggtacccggaaaaaagcggtgctctgcatagagaaattgtttagggtttttcaagaattcattgatgctcgattagccaaaagattttctcggacagagaaagagcctaaagaggcttcaagcatcgatatgctagactcccttctggatctcacacagcaaaacgaagcagaattaacaatgaatgatctcaaacacttgcttctcgatgtgtttgttgcgggcacagacacaaactctagtacaatggaatgggcaatgacggagttattccgtagcacggagaagatggtcaaagcacagagtgagatacggcaagtgattggtcaaaacggtttcgttcaagaatctgatatcccgagtctgccttacttacaagcaattgtgaaagagactcttcgtttgcatcctgcagctcctttgatccctagaaaatcagaatccgatgttcagattatgggtttccttgttcctaaaaacacccaggttgttgtgaacgtatgggcgataggacgagacgcgagcgtgtgggaaaatccaatgaagttcgagccagagaggttcttgttacgagaaaccgatgtaaaaggcagagatttcgagttgataccgtttggatcaggaagaaggatgtgtccgggaatctcgatggctcttaagacaatgcatatggtgcttgcctctcttctctattcctttgactggaagcttcaaaacggtgtcgtccccggaaacattgacatgagcgagactttcggtcttaccttacacaaggccaaatctctttgtgccgtacccgtcaagaaacctacaatatcgtcttcttattaa

SEQ ID NO: 79029 - protein, 507 aa, Arabidopsis thaliana
  peptide (1)..(507): Ceres Seq. ID no. 12648142
  misc_feature (31)..(495): Pfam Name: Cytochrome P450 Pfam Description: Cytochrome P450
  misc_feature (1)..(507): Homolog of NCBI NO: 5915833 NR Description: Cytochrome P450 76C3 >gi|7430676|pir||T00871
  misc_feature (1)..(507): Homolog of NCBI NO: 30690070 NR Description: cytochrome p450 family [Arabidopsis thaliana]
  misc_feature (1)..(507): Homolog of NCBI NO: 26451374 NR Description: putative cytochrome P450 [Arabidopsis thaliana]
  misc_feature (5)..(504): Homolog of NCBI NO: 15225510 NR Description: cytochrome p450 family; protein id: At2g45550.1
  misc_feature (4)..(500): Homolog of NCBI NO: 15225512 NR Description: cytochrome p450 family; protein id: At2g45570.1, by cDNA: gi_17065047 [Arabidopsis thaliana] Cytochrome P450 76C2 >gi|7430675|pir||T00870 probable cytochrome
  misc_feature (3)..(500): Homolog of NCBI NO: 15233027 NR Description: cytochrome p450 family; protein id: At3g61040.1
  misc_feature (7)..(500): Homolog of NCBI NO: 30690062 NR Description: cytochrome P450 family [Arabidopsis thaliana]
  misc_feature (7)..(504): Homolog of NCBI NO: 15217636 NR Description: cytochrome P450 monooxygenase; protein id: [Arabidopsis thaliana] >gi|25282568|pir||F86460 probable
  misc_feature (7)..(484): Homolog of NCBI NO: 25282599 NR Description: cytochrome P450 monooxygenase [imported] - thaliana >gi|3164130|dbj|BAA28540.1| cytochrome P450
  misc_feature (1)..(495): Homolog of NCBI NO: 25282569 NR Description: probable cytochrome P450 [imported] - Arabidopsis >gi|9665096|gb|AAF97287.1|AC010164_9 Putative cytochrome P450
MSLPLYFLLTLFFFFFATAKTRRSSSTGTLPPGPPILPLVGNIFQLGFNPHRSLAAFSKTYGPIMSLKLGRLTAVVISSPEAAKEALRTHDHVMSARTFNDALRAFDHHKHSIVWIPPSARWRFLKKTITKYLLSPQNLDAIQSLRMRKVEELVSLVNEFRERGEAIDLARASFVTSFNIISNALFSVDLATYDSNSSSYEFHNTVVHLTDIAGIPNVGDYFQYMRFLDLQGTRKKAVLCIEKLFRVFQEFIDARLAKRFSRTEKEPKEASSIDMLDSLLDLTQQNEAELTMNDLKHLLLDVFVAGTDTNSSTMEWAMTELFRSTEKMVKAQSEIRQVIGQNGFVQESDIPSLPYLQAIVKETLRLHPAAPLIPRKSESDVQIMGFLVPKNTQVVVNVWAIGRDASVWENPMKFEPERFLLRETDVKGRDFELIPFGSGRRMCPGISMALKTMHMVLASLLYSFDWKLQNGVVPGNIDMSETFGLTLHKAKSLCAVPVKKPTISSSY

SEQ ID NO: 79030 - protein, 443 aa, Arabidopsis thaliana
  peptide (1)..(443): Ceres Seq. ID no. 12648143
  misc_feature (1)..(431): Pfam Name: Cytochrome P450 Pfam Description: Cytochrome P450
  misc_feature (1)..(443): Homolog of NCBI NO: 5915833 NR Description: Cytochrome P450 76C3 >gi|7430676|pir||T00871
  misc_feature (1)..(443): Homolog of NCBI NO: 30690070 NR Description: cytochrome p450 family [Arabidopsis thaliana]
  misc_feature (1)..(443): Homolog of NCBI NO: 26451374 NR Description: putative cytochrome P450 [Arabidopsis thaliana]
  misc_feature (1)..(440): Homolog of NCBI NO: 15225510 NR Description: cytochrome p450 family; protein id: At2g45550.1
  misc_feature (1)..(436): Homolog of NCBI NO: 15225512 NR Description: cytochrome p450 family; protein id: At2g45570.1, by cDNA: gi_17065047 [Arabidopsis thaliana] Cytochrome P450 76C2 >gi|7430675|pir||T00870 probable cytochrome
  misc_feature (1)..(436): Homolog of NCBI NO: 15233027 NR Description: cytochrome p450 family; protein id: At3g61040.1
  misc_feature (1)..(436): Homolog of NCBI NO: 30690062 NR Description: cytochrome P450 family [Arabidopsis thaliana]
  misc_feature (1)..(440): Homolog of NCBI NO: 15217636 NR Description: cytochrome P450 monooxygenase; protein id: [Arabidopsis thaliana] >gi|25282568|pir||F86460 probable
  misc_feature (1)..(420): Homolog of NCBI NO: 25282599 NR Description: cytochrome P450 monooxygenase [imported] - thaliana >gi|3164130|dbj|BAA28540.1| cytochrome P450
  misc_feature (1)..(431): Homolog of NCBI NO: 25282569 NR Description: probable cytochrome P450 [imported] - Arabidopsis >gi|9665096|gb|AAF97287.1|AC010164_9 Putative cytochrome P450
MSLKLGRLTAVVISSPEAAKEALRTHDHVMSARTFNDALRAFDHHKHSIVWIPPSARWRFLKKTITKYLLSPQNLDAIQSLRMRKVEELVSLVNEFRERGEAIDLARASFVTSFNIISNALFSVDLATYDSNSSSYEFHNTVVHLTDIAGIPNVGDYFQYMRFLDLQGTRKKAVLCIEKLFRVFQEFIDARLAKRFSRTEKEPKEASSIDMLDSLLDLTQQNEAELTMNDLKHLLLDVFVAGTDTNSSTMEWAMTELFRSTEKMVKAQSEIRQVIGQNGFVQESDIPSLPYLQAIVKETLRLHPAAPLIPRKSESDVQIMGFLVPKNTQVVVNVWAIGRDASVWENPMKFEPERFLLRETDVKGRDFELIPFGSGRRMCPGISMALKTMHMVLASLLYSFDWKLQNGVVPGNIDMSETFGLTLHKAKSLCAVPVKKPTISSSY

SEQ ID NO: 79031 - protein, 414 aa, Arabidopsis thaliana
  peptide (1)..(414): Ceres Seq. ID no. 12648144
  misc_feature (1)..(402): Pfam Name: Cytochrome P450 Pfam Description: Cytochrome P450
  misc_feature (1)..(414): Homolog of NCBI NO: 5915833 NR Description: Cytochrome P450 76C3 >gi|7430676|pir||T00871
  misc_feature (1)..(414): Homolog of NCBI NO: 30690070 NR Description: cytochrome p450 family [Arabidopsis thaliana]
  misc_feature (1)..(414): Homolog of NCBI NO: 26451374 NR Description: putative cytochrome P450 [Arabidopsis thaliana]
  misc_feature (1)..(411): Homolog of NCBI NO: 15225510 NR Description: cytochrome p450 family; protein id: At2g45550.1
  misc_feature (1)..(407): Homolog of NCBI NO: 15225512 NR Description: cytochrome p450 family; protein id: At2g45570.1, by cDNA: gi_17065047 [Arabidopsis thaliana] Cytochrome P450 76C2 >gi|7430675|pir||T00870 probable cytochrome
  misc_feature (1)..(407): Homolog of NCBI NO: 15233027 NR Description: cytochrome p450 family; protein id: At3g61040.1
  misc_feature (1)..(407): Homolog of NCBI NO: 30690062 NR Description: cytochrome P450 family [Arabidopsis thaliana]
  misc_feature (1)..(411): Homolog of NCBI NO: 15217636 NR Description: cytochrome P450 monooxygenase; protein id: [Arabidopsis thaliana] >gi|25282568|pir||F86460 probable
  misc_feature (1)..(391): Homolog of NCBI NO: 25282599 NR Description: cytochrome P450 monooxygenase [imported] - thaliana >gi|3164130|dbj|BAA28540.1| cytochrome P450
  misc_feature (1)..(402): Homolog of NCBI NO: 25282569 NR Description: probable cytochrome P450 [imported] - Arabidopsis >gi|9665096|gb|AAF97287.1|AC010164_9 Putative cytochrome P450
MSARTFNDALRAFDHHKHSIVWIPPSARWRFLKKTITKYLLSPQNLDAIQSLRMRKVEELVSLVNEFRERGEAIDLARASFVTSFNIISNALFSVDLATYDSNSSSYEFHNTVVHLTDIAGIPNVGDYFQYMRFLDLQGTRKKAVLCIEKLFRVFQEFIDARLAKRFSRTEKEPKEASSIDMLDSLLDLTQQNEAELTMNDLKHLLLDVFVAGTDTNSSTMEWAMTELFRSTEKMVKAQSEIRQVIGQNGFVQESDIPSLPYLQAIVKETLRLHPAAPLIPRKSESDVQIMGFLVPKNTQVVVNVWAIGRDASVWENPMKFEPERFLLRETDVKGRDFELIPFGSGRRMCPGISMALKTMHMVLASLLYSFDWKLQNGVVPGNIDMSETFGLTLHKAKSLCAVPVKKPTISSSY

SEQ ID NO: 79032 - DNA, 969 bp, Arabidopsis thaliana
  misc_feature (1)..(969): Ceres Seq. ID no. 12648145
  misc_feature: MA Experiment ID: 20000180 Result: Up-regulated in Transcription
  misc_feature: MA Experiment 20000180 PARAMETER Experiment Name: At_Germinating_Seeds_P Parameter: Age (hr) Value: 24 vs. 0
  misc_feature: MA Experiment 20000180 PARAMETER Experiment Name: At_Germinating_Seeds_P Parameter: Tissue Value: Germinating Seeds
  misc_feature: MA Experiment ID: 20000184 Result: Up-regulated in Transcription
  misc_feature: MA Experiment 20000184 PARAMETER Experiment Name: At_Shoots__P Parameter: Age (day) Value: 7
  misc_feature: MA Experiment 20000184 PARAMETER Experiment Name: At_Shoots__P Parameter: Tissue Value: Shoots vs. Whole Plant
  misc_feature: MA Experiment ID: 20000495 Result: Down-regulated in Transcription
  misc_feature: MA Experiment 20000495 PARAMETER Experiment Name: At_Guard_Cells_P Parameter: Harvest Date Value: 8/2/2002
  misc_feature: MA Experiment 20000495 PARAMETER Experiment Name: At_Guard_Cells_P Parameter: Organism Value: A. thaliana
  misc_feature: MA Experiment 20000495 PARAMETER Experiment Name: At_Guard_Cells_P Parameter: Tissue Value: Guard Cells vs. Leaves
atggctgtgttaggcgacggattcgtcgcctccaccaagttcgagatcctcaaagccttcgagtctccgcttcctcttcctgaattcttggcctatcactctgactccatctccgccattatagcccctgtagctgctccggtcacagccgatctgattcgcatcctccctaatcttcgcttggttgttactaccagcgccggcgttgaccatgttgacttagttgagtgtcgtcgtcgaggcatctccgtcgccaacgctggctcaagcttctcggaagatgtcgcagatactgccgtcggtttactcatcgacgtcttccgccgcatctccgccgccaatcggttcgttaagcaacggttttggccactcaaaggcgattatcctctcggttccaaggtttgcaacataacttgtgaaaaaatcaaattagcaacaaaaatgattttggggagaaagcgaatcggaatcgtgggactaggaagcattggctcgaaagtagcgacaaggctcgacgcctttggttgccaaatttcatatagctcaagaaacagaaaaccatatgatgttccatatcactattacatggatatagaggagatggcagctaatagtgatgcactcataatctgttgtgaattgaatgagaagacattgcgtttgattaataaagatgttctttctgctctgggaaagcgaggagtgatcgttaacgtggctcgtggggctataatcgatgaggaagaaatggtgagatgtttgagagaaggtgagattggtggtgctggtttggatgtttttgaagatgagcctaatgttccgaaggagctttttgaattggataatgttgttttctctccacatagtgcttttatgacattggaaggtcttgaagaacttgggaaagttgtagtagggaatattgaagctttcttctccaataaacctcttttaactcctgttctttga

SEQ ID NO: 79033 - protein, 322 aa, Arabidopsis thaliana
  peptide (1)..(322): Ceres Seq. ID no. 12648146
  misc_feature (150)..(288): Pfam Name: D-isomer specific 2-hydroxyacid dehydrogenase, Pfam Description: D-isomer specific 2-hydroxyacid dehydrogenase,
  misc_feature (1)..(322): Homolog of NCBI NO: 7485630 NR Description: probable glycerate dehydrogenase [imported] -
  misc_feature (1)..(150): Homolog of NCBI NO: 18406843 NR Description: putative glycerate dehydrogenase; protein id: supported by cDNA: gi_15724345, supported by cDNA: gi_18700247 thaliana] >gi|15724346|gb|AAL06566.1|AF412113_1
  misc_feature (150)..(322): Homolog of NCBI NO: 21636166 NR Description: unknown [Aegilops tauschii]
  misc_feature (9)..(133): Homolog of NCBI NO: 21636166 NR Description: unknown [Aegilops tauschii]
  misc_feature (13)..(321): Homolog of NCBI NO: 32488422 NR Description: OSJNBb0085F13.12 [Oryza sativa (japonica
  misc_feature (141)..(322): Homolog of NCBI NO: 15220005 NR Description: putative D-isomer specific 2-hydroxyacid protein id: At1g79870.1, supported by cDNA: 42333., supported by gi_17978982 [Arabidopsis thaliana] >gi|25283867|pir||G96829
  misc_feature (13)..(133): Homolog of NCBI NO: 15220005 NR Description: putative D-isomer specific 2-hydroxyacid protein id: At1g79870.1, supported by cDNA: 42333., supported by gi_17978982 [Arabidopsis thaliana] >gi|25283867|pir||G96829
  misc_feature (245)..(322): Homolog of NCBI NO: 15241769 NR Description: putative protein; protein id: At5g28310.1
  misc_feature (152)..(201): Homolog of NCBI NO: 15241769 NR Description: putative protein; protein id: At5g28310.1
  misc_feature (144)..(322): Homolog of NCBI NO: 15890302 NR Description: AGR_L_379p [Agrobacterium tumefaciens]
MAVLGDGFVASTKFEILKAFESPLPLPEFLAYHSDSISAIIAPVAAPVTADLIRILPNLRLVVTTSAGVDHVDLVECRRRGISVANAGSSFSEDVADTAVGLLIDVFRRISAANRFVKQRFWPLKGDYPLGSKVCNITCEKIKLATKMILGRKRIGIVGLGSIGSKVATRLDAFGCQISYSSRNRKPYDVPYHYYMDIEEMAANSDALIICCELNEKTLRLINKDVLSALGKRGVIVNVARGAIIDEEEMVRCLREGEIGGAGLDVFEDEPNVPKELFELDNVVFSPHSAFMTLEGLEELGKVVVGNIEAFFSNKPLLTPVL

SEQ ID NO: 79034 - protein, 175 aa, Arabidopsis thaliana
  peptide (1)..(175): Ceres Seq. ID no. 12648147
  misc_feature (3)..(141): Pfam Name: D-isomer specific 2-hydroxyacid dehydrogenase, Pfam Description: D-isomer specific 2-hydroxyacid dehydrogenase,
  misc_feature (1)..(175): Homolog of NCBI NO: 7485630 NR Description: probable glycerate dehydrogenase [imported] -
  misc_feature (3)..(175): Homolog of NCBI NO: 21636166 NR Description: unknown [Aegilops tauschii]
  misc_feature (1)..(174): Homolog of NCBI NO: 32488422 NR Description: OSJNBb0085F13.12 [Oryza sativa (japonica
  misc_feature (1)..(175): Homolog of NCBI NO: 15220005 NR Description: putative D-isomer specific 2-hydroxyacid protein id: At1g79870.1, supported by cDNA: 42333., supported by gi_17978982 [Arabidopsis thaliana] >gi|25283867|pir||G96829
  misc_feature (98)..(175): Homolog of NCBI NO: 15241769 NR Description: putative protein; protein id: At5g28310.1
  misc_feature (5)..(54): Homolog of NCBI NO: 15241769 NR Description: putative protein; protein id: At5g28310.1
  misc_feature (1)..(175): Homolog of NCBI NO: 15890302 NR Description: AGR_L_379p [Agrobacterium tumefaciens]
  misc_feature (6)..(174): Homolog of NCBI NO: 15222015 NR Description: hypothetical protein; protein id: At1g12550.1 thaliana] >gi|8778636|gb|AAF79644.1|AC025416_18 F5O11.29 thaliana] >gi|9502370|gb|AAF88077.1|AC025417_5 T12C24.9
  misc_feature (6)..(174): Homolog of NCBI NO: 23102747 NR Description: hypothetical protein [Azotobacter vinelandii]
  misc_feature (3)..(175): Homolog of NCBI NO: 32488421 NR Description: OSJNBb0085F13.11 [Oryza sativa (japonica
MILGRKRIGIVGLGSIGSKVATRLDAFGCQISYSSRNRKPYDVPYHYYMDIEEMAANSDALIICCELNEKTLRLINKDVLSALGKRGVIVNVARGAIIDEEEMVRCLREGEIGGAGLDVFEDEPNVPKELFELDNVVFSPHSAFMTLEGLEELGKVVVGNIEAFFSNKPLLTPVL

SEQ ID NO: 79035 - DNA, 990 bp, Arabidopsis thaliana
  misc_feature (1)..(990): Ceres Seq. ID no. 12648163
  misc_feature: MA Experiment ID: 108434 Result: Up-regulated in Transcription
  misc_feature: MA Experiment 108434 PARAMETER Experiment Name: At_Root_Tips_cDNA_P Parameter: Tissue Value: Root Tips
  misc_feature: MA Experiment ID: 108461 Result: Down-regulated in Transcription
  misc_feature: MA Experiment 108461 PARAMETER Experiment Name: At_Germinating_Seeds_cDNA_P Parameter: Age (day) Value: 1 vs. 0
  misc_feature: MA Experiment 108461 PARAMETER Experiment Name: At_Germinating_Seeds_cDNA_P Parameter: Tissue Value: Germinating Seeds
  misc_feature: MA Experiment ID: 108462 Result: Down-regulated in Transcription
  misc_feature: MA Experiment 108462 PARAMETER Experiment Name: At_Germinating_Seeds_cDNA_P Parameter: Age (day) Value: 2 vs. 0
  misc_feature: MA Experiment 108462 PARAMETER Experiment Name: At_Germinating_Seeds_cDNA_P Parameter: Tissue Value: Germinating Seeds
  misc_feature: MA Experiment ID: 108463 Result: Down-regulated in Transcription
  misc_feature: MA Experiment 108463 PARAMETER Experiment Name: At_Germinating_Seeds_cDNA_P Parameter: Age (day) Value: 3 vs. 0
  misc_feature: MA Experiment 108463 PARAMETER Experiment Name: At_Germinating_Seeds_cDNA_P Parameter: Tissue Value: Germinating Seeds
  misc_feature: MA Experiment ID: 108464 Result: Down-regulated in Transcription
  misc_feature: MA Experiment 108464 PARAMETER Experiment Name: At_Germinating_Seeds_cDNA_P Parameter: Age (day) Value: 4 vs. 0
  misc_feature: MA Experiment 108464 PARAMETER Experiment Name: At_Germinating_Seeds_cDNA_P Parameter: Tissue Value: Germinating Seeds
  misc_feature: MA Experiment ID: 108488 Result: Up-regulated in Transcription
  misc_feature: MA Experiment ID: 108489 Result: Up-regulated in Transcription
  misc_feature: MA Experiment ID: 108573 Result: Down-regulated in Transcription
  misc_feature: MA Experiment 108573 PARAMETER Experiment Name: At_Drought_cDNA_P Parameter: Timepoint (hr) Value: 6
  misc_feature: MA Experiment 108573 PARAMETER Experiment Name: At_Drought_cDNA_P Parameter: Tissue Value: Aerial
  misc_feature: MA Experiment 108573 PARAMETER Experiment Name: At_Drought_cDNA_P Parameter: Treatment Value: Drought vs. No Drought
  misc_feature: MA Experiment ID: 108577 Result: Down-regulated in Transcription
  misc_feature: MA Experiment 108577 PARAMETER Experiment Name: At_42deg_Heat_cDNA_P Parameter: Temperature (deg C) Value: 42 vs. 22
  misc_feature: MA Experiment 108577 PARAMETER Experiment Name: At_42deg_Heat_cDNA_P Parameter: Timepoint (hr) Value: 6
  misc_feature: MA Experiment 108577 PARAMETER Experiment Name: At_42deg_Heat_cDNA_P Parameter: Tissue Value: Aerial
  misc_feature: MA Experiment ID: 20000090 Result: Up-regulated in Transcription
atggaatctgatgttcgtggaaagtctactttcagtgggggtgagaagaggaatgtgatacttccttcgatgattaagaacaaagataagagatcaaaagtgtatgcgaagcagaagcatgagaagaaattggagaagcagaagaagattagagctcgtgatgctgctgagaaacgagctttagagcttggagaagagcctccacaaaagatgattccgaagacgattgagaatacaagagaatctgatgaaactgtttgcagacctgacgatgaagaattgtttgcggatattgatgctgatgagtttaatccagttctgagacgtgagattgcacctaaggtcttgctcacaacatgtcgtttcaattccactagaggacctgctttaatatctgagttgctttcggtgataccaaactctcattatcaaaagagaggaacctatgatttgaagaagattgtagaatacgcaacgaagaaagattttacatctcttattgttgttcatacaaatcgtagagaacctgatgcgcttcttatcatcggtttgccaaatggtcctactgctcatttcaaattgtcaaatcttgttctaaggaaggatattaagaatcacggaaatcctacaagccatcaaccagaactggttttgaataactttacaacgcgtttagggaatcgtgttgggagattttttcaatcactcttccctccggatcctaatttccgtggtaggagagttgtaacattccacaaccagcgtgactttatatttttcagacatcaccgttacatatttgagacaaaggaaagcaagagtgataaaggaaaagaagagacaataaaacctcgtcttcaggaatgcggtcctcgattcacgcttaagctagttactctacagcatggaacttttgacaccaaaggtggagaatttgaatgggttcataagcctgaaatggacacgagcaggagaaggttcttcttataa

SEQ ID NO: 79036 - protein, 329 aa, Arabidopsis thaliana; identical to SEQ ID NO: 35834
  peptide (1)..(329): Ceres Seq. ID no. 12648164
  misc_feature (1)..(329): Homolog of NCBI NO: 18411672 NR Description: expressed protein; protein id: At4g01560.1, by cDNA: 25253., supported by cDNA: gi_15215625 [Arabidopsis >gi|25347959|pir||C85020 hypothetical protein AT4g01560
  misc_feature (26)..(323): Homolog of NCBI NO: 7485389 NR Description: hypothetical protein F11O4.6 - Arabidopsis >gi|3695379|gb|AAC62782.1| contains similarity to a C. elegans protein F44G4.1 (GB:Z49910) and several yeast hypothetical
  misc_feature (1)..(176): Homolog of NCBI NO: 7485389 NR Description: hypothetical protein F11O4.6 - Arabidopsis >gi|3695379|gb|AAC62782.1| contains similarity to a C. elegans protein F44G4.1 (GB:Z49910) and several yeast hypothetical
  misc_feature (23)..(329): Homolog of NCBI NO: 33440502 NR Description: Unknown (protein for IMAGE:5694049) [Mus musculus]
  misc_feature (23)..(329): Homolog of NCBI NO: 13376605 NR Description: RNA processing factor 1 [Homo sapiens] unnamed protein product [Homo sapiens]
  misc_feature (23)..(329): Homolog of NCBI NO: 17225079 NR Description: RNA processing factor 1 [Homo sapiens]
  misc_feature (2)..(329): Homolog of NCBI NO: 27371215 NR Description: Similar to RNA processing factor 1 [Xenopus
  misc_feature (42)..(329): Homolog of NCBI NO: 21312560 NR Description: RIKEN cDNA 2310066N05 [Mus musculus]
  misc_feature (65)..(329): Homolog of NCBI NO: 11360239 NR Description: hypothetical protein DKFZp761G0415.1 - human
  misc_feature (15)..(329): Homolog of NCBI NO: 17534031 NR Description: IMP4 family (45.2 kD) [Caenorhabditis elegans] Hypothetical protein F44G4.1 in chromosome II

SEQ ID NO: 79037 - protein, 306 aa, Arabidopsis thaliana
  peptide (1)..(306): Ceres Seq. ID no. 12648165
  misc_feature (1)..(306): Homolog of NCBI NO: 18411672 NR Description: expressed protein; protein id: At4g01560.1, by cDNA: 25253., supported by cDNA: gi_15215625 [Arabidopsis >gi|25347959|pir||C85020 hypothetical protein AT4g01560
  misc_feature (3)..(300): Homolog of NCBI NO: 7485389 NR Description: hypothetical protein F11O4.6 - Arabidopsis >gi|3695379|gb|AAC62782.1| contains similarity to a C. elegans protein F44G4.1 (GB:Z49910) and several yeast hypothetical
  misc_feature (1)..(153): Homolog of NCBI NO: 7485389 NR Description: hypothetical protein F11O4.6 - Arabidopsis >gi|3695379|gb|AAC62782.1| contains similarity to a C. elegans protein F44G4.1 (GB:Z49910) and several yeast hypothetical
  misc_feature (1)..(306): Homolog of NCBI NO: 33440502 NR Description: Unknown (protein for IMAGE:5694049) [Mus musculus]
  misc_feature (1)..(306): Homolog of NCBI NO: 13376605 NR Description: RNA processing factor 1 [Homo sapiens] unnamed protein product [Homo sapiens]
  misc_feature (1)..(306): Homolog of NCBI NO: 17225079 NR Description: RNA processing factor 1 [Homo sapiens]
  misc_feature (1)..(306): Homolog of NCBI NO: 27371215 NR Description: Similar to RNA processing factor 1 [Xenopus
  misc_feature (19)..(306): Homolog of NCBI NO: 21312560 NR Description: RIKEN cDNA 2310066N05 [Mus musculus]
  misc_feature (42)..(306): Homolog of NCBI NO: 11360239 NR Description: hypothetical protein DKFZp761G0415.1 - human
  misc_feature (1)..(306): Homolog of NCBI NO: 17534031 NR Description: IMP4 family (45.2 kD) [Caenorhabditis elegans] Hypothetical protein F44G4.1 in chromosome II
MIKNKDKRSKVYAKQKHEKKLEKQKKIRARDAAEKRALELGEEPPQKMIPKTIENTRESDETVCRPDDEELFADIDADEFNPVLRREIAPKVLLTTCRFNSTRGPALISELLSVIPNSHYQKRGTYDLKKIVEYATKKDFTSLIVVHTNRREPDALLIIGLPNGPTAHFKLSNLVLRKDIKNHGNPTSHQPELVLNNFTTRLGNRVGRFFQSLFPPDPNFRGRRVVTFHNQRDFIFFRHHRYIFETKESKSDKGKEETIKPRLQECGPRFTLKLVTLQHGTFDTKGGEFEWVHKPEMDTSRRRFFL

SEQ ID NO: 79038 - protein, 259 aa, Arabidopsis thaliana
  peptide (1)..(259): Ceres Seq. ID no. 12648166
  misc_feature (1)..(259): Homolog of NCBI NO: 18411672 NR Description: expressed protein; protein id: At4g01560.1, by cDNA: 25253., supported by cDNA: gi_15215625 [Arabidopsis >gi|25347959|pir||C85020 hypothetical protein AT4g01560
  misc_feature (1)..(253): Homolog of NCBI NO: 7485389 NR Description: hypothetical protein F11O4.6 - Arabidopsis >gi|3695379|gb|AAC62782.1| contains similarity to a C. elegans protein F44G4.1 (GB:Z49910) and several yeast hypothetical
  misc_feature (1)..(106): Homolog of NCBI NO: 7485389 NR Description: hypothetical protein F11O4.6 - Arabidopsis >gi|3695379|gb|AAC62782.1| contains similarity to a C. elegans protein F44G4.1 (GB:Z49910) and several yeast hypothetical
  misc_feature (1)..(259): Homolog of NCBI NO: 33440502 NR Description: Unknown (protein for IMAGE:5694049) [Mus musculus]
  misc_feature (1)..(259): Homolog of NCBI NO: 13376605 NR Description: RNA processing factor 1 [Homo sapiens] unnamed protein product [Homo sapiens]
  misc_feature (1)..(259): Homolog of NCBI NO: 17225079 NR Description: RNA processing factor 1 [Homo sapiens]
  misc_feature (1)..(259): Homolog of NCBI NO: 27371215 NR Description: Similar to RNA processing factor 1 [Xenopus
  misc_feature (1)..(259): Homolog of NCBI NO: 21312560 NR Description: RIKEN cDNA 2310066N05 [Mus musculus]
  misc_feature (1)..(259): Homolog of NCBI NO: 11360239 NR Description: hypothetical protein DKFZp761G0415.1 - human
  misc_feature (1)..(259): Homolog of NCBI NO: 17534031 NR Description: IMP4 family (45.2 kD) [Caenorhabditis elegans] Hypothetical protein F44G4.1 in chromosome II
MIPKTIENTRESDETVCRPDDEELFADIDADEFNPVLRREIAPKVLLTTCRFNSTRGPALISELLSVIPNSHYQKRGTYDLKKIVEYATKKDFTSLIVVHTNRREPDALLIIGLPNGPTAHFKLSNLVLRKDIKNHGNPTSHQPELVLNNFTTRLGNRVGRFFQSLFPPDPNFRGRRVVTFHNQRDFIFFRHHRYIFETKESKSDKGKEETIKPRLQECGPRFTLKLVTLQHGTFDTKGGEFEWVHKPEMDTSRRRFFL

SEQ ID NO: 79039 - DNA, 702 bp, Arabidopsis thaliana
  misc_feature (1)..(702): Ceres Seq. ID no. 12648170
  misc_feature: MA Experiment ID: 108434 Result: Down-regulated in Transcription
  misc_feature: MA Experiment 108434 PARAMETER Experiment Name: At_Root_Tips_cDNA_P Parameter: Tissue Value: Root Tips
  misc_feature: MA Experiment ID: 108461 Result: Up-regulated in Transcription
  misc_feature: MA Experiment 108461 PARAMETER Experiment Name: At_Germinating_Seeds_cDNA_P Parameter: Age (day) Value: 1 vs. 0
  misc_feature: MA Experiment 108461 PARAMETER Experiment Name: At_Germinating_Seeds_cDNA_P Parameter: Tissue Value: Germinating Seeds
  misc_feature: MA Experiment ID: 108463 Result: Up-regulated in Transcription
  misc_feature: MA Experiment 108463 PARAMETER Experiment Name: At_Germinating_Seeds_cDNA_P Parameter: Age (day) Value: 3 vs. 0
  misc_feature: MA Experiment 108463 PARAMETER Experiment Name: At_Germinating_Seeds_cDNA_P Parameter: Tissue Value: Germinating Seeds
  misc_feature: MA Experiment ID: 108464 Result: Up-regulated in Transcription
  misc_feature: MA Experiment 108464 PARAMETER Experiment Name: At_Germinating_Seeds_cDNA_P Parameter: Age (day) Value: 4 vs. 0
  misc_feature: MA Experiment 108464 PARAMETER Experiment Name: At_Germinating_Seeds_cDNA_P Parameter: Tissue Value: Germinating Seeds
  misc_feature: MA Experiment ID: 108489 Result: Up-regulated in Transcription
  misc_feature: MA Experiment ID: 108577 Result: Down-regulated in Transcription
  misc_feature: MA Experiment 108577 PARAMETER Experiment Name: At_42deg_Heat_cDNA_P Parameter: Temperature (deg C) Value: 42 vs. 22
  misc_feature: MA Experiment 108577 PARAMETER Experiment Name: At_42deg_Heat_cDNA_P Parameter: Timepoint (hr) Value: 6
  misc_feature: MA Experiment 108577 PARAMETER Experiment Name: At_42deg_Heat_cDNA_P Parameter: Tissue Value: Aerial
  misc_feature: MA Experiment ID: 20000030 Result: Down-regulated in Transcription
  misc_feature: MA Experiment 20000030 PARAMETER Experiment Name: At_CS6630_Roots_cDNA_P Parameter: Plant Line Value: CS6630 vs. WS
  misc_feature: MA Experiment 20000030 PARAMETER Experiment Name: At_CS6630_Roots_cDNA_P Parameter: Tissue Value: Roots
  misc_feature: MA Experiment ID: 20000224 Result: Down-regulated in Transcription
  misc_feature: MA Experiment ID: 20000234 Result: Down-regulated in Transcription
  misc_feature: MA Experiment 20000234 PARAMETER Experiment Name: At_Siliques_P Parameter: Age (day) Value: 21
  misc_feature: MA Experiment 20000234 PARAMETER Experiment Name: At_Siliques_P Parameter: Organism Value: A. thaliana
  misc_feature: MA Experiment 20000234 PARAMETER Experiment Name: At_Siliques_P Parameter: Plant Line Value: WS
  misc_feature: MA Experiment 20000234 PARAMETER Experiment Name: At_Siliques_P Parameter: Tissue Value: Less Than 5mm Siliques vs. Whole Plant
  misc_feature: MA Experiment ID: 20000573 Result: Up-regulated in Transcription
  misc_feature: MA Experiment 20000573 PARAMETER Experiment Name: At_100uM_ABA_Mutants__P Parameter: Organism Value: A. thaliana
  misc_feature: MA Experiment 20000573 PARAMETER Experiment Name: At_100uM_ABA_Mutants__P Parameter: Plant Line Value: CS22 vs. Ler wt
  misc_feature: MA Experiment 20000573 PARAMETER Experiment Name: At_100uM_ABA_Mutants__P Parameter: Timepoint (hr) Value: N/A
  misc_feature: MA Experiment 20000573 PARAMETER Experiment Name: At_100uM_ABA_Mutants__P Parameter: Tissue Value: Whole Plant
  misc_feature: MA Experiment 20000573 PARAMETER Experiment Name: At_100uM_ABA_Mutants__P Parameter: Treatment Value: None
  misc_feature: MA Experiment ID: 20000794 Result: Up-regulated in Transcription
  misc_feature: MA Experiment 20000794 PARAMETER Experiment Name: At_Petals_P Parameter: Age (day) Value: 23-25 days
  misc_feature: MA Experiment 20000794 PARAMETER Experiment Name: At_Petals_P Parameter: Plant Line Value: WS
  misc_feature: MA Experiment 20000794 PARAMETER Experiment Name: At_Petals_P Parameter: Tissue Value: Petals vs. Whole plant
  misc_feature: MA Experiment ID: 20001557 Result: Down-regulated in Transcription
  misc_feature: MA Experiment 20001557 PARAMETER Experiment Name: At_Drought_Soil_Dry_P Parameter: Age (day) Value: 27
  misc_feature: MA Experiment 20001557 PARAMETER Experiment Name: At_Drought_Soil_Dry_P Parameter: Organism Value: A. thaliana
  misc_feature: MA Experiment 20001557 PARAMETER Experiment Name: At_Drought_Soil_Dry_P Parameter: Plant Line Value: WS
  misc_feature: MA Experiment 20001557 PARAMETER Experiment Name: At_Drought_Soil_Dry_P Parameter: Post Timepoint (hr) Value: 3
  misc_feature: MA Experiment 20001557 PARAMETER Experiment Name: At_Drought_Soil_Dry_P Parameter: Post-Treatment Value: Re-Water vs. No Drought
  misc_feature: MA Experiment 20001557 PARAMETER Experiment Name: At_Drought_Soil_Dry_P Parameter: Timepoint (day) Value: 13
  misc_feature: MA Experiment 20001557 PARAMETER Experiment Name: At_Drought_Soil_Dry_P Parameter: Treatment Value: Drought vs. No Drought
  misc_feature: MA Experiment ID: 20001558 Result: Down-regulated in Transcription
  misc_feature: MA Experiment 20001558 PARAMETER Experiment Name: At_Drought_Soil_Dry_P Parameter: Age (day) Value: 27
  misc_feature: MA Experiment 20001558 PARAMETER Experiment Name: At_Drought_Soil_Dry_P Parameter: Organism Value: A. thaliana
  misc_feature: MA Experiment 20001558 PARAMETER Experiment Name: At_Drought_Soil_Dry_P Parameter: Plant Line Value: WS
  misc_feature: MA Experiment 20001558 PARAMETER Experiment Name: At_Drought_Soil_Dry_P Parameter: Post Timepoint (hr) Value: 6
  misc_feature: MA Experiment 20001558 PARAMETER Experiment Name: At_Drought_Soil_Dry_P Parameter: Post-Treatment Value: Re-Water vs. No Drought
  misc_feature: MA Experiment 20001558 PARAMETER Experiment Name: At_Drought_Soil_Dry_P Parameter: Timepoint (day) Value: 13
  misc_feature: MA Experiment 20001558 PARAMETER Experiment Name: At_Drought_Soil_Dry_P Parameter: Treatment Value: Drought vs. No Drought
  misc_feature: MA Experiment ID: 20001906 Result: Up-regulated in Transcription
  misc_feature: MA Experiment 20001906 PARAMETER Experiment Name: At_Drought_Reproduction_P Parameter: Age (day) Value: 35
  misc_feature: MA Experiment 20001906 PARAMETER Experiment Name: At_Drought_Reproduction_P Parameter: Organism Value: A. thaliana
  misc_feature: MA Experiment 20001906 PARAMETER Experiment Name: At_Drought_Reproduction_P Parameter: Plant Line Value: WS
  misc_feature: MA Experiment 20001906 PARAMETER Experiment Name: At_Drought_Reproduction_P Parameter: Timepoint (day) Value: 5
  misc_feature: MA Experiment 20001906 PARAMETER Experiment Name: At_Drought_Reproduction_P Parameter: Tissue Value: Siliques
  misc_feature: MA Experiment 20001906 PARAMETER Experiment Name: At_Drought_Reproduction_P Parameter: Treatment Value: Drought vs. No Drought
  misc_feature: MA Experiment ID: 20001908 Result: Up-regulated in Transcription
  misc_feature: MA Experiment 20001908 PARAMETER Experiment Name: At_Drought_Reproduction_P Parameter: Age (day) Value: 40
  misc_feature: MA Experiment 20001908 PARAMETER Experiment Name: At_Drought_Reproduction_P Parameter: Organism Value: A. thaliana
  misc_feature: MA Experiment 20001908 PARAMETER Experiment Name: At_Drought_Reproduction_P Parameter: Plant Line Value: WS
  misc_feature: MA Experiment 20001908 PARAMETER Experiment Name: At_Drought_Reproduction_P Parameter: Timepoint (day) Value: 10
  misc_feature: MA Experiment 20001908 PARAMETER Experiment Name: At_Drought_Reproduction_P Parameter: Tissue Value: Siliques
  misc_feature: MA Experiment 20001908 PARAMETER Experiment Name: At_Drought_Reproduction_P Parameter: Treatment Value: Drought vs. No Drought
atgcgtccacaatacaaagacgtgaacgataaattagactcgacggccaagcacaaaaccaacagccatggcggtcgttatgataatccttacgtccacattactagtcccacatcagcttctgataagaggtcgaaggataaggttcttgaggtgttgaatcgctgtgggaagaaagtagaggacgctactcgcaaagcggaagcattagtcggaggtttaaaagaccacctgaagtttagtcctagcataagtgatgcagcaatggctaggctttctcaaggcactaagatgatcgttgaaggaggaccagagagagtgtttcaacgagagtttggtgttttagctgtagagaaacttttagattcgtttgtttgctacatatcgactacttcgggaccagtgaccggagtgatatacatttccaacagaagaatcgctttttgtagcgactatgccattcgtcttccttcttctgccggtggaaacggtgttgcggcatattacaaggtggtgatggagtgggagaagataagtagcattagttcatcaacgaacgtgttgaagccaagtgagagatacgtgcatatggtgacacgagatgggtttgagttttggttcatgggctttgtctcctacatcgatgctttcaattgtctcaacaaagctctcctcaattcccgttgtaatcatgccatgtaa

SEQ ID NO: 79040 - protein, 233 aa, Arabidopsis thaliana
  peptide (1)..(233): Ceres Seq. ID no. 12648171
  misc_feature (106)..(185): Pfam Name: GRAM domain Pfam Description: GRAM domain
  misc_feature (1)..(233): Homolog of NCBI NO: 15234255 NR Description: putative ABA-repsonsive protein; protein id:
  misc_feature (33)..(182): Homolog of NCBI NO: 20271007 NR Description: putative ABA-binding protein [Arabidopsis lyrata
  misc_feature (14)..(224): Homolog of NCBI NO: 29788871 NR Description: putative ABA-responsive protein [Oryza sativa
  misc_feature (18)..(224): Homolog of NCBI NO: 34902414 NR Description: Putative FH protein interacting protein FIP1
  misc_feature (8)..(224): Homolog of NCBI NO: 18399985 NR Description: Expressed protein; protein id: At2g22475.1, by cDNA: 32573. [Arabidopsis thaliana]
  misc_feature (29)..(224): Homolog of NCBI NO: 15217869 NR Description: FH protein interacting protein FIP1; protein id: supported by cDNA: 30245., supported by cDNA: gi_13877828, by cDNA: gi_15912222, supported by cDNA: gi_16323497, supported
  misc_feature (8)..(224): Homolog of NCBI NO: 21592789 NR Description: unknown [Arabidopsis thaliana]
  misc_feature (8)..(224): Homolog of NCBI NO: 26452129 NR Description: unknown protein [Arabidopsis thaliana]
  misc_feature (45)..(230): Homolog of NCBI NO: 34906818 NR Description: contains EST C91668(E31216)~similar to FH protein
  misc_feature (33)..(226): Homolog of NCBI NO: 15237287 NR Description: ABA-responsive protein, putative; protein id:
MRPQYKDVNDKLDSTAKHKTNSHGGRYDNPYVHITSPTSASDKRSKDKVLEVLNRCGKKVEDATRKAEALVGGLKDHLKFSPSISDAAMARLSQGTKMIVEGGPERVFQREFGVLAVEKLLDSFVCYISTTSGPVTGVIYISNRRIAFCSDYAIRLPSSAGGNGVAAYYKVVMEWEKISSISSSTNVLKPSERYVHMVTRDGFEFWFMGFVSYIDAFNCLNKALLNSRCNHAM

SEQ ID NO: 79041 - protein, 145 aa, Arabidopsis thaliana
  peptide (1)..(145): Ceres Seq. ID no. 12648172
  misc_feature (18)..(97): Pfam Name: GRAM domain Pfam Description: GRAM domain
  misc_feature (1)..(145): Homolog of NCBI NO: 15234255 NR Description: putative ABA-repsonsive protein; protein id:
  misc_feature (1)..(94): Homolog of NCBI NO: 20271007 NR Description: putative ABA-binding protein [Arabidopsis lyrata
  misc_feature (1)..(136): Homolog of NCBI NO: 29788871 NR Description: putative ABA-responsive protein [Oryza sativa
  misc_feature (1)..(136): Homolog of NCBI NO: 34902414 NR Description: Putative FH protein interacting protein FIP1
  misc_feature (1)..(136): Homolog of NCBI NO: 18399985 NR Description: Expressed protein; protein id: At2g22475.1, by cDNA: 32573. [Arabidopsis thaliana]
  misc_feature (1)..(136): Homolog of NCBI NO: 15217869 NR Description: FH protein interacting protein FIP1; protein id: supported by cDNA: 30245., supported by cDNA: gi_13877828, by cDNA: gi_15912222, supported by cDNA: gi_16323497, supported
  misc_feature (1)..(136): Homolog of NCBI NO: 21592789 NR Description: unknown [Arabidopsis thaliana]
  misc_feature (1)..(136): Homolog of NCBI NO: 26452129 NR Description: unknown protein [Arabidopsis thaliana]
  misc_feature (1)..(142): Homolog of NCBI NO: 34906818 NR Description: contains EST C91668(E31216)~similar to FH protein
  misc_feature (1)..(138): Homolog of NCBI NO: 15237287 NR Description: ABA-responsive protein, putative; protein id:
MARLSQGTKMIVEGGPERVFQREFGVLAVEKLLDSFVCYISTTSGPVTGVIYISNRRIAFCSDYAIRLPSSAGGNGVAAYYKVVMEWEKISSISSSTNVLKPSERYVHMVTRDGFEFWFMGFVSYIDAFNCLNKALLNSRCNHAM

SEQ ID NO: 79042 - protein, 136 aa, Arabidopsis thaliana
  peptide (1)..(136): Ceres Seq. ID no. 12648173
  misc_feature (9)..(88): Pfam Name: GRAM domain Pfam Description: GRAM domain
  misc_feature (1)..(136): Homolog of NCBI NO: 15234255 NR Description: putative ABA-repsonsive protein; protein id:
  misc_feature (1)..(85): Homolog of NCBI NO: 20271007 NR Description: putative ABA-binding protein [Arabidopsis lyrata
  misc_feature (1)..(127): Homolog of NCBI NO: 29788871 NR Description: putative ABA-responsive protein [Oryza sativa
  misc_feature (1)..(127): Homolog of NCBI NO: 34902414 NR Description: Putative FH protein interacting protein FIP1
  misc_feature (1)..(127): Homolog of NCBI NO: 18399985 NR Description: Expressed protein; protein id: At2g22475.1, by cDNA: 32573. [Arabidopsis thaliana]
  misc_feature (1)..(127): Homolog of NCBI NO: 15217869 NR Description: FH protein interacting protein FIP1; protein id: supported by cDNA: 30245., supported by cDNA: gi_13877828, by cDNA: gi_15912222, supported by cDNA: gi_16323497, supported
  misc_feature (1)..(127): Homolog of NCBI NO: 21592789 NR Description: unknown [Arabidopsis thaliana]
  misc_feature (1)..(127): Homolog of NCBI NO: 26452129 NR Description: unknown protein [Arabidopsis thaliana]
  misc_feature (1)..(133): Homolog of NCBI NO: 34906818 NR Description: contains EST C91668(E31216)~similar to FH protein
  misc_feature (1)..(129): Homolog of NCBI NO: 15237287 NR Description: ABA-responsive protein, putative; protein id:
MIVEGGPERVFQREFGVLAVEKLLDSFVCYISTTSGPVTGVIYISNRRIAFCSDYAIRLPSSAGGNGVAAYYKVVMEWEKISSISSSTNVLKPSERYVHMVTRDGFEFWFMGFVSYIDAFNCLNKALLNSRCNHAM

SEQ ID NO: 79043 - DNA, 772 bp, Arabidopsis thaliana
  misc_feature (1)..(772): Ceres Seq. ID no. 12648177
  misc_feature: MA Experiment ID: 108464 Result: Down-regulated in Transcription
  misc_feature: MA Experiment 108464 PARAMETER Experiment Name: At_Germinating_Seeds_cDNA_P Parameter: Age (day) Value: 4 vs. 0
  misc_feature: MA Experiment 108464 PARAMETER Experiment Name: At_Germinating_Seeds_cDNA_P Parameter: Tissue Value: Germinating Seeds
  misc_feature: MA Experiment ID: 108595 Result: Up-regulated in Transcription
  misc_feature: MA Experiment 108595 PARAMETER Experiment Name: At_Ler-pi_Ovule_cDNA_P Parameter: Plant Line Value: null
  misc_feature: MA Experiment ID: 20000112 Result: Up-regulated in Transcription
  misc_feature: MA Experiment 20000112 PARAMETER Experiment Name: At_42deg_Heat_cDNA_P Parameter: Temperature (deg C) Value: 42 vs. 22
  misc_feature: MA Experiment 20000112 PARAMETER Experiment Name: At_42deg_Heat_cDNA_P Parameter: Timepoint (hr) Value: 2
  misc_feature: MA Experiment 20000112 PARAMETER Experiment Name: At_42deg_Heat_cDNA_P Parameter: Tissue Value: Aerial
  misc_feature: MA Experiment ID: 20000235 Result: Down-regulated in Transcription
  misc_feature: MA Experiment 20000235 PARAMETER Experiment Name: At_Siliques_P Parameter: Age (day) Value: 21
  misc_feature: MA Experiment 20000235 PARAMETER Experiment Name: At_Siliques_P Parameter: Organism Value: A. thaliana
  misc_feature: MA Experiment 20000235 PARAMETER Experiment Name: At_Siliques_P Parameter: Plant Line Value: WS
  misc_feature: MA Experiment 20000235 PARAMETER Experiment Name: At_Siliques_P Parameter: Tissue Value: 5-10mm Siliques vs. Whole Plant
atctatactagagtttattactatggcttttgatgaagatatgaaaatggcgtctttcttaagagaagaagaagaacaacactattctttatcaagactctccgtttgttccaactacgacggcgatgaagccgacggtgagtcttctgcttccgacgagaaacgtgttgtccacggcggaggagagaaatccatggaggagctaaatttttcagattctgataaagaatcaaccggttgtcaatctctcccggcgacacctccgagacggagacggcggagaggcggtggaggaggaggatatttagcggtgagttctccggtttccggcgataaagcttacgctagcgagaacgaagtacaaaagacgaataacaatcagaggagaaggaggagattgaaaccggagtgtccaccgtgggttgatagtatgcggaggagctacgtcggagatgaacagagtagtcacggtggttacggaggaggagtggtggttgttacgaggcctataggaggaggaaggccattgtgtatggatttagaagaagtcaaagcttgtaaagatttggggtttgagcttgaaccgggtcgggtttcgtattccgggtcaacggtggatactagtagtggcggcaattctcctatctcttctaaccaccgtatttcgagtcccggggatgatccaaaagacgtgaaagcgaggcttaaggcgtgggctcaagctgtggcttttgtgtccactactcatcatcaacctcctaattctttatga

SEQ ID NO: 79044 - protein, 256 aa, Arabidopsis thaliana
  peptide (1)..(256): Ceres Seq. ID no. 12648178
  misc_feature (8)..(256): Homolog of NCBI NO: 30678941 NR Description: expressed protein [Arabidopsis thaliana]
  misc_feature (8)..(225): Homolog of NCBI NO: 25334719 NR Description: hypothetical protein AT4g01670 [imported] - thaliana >gi|7268210|emb|CAB77737.1| hypothetical protein
  misc_feature (29)..(248): Homolog of NCBI NO: 15228678 NR Description: putative protein; protein id: At3g62070.1
  misc_feature (42)..(248): Homolog of NCBI NO: 34902536 NR Description: P0581F09.27 [Oryza sativa (japonica >gi|13486734|dbj|BAB39969.1| hypothetical protein [Oryza sativa
  misc_feature (24)..(226): Homolog of NCBI NO: 15226471 NR Description: unknown protein; protein id: At2g46940.1
SILEFITMAFDEDMKMASFLREEEEQHYSLSRLSVCSNYDGDEADGESSASDEKRVVHGGGEKSMEELNFSDSDKESTGCQSLPATPPRRRRRRGGGGGGYLAVSSPVSGDKAYASENEVQKTNNNQRRRRRLKPECPPWVDSMRRSYVGDEQSSHGGYGGGVVVVTRPIGGGRPLCMDLEEVKACKDLGFELEPGRVSYSGSTVDTSSGGNSPISSNHRISSPGDDPKDVKARLKAWAQAVAFVSTTHHQPPNSL

SEQ ID NO: 79045 - protein, 249 aa, Arabidopsis thaliana; identical to SEQ ID NO: 29745
  peptide (1)..(249): Ceres Seq. ID no. 12648179
  misc_feature (1)..(249): Homolog of NCBI NO: 30678941 NR Description: expressed protein [Arabidopsis thaliana]
  misc_feature (1)..(218): Homolog of NCBI NO: 25334719 NR Description: hypothetical protein AT4g01670 [imported] - thaliana >gi|7268210|emb|CAB77737.1| hypothetical protein
  misc_feature (22)..(241): Homolog of NCBI NO: 15228678 NR Description: putative protein; protein id: At3g62070.1
  misc_feature (35)..(241): Homolog of NCBI NO: 34902536 NR Description: P0581F09.27 [Oryza sativa (japonica >gi|13486734|dbj|BAB39969.1| hypothetical protein [Oryza sativa
  misc_feature (17)..(219): Homolog of NCBI NO: 15226471 NR Description: unknown protein; protein id: At2g46940.1

SEQ ID NO: 79046 - protein, 243 aa, Arabidopsis thaliana; identical to SEQ ID NO: 29746
  peptide (1)..(243): Ceres Seq. ID no. 12648180
  misc_feature (1)..(243): Homolog of NCBI NO: 30678941 NR Description: expressed protein [Arabidopsis thaliana]
  misc_feature (1)..(212): Homolog of NCBI NO: 25334719 NR Description: hypothetical protein AT4g01670 [imported] - thaliana >gi|7268210|emb|CAB77737.1| hypothetical protein
  misc_feature (16)..(235): Homolog of NCBI NO: 15228678 NR Description: putative protein; protein id: At3g62070.1
  misc_feature (29)..(235): Homolog of NCBI NO: 34902536 NR Description: P0581F09.27 [Oryza sativa (japonica >gi|13486734|dbj|BAB39969.1| hypothetical protein [Oryza sativa
  misc_feature (11)..(213): Homolog of NCBI NO: 15226471 NR Description: unknown protein; protein id: At2g46940.1

SEQ ID NO: 79047 - DNA, 3729 bp, Arabidopsis thaliana
  misc_feature (1)..(3729): Ceres Seq. ID no. 12648194
  misc_feature: MA Experiment ID: 20000306 Result: Down-regulated in Transcription
  misc_feature: MA Experiment 20000306 PARAMETER Experiment Name: At_Germinating_Seeds_Sub_P Parameter: Age (hr) Value: 6 vs. 0
  misc_feature: MA Experiment 20000306 PARAMETER Experiment Name: At_Germinating_Seeds_Sub_P Parameter: Organism Value: A. thaliana
  misc_feature: MA Experiment 20000306 PARAMETER Experiment Name: At_Germinating_Seeds_Sub_P Parameter: Plant Line Value: WS
  misc_feature: MA Experiment 20000306 PARAMETER Experiment Name: At_Germinating_Seeds_Sub_P Parameter: Tissue Value: Germinating Seeds
atggtcgttcattcaaacattccaacacataaggagatgaagaaggggaacttggaagcgaacacaaagacagtaccgttctacaaattgtttttcttctcagattctaccgatgtgttgttgatgatcgttggttcgatcggagctatcgcaaacggtgtttgttctccgttaatgacattattgtttggtgaactcattgatgcaatgggtccaaaccagaacaatgaagagattgttgagagagtttccaaggtttgtttgagtttagtctaccttggacttggagccctaggagctgcctttcttcaggtggcttgttggatgattactggggagagacaagctgcaaggataaggagtttgtatctgaaaacgattctaagacaagacattggattcttcgatgtcgaaatgaccacaggagaagttgttggtcgaatgtctggtgatacggttcttatacttgatgctatgggtgagaaggttgggaagtttatacagttgatttcaacatttgtgggtggatttgttatagcgtttttgagaggatggttacttacacttgttatgttgacctcaattcctcttctagctatgtctggtgcagctatagcgattatagttacaagagcttcttctcaagaacaagctgcttatgcaaaagcatcaaatgttgttgaacaaactttggggtccattcgaaccgttgcttctttcacgggagagaagcaagcgatgagtagctacaaagagttgataaatttggcctataaatcgaatgttaagcaaggtttcgttacgggtttaggtcttggagtaatgttcttggtgttcttttccacctatgctttgggtacatggtttggtggtgaaatgatactgagaaaagggtatacaggtggtgcagtgatcaatgttatggtcactgtggtctcgagttcgatagctttagggcaagcatcaccttgtctaactgcatttacggctggtaaagctgcagcttataagatgtttgaaacaatcgaaagagagcctttgattgatacttttgacctaaatgggaaggttttagaagatattcgaggcgaaatcgagctgagagatgtgtgttttagttaccctgcaaggcctaaagaagaggtttttggcggattctctctgttgattccgagtggcacaaccactgctttggtaggagaaagcgggagtgggaagtctactgtgatcagtttgatcgaaaggttttatgatccgaattccggacaagtgcttattgatggtgttgatttaaaggagtttcagttgaaatggattaggggaaagattggattggttagtcaagaacctgttctgttttcttcaagtataatggagaatatcggatacgggaaagagggggcaacggttgaagagatacaagcagcgtcgaagctagcaaacgcggctaaattcatcgataagttgcctctaggtttagagacattggtaggggagcatggaactcaactctcaggaggacagaaacagaggattgctatcgcgagggcgatacttaaagatccgcggatcttgctgttagatgaagcgacaagcgcacttgatgcggaatccgaaagagtggttcaagaggctttagataggataatggtgaaccggactacagtgattgtcgcgcatcggttaagcacggttagaaacgctgatatcatcgctgtgattcatcgtggaaagattgtggaagaaggttcgcattcagagttacttaaagatcatgaaggggcttattcacagcttctaaggttacaagagataaacaaagaatcaaagcgattggagatttctgatggatcaatcagcagtggatcatcaagaggaaacaacagcacaaggcaagatgatgactctttttctgttctgggtttacttgcaggccaagatagtactaaaatgtctcaagaactatcacagaaagtgtcgtttactcgaatcgctgctctaaacaaaccagagattccaattcttatacttggaaccctagtaggtgctgtgaacggcactatattccccatctttggtatcctctttgccaaagtaatcgaagctttcttcaaagcgcctcatgagctgaagagagattcaagattctggtcgatgatattcgtacttcttggtgtagccgctgtgatagtgtatccaacgactaactacttgtttgctatagctggagggagacttattcggaggataagatcaatgtgttttgagaaagttgttcacatggaggttgggtggttcgatgaacctgggaactcgagcggtgcaatgggagcgaggctctctgctgatgcagccttgatccggactcttgtgggagactcgctttgtctatcggttaaaaacgttgcgtctttggtgacaggactaatcatagctttcacggcgagctgggaagtggcgattatcatcttagtaattattccgtttattggaatcaatggatatattcaaattaagttcatgaaaggcttcagtgcagacgcaaaggcaaagtacgaggaggcgagtcaggtggcgaacgatgcagtggggagtataagaacggttgcgtctttctgtgcggaggaaaaagtgatggagatgtataagaaacgatgtgaagatacgattaaatctgggattaagcaaggtttaatcagcggagtagggtttggtatctcctttttcgttctttactctgtctacgctagttgtttctacgtgggagctagactggttaaagccggaaggacaaacttcaacgatgtttttcaggttttcttggccttgacgttaacagcagttgggatttctcaggcgagctcttttgctcctgattcgagtaaaggtaagggtgctgctgtttcgattttcagaattattgataggatatcgaagatagattcgagagacgaatcgggaatggtgttggagaatgtaaaaggagatatcgagctttgccacataagcttcacttaccaaactagacctgatgttcaagtctttcgtgacctctgtttgagcattcgtgccggacagactgttgctttggttggagaaagtgggtcaggaaaatctacggtgatttcactgttacagaggttttatgatccggattcaggtcatataactctagacggagttgagctcaagaagctgcgactaaaatggctaagacaacagatggggcttgtaggacaagagcctgtactattcaacgacacgatacgagccaacattgcttatggaaaaggcggcgaggaagcaaccgaggctgagattatagctgcttccgagctagctaatgcccacaggttcatctctagtatacaaaagggttatgatacggtggtgggagagagagggatacaattgtcaggaggacagaagcagcgcgtggcgattgcacgcgccatcgtgaaagaaccgaagattctgttactcgacgaagcgacgagcgcgttggacgcagaatcggagcgggtggttcaagacgcgcttgatcgggtgatggtgaaccggaccaccatcgtggtggctcacaggctttcaacgatcaagaatgctgacgtcatcgccgtcgtcaagaacggtgtgattgcagagaaagggacgcacgagacgttgatcaatatcgaaggtggagtttatgcctcgctcgttcaactccacatcaatgcttctaattga

SEQ ID NO: 79048 - protein, 1242 aa, Arabidopsis thaliana
  peptide (1)..(1242): Ceres Seq. ID no. 12648195
  misc_feature (1025)..(1211): Pfam Name: ABC transporter Pfam Description: ABC transporter
  misc_feature (7)..(929): Homolog of NCBI NO: 18496818 NR Description: ABC transporter AbcB3 [Dictyostelium discoideum]
  misc_feature (933)..(1233): Homolog of NCBI NO: 18496818 NR Description: ABC transporter AbcB3 [Dictyostelium discoideum]
  misc_feature (518)..(1236): Homolog of NCBI NO: 4204793 NR Description: P-glycoprotein [Solanum tuberosum]
  misc_feature (4)..(630): Homolog of NCBI NO: 4204793 NR Description: P-glycoprotein [Solanum tuberosum]
  misc_feature (3)..(1236): Homolog of NCBI NO: 15217809 NR Description: multidrug resistance P-glycoprotein, putative;
  misc_feature (421)..(1240): Homolog of NCBI NO: 24960750 NR Description: Hypothetical protein [Oryza sativa (japonica
  misc_feature (23)..(305): Homolog of NCBI NO: 24960750 NR Description: Hypothetical protein [Oryza sativa (japonica
  misc_feature (325)..(423): Homolog of NCBI NO: 24960750 NR Description: Hypothetical protein [Oryza sativa (japonica
  misc_feature (646)..(1234): Homolog of NCBI NO: 12585141 NR Description: Bile salt export pump (ATP-binding cassette,
  misc_feature (93)..(627): Homolog of NCBI NO: 12585141 NR Description: Bile salt export pump (ATP-binding cassette,
MVVHSNIPTHKEMKKGNLEANTKTVPFYKLFFFSDSTDVLLMIVGSIGAIANGVCSPLMTLLFGELIDAMGPNQNNEEIVERVSKVCLSLVYLGLGALGAAFLQVACWMITGERQAARIRSLYLKTILRQDIGFFDVEMTTGEVVGRMSGDTVLILDAMGEKVGKFIQLISTFVGGFVIAFLRGWLLTLVMLTSIPLLAMSGAAIAIIVTRASSQEQAAYAKASNVVEQTLGSIRTVASFTGEKQAMSSYKELINLAYKSNVKQGFVTGLGLGVMFLVFFSTYALGTWFGGEMILRKGYTGGAVINVMVTVVSSSIALGQASPCLTAFTAGKAAAYKMFETIEREPLIDTFDLNGKVLEDIRGEIELRDVCFSYPARPKEEVFGGFSLLIPSGTTTALVGESGSGKSTVISLIERFYDPNSGQVLIDGVDLKEFQLKWIRGKIGLVSQEPVLFSSSIMENIGYGKEGATVEEIQAASKLANAAKFIDKLPLGLETLVGEHGTQLSGGQKQRIAIARAILKDPRILLLDEATSALDAESERVVQEALDRIMVNRTTVIVAHRLSTVRNADIIAVIHRGKIVEEGSHSELLKDHEGAYSQLLRLQEINKESKRLEISDGSISSGSSRGNNSTRQDDDSFSVLGLLAGQDSTKMSQELSQKVSFTRIAALNKPEIPILILGTLVGAVNGTIFPIFGILFAKVIEAFFKAPHELKRDSRFWSMIFVLLGVAAVIVYPTTNYLFAIAGGRLIRRIRSMCFEKVVHMEVGWFDEPGNSSGAMGARLSADAALIRTLVGDSLCLSVKNVASLVTGLIIAFTASWEVAIIILVIIPFIGINGYIQIKFMKGFSADAKAKYEEASQVANDAVGSIRTVASFCAEEKVMEMYKKRCEDTIKSGIKQGLISGVGFGISFFVLYSVYASCFYVGARLVKAGRTNFNDVFQVFLALTLTAVGISQASSFAPDSSKGKGAAVSIFRIIDRISKIDSRDESGMVLENVKGDIELCHISFTYQTRPDVQVFRDLCLSIRAGQTVALVGESGSGKSTVISLLQRFYDPDSGHITLDGVELKKLRLKWLRQQMGLVGQEPVLFNDTIRANIAYGKGGEEATEAEIIAASELANAHRFISSIQKGYDTVVGERGIQLSGGQKQRVAIARAIVKEPKILLLDEATSALDAESERVVQDALDRVMVNRTTIVVAHRLSTIKNADVIAVVKNGVIAEKGTHETLINIEGGVYASLVQLHINASN

SEQ ID NO: 79049 - protein, 1230 aa, Arabidopsis thaliana; identical to SEQ ID NO: 73921
  peptide (1)..(1230): Ceres Seq. ID no. 12648196
  misc_feature (1013)..(1199): Pfam Name: ABC transporter Pfam Description: ABC transporter
  misc_feature (1)..(917): Homolog of NCBI NO: 18496818 NR Description: ABC transporter AbcB3 [Dictyostelium discoideum]
  misc_feature (921)..(1221): Homolog of NCBI NO: 18496818 NR Description: ABC transporter AbcB3 [Dictyostelium discoideum]
  misc_feature (506)..(1224): Homolog of NCBI NO: 4204793 NR Description: P-glycoprotein [Solanum tuberosum]
  misc_feature (1)..(618): Homolog of NCBI NO: 4204793 NR Description: P-glycoprotein [Solanum tuberosum]
  misc_feature (1)..(1224): Homolog of NCBI NO: 15217809 NR Description: multidrug resistance P-glycoprotein, putative;
  misc_feature (409)..(1228): Homolog of NCBI NO: 24960750 NR Description: Hypothetical protein [Oryza sativa (japonica
  misc_feature (11)..(293): Homolog of NCBI NO: 24960750 NR Description: Hypothetical protein [Oryza sativa (japonica
  misc_feature (313)..(411): Homolog of NCBI NO: 24960750 NR Description: Hypothetical protein [Oryza sativa (japonica
  misc_feature (634)..(1222): Homolog of NCBI NO: 12585141 NR Description: Bile salt export pump (ATP-binding cassette,
  misc_feature (81)..(615): Homolog of NCBI NO: 12585141 NR Description: Bile salt export pump (ATP-binding cassette,

SEQ ID NO: 79050 - protein, 1201 aa, Arabidopsis thaliana; identical to SEQ ID NO: 73922
  peptide (1)..(1201): Ceres Seq. ID no. 12648197
  misc_feature (984)..(1170): Pfam Name: ABC transporter Pfam Description: ABC transporter
  misc_feature (1)..(888): Homolog of NCBI NO: 18496818 NR Description: ABC transporter AbcB3 [Dictyostelium discoideum]
  misc_feature (892)..(1192): Homolog of NCBI NO: 18496818 NR Description: ABC transporter AbcB3 [Dictyostelium discoideum]
  misc_feature (477)..(1195): Homolog of NCBI NO: 4204793 NR Description: P-glycoprotein [Solanum tuberosum]
  misc_feature (1)..(589): Homolog of NCBI NO: 4204793 NR Description: P-glycoprotein [Solanum tuberosum]
  misc_feature (1)..(1195): Homolog of NCBI NO: 15217809 NR Description: multidrug resistance P-glycoprotein, putative;
  misc_feature (380)..(1199): Homolog of NCBI NO: 24960750 NR Description: Hypothetical protein [Oryza sativa (japonica
  misc_feature (1)..(264): Homolog of NCBI NO: 24960750 NR Description: Hypothetical protein [Oryza sativa (japonica
  misc_feature (284)..(382): Homolog of NCBI NO: 24960750 NR Description: Hypothetical protein [Oryza sativa (japonica
  misc_feature (605)..(1193): Homolog of NCBI NO: 12585141 NR Description: Bile salt export pump (ATP-binding cassette,
  misc_feature (52)..(586): Homolog of NCBI NO: 12585141 NR Description: Bile salt export pump (ATP-binding cassette,

SEQ ID NO: 79051 - DNA, 2697 bp, Arabidopsis thaliana
  misc_feature (1)..(2697): Ceres Seq. ID no. 12648253
  misc_feature: MA Experiment ID: 20000173 Result: Down-regulated in Transcription
  misc_feature: MA Experiment 20000173 PARAMETER Experiment Name: At_42deg_Heat_P Parameter: Age (day) Value: 14
  misc_feature: MA Experiment 20000173 PARAMETER Experiment Name: At_42deg_Heat_P Parameter: Organism Value: A. thaliana
  misc_feature: MA Experiment 20000173 PARAMETER Experiment Name: At_42deg_Heat_P Parameter: Plant Line Value: WS
  misc_feature: MA Experiment 20000173 PARAMETER Experiment Name: At_42deg_Heat_P Parameter: Temperature (deg C) Value: 42 vs. 22
  misc_feature: MA Experiment 20000173 PARAMETER Experiment Name: At_42deg_Heat_P Parameter: Timepoint (hr) Value: 6
  misc_feature: MA Experiment 20000173 PARAMETER Experiment Name: At_42deg_Heat_P Parameter: Tissue Value: Aerial
  misc_feature: MA Experiment ID: 20000184 Result: Down-regulated in Transcription
  misc_feature: MA Experiment 20000184 PARAMETER Experiment Name: At_Shoots__P Parameter: Age (day) Value: 7
  misc_feature: MA Experiment 20000184 PARAMETER Experiment Name: At_Shoots__P Parameter: Tissue Value: Shoots vs. Whole Plant
  misc_feature: MA Experiment ID: 20000234 Result: Down-regulated in Transcription
  misc_feature: MA Experiment 20000234 PARAMETER Experiment Name: At_Siliques_P Parameter: Age (day) Value: 21
  misc_feature: MA Experiment 20000234 PARAMETER Experiment Name: At_Siliques_P Parameter: Organism Value: A. thaliana
  misc_feature: MA Experiment 20000234 PARAMETER Experiment Name: At_Siliques_P Parameter: Plant Line Value: WS
  misc_feature: MA Experiment 20000234 PARAMETER Experiment Name: At_Siliques_P Parameter: Tissue Value: Less Than 5mm Siliques vs. Whole Plant
  misc_feature: MA Experiment ID: 20001560 Result: Down-regulated in Transcription
  misc_feature: MA Experiment 20001560 PARAMETER Experiment Name: At_Drought_Soil_Dry_P Parameter: Age (day) Value: 28
  misc_feature: MA Experiment 20001560 PARAMETER Experiment Name: At_Drought_Soil_Dry_P Parameter: Organism Value: A. thaliana
  misc_feature: MA Experiment 20001560 PARAMETER Experiment Name: At_Drought_Soil_Dry_P Parameter: Plant Line Value: WS
  misc_feature: MA Experiment 20001560 PARAMETER Experiment Name: At_Drought_Soil_Dry_P Parameter: Post Timepoint (hr) Value: None
  misc_feature: MA Experiment 20001560 PARAMETER Experiment Name: At_Drought_Soil_Dry_P Parameter: Post-Treatment Value: None
  misc_feature: MA Experiment 20001560 PARAMETER Experiment Name: At_Drought_Soil_Dry_P Parameter: Timepoint (day) Value: 14
  misc_feature: MA Experiment 20001560 PARAMETER Experiment Name: At_Drought_Soil_Dry_P Parameter: Treatment Value: Drought vs. No Drought
atgagttcaagaactggagcctctttgctcctgatcttgtttttcttccaaatttgttctgtttcggcactcacgaatggtttagacgcttctgctttaaatgctctgaagagtgaatggaccactcctcctgatggttgggaaggctctgatccttgtggaaccaattgggttggaattacatgtcaaaatgaccgtaaccttgacttggaaggaaagcttcctgccgatatatcgttcttgtccgagttgcggatcttggatttgtcatacaatcctaaattgtccggaccgcttccaccaaacatcggtaaccttgggaagttaaggaacttgatccttgtgggatgtagtttcagtggtcaaatccctgagtccattggaactctaaaagaacttatatatctctccctaaatttaaataaatttagtggaacaattccgccttcaattggcctgttatcaaaactatattggtttgatatagctgacaatcagattgaaggagagcttccagtttctaatgggacttctgcacctggacttgacatgcttcttcaaactaagcattttcattttggaaaaaacaagctttcaggcaatatcccaaaagaacttttcagctcaaacatgagtttaatacatgtcctcttcgatggaaaccaattcacgggcgaaattccagagaccctcagtctcgttaaaacgttgacggtgttacgccttgataggaacaaactcattggagatattccttcatatcttaacaatctcacaaatcttaacgaactgtacttggccaacaacagatttactggtactcttccaaatttaaccagcttgaccagtctctacacattggatgtgagcaataacactttggatttctcacccattccatcatggatctcttcattaccctccctatcaacattaaggatggaagggatccaacttaatggtccaataccaatctcatttttcagccctcctcagttgcagactgttatcttaaagcgaaatagtatagtggaaagcttagactttggtacagacgttagcagccagttggagtttgtggatttacaatacaatgaaataactgattataaaccatcagctaataaagtcctccaagtaatgtatgtatccttattggcaaataatccagtgtgtctagaggcgggaaacgggccgagttactgttcagcaatccaacacaatacctcattttctacactcccaacaaactgttctccatgcgaaccgggcatggaagcgagtcccacgtgccgctgtgcgtatccattcatgggaacactctacttccggtctccttctttctcagggttgttcaactccaccaacttctcaattctacagaaggcaatcgcggatttctttaagaagttcaattatcctgtagactccgttggtgttcggaacataagagagaatccaactgatcatcagcttctaatagatctattggtctttccattgggaagagagagttttaatcagacaggaatgtcacttgttggttttgcatttagcaaccagacttataagcctcctccgatatttggcccttatattttcaaagctgatttgtacaaacagttctctgctaaatgggatacaagtaagagtagtattgatgctccgcagctaatgggagcaaaagcgtttacttttgaggagctgaagaaatgcactgacaacttttcagaggcaaatgatgttggcggtggaggttacggcaaggtttatagagggattcttcctaatgggcaactcatagcaatcaaaagggctcaacaaggatctttgcaaggagggttggagttcaaaactgagattgagcttctctcaagggtccatcataagaatgttgtcagactcttgggcttctgctttgaccggaatgaacaaatgctcgtatacgagtacatttcaaatgggtcacttaaagacagtctgtccgggaagagtgggattcgattggattggacaagaagacttaaaatagcacttggttcaggcaagggcttggcttatcttcatgaacttgctgatcctccaattatacatagagacatcaaatcaaataacatattacttgatgaaaatctaaccgcaaaggttgccgacttcggtctctccaaacttgtgggagaccctgagaaaactcatgtcacaacacaagtcaaaggaaccatgggctacttggatccagagtactacatgacgaatcaattaacggagaagagcgatgtgtatgggtttggtgtggttttactcgagctattaaccggtagaagtccgatagagagaggcaaatatgtggtgagagaggtgaagacaaagatgaataaatctcggagtttgtatgacctgcaggagttgttggacacaacgatcatagcaagcagtgggaatctaaaagggttcgagaagtatgtagacttggctttgagatgtgtggaggaggaaggagttaataggccatcaatgggtgaggttgtgaaagagattgagaacataatgcagcttgcgggattaaatcctaactcagattcagcaacgagttcaagaacgtatgaggacgcaatcaaaggatctggtgatccttatggcagtgaatcgtttcagtacagtgggaattttccagcttcaaagcttgagccccaatga

SEQ ID NO: 79052 - protein, 898 aa, Arabidopsis thaliana
  peptide (1)..(898): Ceres Seq. ID no. 12648254
  misc_feature (576)..(776): Pfam Name: Protein kinase domain Pfam Description: Protein kinase domain
  misc_feature (544)..(898): Homolog of NCBI NO: 15240549 NR Description: leucine-rich repeat transmembrane protein kinase, protein id: At5g49780.1 [Arabidopsis thaliana]
  misc_feature (1)..(345): Homolog of NCBI NO: 15240549 NR Description: leucine-rich repeat transmembrane protein kinase, protein id: At5g49780.1 [Arabidopsis thaliana]
  misc_feature (85)..(564): Homolog of NCBI NO: 15240549 NR Description: leucine-rich repeat transmembrane protein kinase, protein id: At5g49780.1 [Arabidopsis thaliana]
  misc_feature (5)..(560): Homolog of NCBI NO: 30699436 NR Description: leucine-rich repeat transmembrane protein kinase, [Arabidopsis thaliana] >gi|26450791|dbj|BAC42504.1| unknown
  misc_feature (546)..(898): Homolog of NCBI NO: 30699436 NR Description: leucine-rich repeat transmembrane protein kinase, [Arabidopsis thaliana] >gi|26450791|dbj|BAC42504.1| unknown
  misc_feature (5)..(560): Homolog of NCBI NO: 7715608 NR Description: F20B17.5 [Arabidopsis thaliana]
  misc_feature (543)..(898): Homolog of NCBI NO: 7715608 NR Description: F20B17.5 [Arabidopsis thaliana]
  misc_feature (544)..(898): Homolog of NCBI NO: 34909240 NR Description: putative receptor protein kinase [Oryza sativa
  misc_feature (113)..(351): Homolog of NCBI NO: 34909240 NR Description: putative receptor protein kinase [Oryza sativa
  misc_feature (185)..(539): Homolog of NCBI NO: 34909240 NR Description: putative receptor protein kinase [Oryza sativa
MSSRTGASLLLILFFFQICSVSALTNGLDASALNALKSEWTTPPDGWEGSDPCGTNWVGITCQNDRNLDLEGKLPADISFLSELRILDLSYNPKLSGPLPPNIGNLGKLRNLILVGCSFSGQIPESIGTLKELIYLSLNLNKFSGTIPPSIGLLSKLYWFDIADNQIEGELPVSNGTSAPGLDMLLQTKHFHFGKNKLSGNIPKELFSSNMSLIHVLFDGNQFTGEIPETLSLVKTLTVLRLDRNKLIGDIPSYLNNLTNLNELYLANNRFTGTLPNLTSLTSLYTLDVSNNTLDFSPIPSWISSLPSLSTLRMEGIQLNGPIPISFFSPPQLQTVILKRNSIVESLDFGTDVSSQLEFVDLQYNEITDYKPSANKVLQVMYVSLLANNPVCLEAGNGPSYCSAIQHNTSFSTLPTNCSPCEPGMEASPTCRCAYPFMGTLYFRSPSFSGLFNSTNFSILQKAIADFFKKFNYPVDSVGVRNIRENPTDHQLLIDLLVFPLGRESFNQTGMSLVGFAFSNQTYKPPPIFGPYIFKADLYKQFSAKWDTSKSSIDAPQLMGAKAFTFEELKKCTDNFSEANDVGGGGYGKVYRGILPNGQLIAIKRAQQGSLQGGLEFKTEIELLSRVHHKNVVRLLGFCFDRNEQMLVYEYISNGSLKDSLSGKSGIRLDWTRRLKIALGSGKGLAYLHELADPPIIHRDIKSNNILLDENLTAKVADFGLSKLVGDPEKTHVTTQVKGTMGYLDPEYYMTNQLTEKSDVYGFGVVLLELLTGRSPIERGKYVVREVKTKMNKSRSLYDLQELLDTTIIASSGNLKGFEKYVDLALRCVEEEGVNRPSMGEVVKEIENIMQLAGLNPNSDSATSSRTYEDAIKGSGDPYGSESFQYSGNFPASKLEPQ

SEQ ID NO: 79053 - protein, 715 aa, Arabidopsis thaliana
  peptide (1)..(715): Ceres Seq. ID no. 12648255
  misc_feature (393)..(593): Pfam Name: Protein kinase domain Pfam Description: Protein kinase domain
  misc_feature (361)..(715): Homolog of NCBI NO: 15240549 NR Description: leucine-rich repeat transmembrane protein kinase, protein id: At5g49780.1 [Arabidopsis thaliana]
  misc_feature (1)..(162): Homolog of NCBI NO: 15240549 NR Description: leucine-rich repeat transmembrane protein kinase, protein id: At5g49780.1 [Arabidopsis thaliana]
  misc_feature (1)..(381): Homolog of NCBI NO: 15240549 NR Description: leucine-rich repeat transmembrane protein kinase, protein id: At5g49780.1 [Arabidopsis thaliana]
  misc_feature (1)..(377): Homolog of NCBI NO: 30699436 NR Description: leucine-rich repeat transmembrane protein kinase, [Arabidopsis thaliana] >gi|26450791|dbj|BAC42504.1| unknown
  misc_feature (363)..(715): Homolog of NCBI NO: 30699436 NR Description: leucine-rich repeat transmembrane protein kinase, [Arabidopsis thaliana] >gi|26450791|dbj|BAC42504.1| unknown
  misc_feature (1)..(377): Homolog of NCBI NO: 7715608 NR Description: F20B17.5 [Arabidopsis thaliana]
  misc_feature (360)..(715): Homolog of NCBI NO: 7715608 NR Description: F20B17.5 [Arabidopsis thaliana]
  misc_feature (361)..(715): Homolog of NCBI NO: 34909240 NR Description: putative receptor protein kinase [Oryza sativa
  misc_feature (1)..(168): Homolog of NCBI NO: 34909240 NR Description: putative receptor protein kinase [Oryza sativa
  misc_feature (2)..(356): Homolog of NCBI NO: 34909240 NR Description: putative receptor protein kinase [Oryza sativa
MLLQTKHFHFGKNKLSGNIPKELFSSNMSLIHVLFDGNQFTGEIPETLSLVKTLTVLRLDRNKLIGDIPSYLNNLTNLNELYLANNRFTGTLPNLTSLTSLYTLDVSNNTLDFSPIPSWISSLPSLSTLRMEGIQLNGPIPISFFSPPQLQTVILKRNSIVESLDFGTDVSSQLEFVDLQYNEITDYKPSANKVLQVMYVSLLANNPVCLEAGNGPSYCSAIQHNTSFSTLPTNCSPCEPGMEASPTCRCAYPFMGTLYFRSPSFSGLFNSTNFSILQKAIADFFKKFNYPVDSVGVRNIRENPTDHQLLIDLLVFPLGRESFNQTGMSLVGFAFSNQTYKPPPIFGPYIFKADLYKQFSAKWDTSKSSIDAPQLMGAKAFTFEELKKCTDNFSEANDVGGGGYGKVYRGILPNGQLIAIKRAQQGSLQGGLEFKTEIELLSRVHHKNVVRLLGFCFDRNEQMLVYEYISNGSLKDSLSGKSGIRLDWTRRLKIALGSGKGLAYLHELADPPIIHRDIKSNNILLDENLTAKVADFGLSKLVGDPEKTHVTTQVKGTMGYLDPEYYMTNQLTEKSDVYGFGVVLLELLTGRSPIERGKYVVREVKTKMNKSRSLYDLQELLDTTIIASSGNLKGFEKYVDLALRCVEEEGVNRPSMGEVVKEIENIMQLAGLNPNSDSATSSRTYEDAIKGSGDPYGSESFQYSGNFPASKLEPQ

SEQ ID NO: 79054 - protein, 688 aa, Arabidopsis thaliana
  peptide (1)..(688): Ceres Seq. ID no. 12648256
  misc_feature (366)..(566): Pfam Name: Protein kinase domain Pfam Description: Protein kinase domain
  misc_feature (334)..(688): Homolog of NCBI NO: 15240549 NR Description: leucine-rich repeat transmembrane protein kinase, protein id: At5g49780.1 [Arabidopsis thaliana]
  misc_feature (1)..(135): Homolog of NCBI NO: 15240549 NR Description: leucine-rich repeat transmembrane protein kinase, protein id: At5g49780.1 [Arabidopsis thaliana]
  misc_feature (1)..(354): Homolog of NCBI NO: 15240549 NR Description: leucine-rich repeat transmembrane protein kinase, protein id: At5g49780.1 [Arabidopsis thaliana]
  misc_feature (1)..(350): Homolog of NCBI NO: 30699436 NR Description: leucine-rich repeat transmembrane protein kinase, [Arabidopsis thaliana] >gi|26450791|dbj|BAC42504.1| unknown
  misc_feature (336)..(688): Homolog of NCBI NO: 30699436 NR Description: leucine-rich repeat transmembrane protein kinase, [Arabidopsis thaliana] >gi|26450791|dbj|BAC42504.1| unknown
  misc_feature (1)..(350): Homolog of NCBI NO: 7715608 NR Description: F20B17.5 [Arabidopsis thaliana]
  misc_feature (333)..(688): Homolog of NCBI NO: 7715608 NR Description: F20B17.5 [Arabidopsis thaliana]
  misc_feature (334)..(688): Homolog of NCBI NO: 34909240 NR Description: putative receptor protein kinase [Oryza sativa
  misc_feature (1)..(141): Homolog of NCBI NO: 34909240 NR Description: putative receptor protein kinase [Oryza sativa
  misc_feature (1)..(329): Homolog of NCBI NO: 34909240 NR Description: putative receptor protein kinase [Oryza sativa
MSLIHVLFDGNQFTGEIPETLSLVKTLTVLRLDRNKLIGDIPSYLNNLTNLNELYLANNRFTGTLPNLTSLTSLYTLDVSNNTLDFSPIPSWISSLPSLSTLRMEGIQLNGPIPISFFSPPQLQTVILKRNSIVESLDFGTDVSSQLEFVDLQYNEITDYKPSANKVLQVMYVSLLANNPVCLEAGNGPSYCSAIQHNTSFSTLPTNCSPCEPGMEASPTCRCAYPFMGTLYFRSPSFSGLFNSTNFSILQKAIADFFKKFNYPVDSVGVRNIRENPTDHQLLIDLLVFPLGRESFNQTGMSLVGFAFSNQTYKPPPIFGPYIFKADLYKQFSAKWDTSKSSIDAPQLMGAKAFTFEELKKCTDNFSEANDVGGGGYGKVYRGILPNGQLIAIKRAQQGSLQGGLEFKTEIELLSRVHHKNVVRLLGFCFDRNEQMLVYEYISNGSLKDSLSGKSGIRLDWTRRLKIALGSGKGLAYLHELADPPIIHRDIKSNNILLDENLTAKVADFGLSKLVGDPEKTHVTTQVKGTMGYLDPEYYMTNQLTEKSDVYGFGVVLLELLTGRSPIERGKYVVREVKTKMNKSRSLYDLQELLDTTIIASSGNLKGFEKYVDLALRCVEEEGVNRPSMGEVVKEIENIMQLAGLNPNSDSATSSRTYEDAIKGSGDPYGSESFQYSGNFPASKLEPQ

SEQ ID NO: 79055 - DNA, 2913 bp, Arabidopsis thaliana
  misc_feature (1)..(2913): Ceres Seq. ID no. 12648257
  misc_feature: MA Experiment ID: 20000227 Result: Down-regulated in Transcription
  misc_feature: MA Experiment 20000227 PARAMETER Experiment Name: At_Root-Tips-vs-Tops_P Parameter: Tissue Value: Root Tips vs. Root Tops
  misc_feature: MA Experiment ID: 20000269 Result: Up-regulated in Transcription
  misc_feature: MA Experiment 20000269 PARAMETER Experiment Name: At_1mM_KNO3_L-vs-H_Roots_P Parameter: Age (day) Value: 7,10,12
  misc_feature: MA Experiment 20000269 PARAMETER Experiment Name: At_1mM_KNO3_L-vs-H_Roots_P Parameter: Organism Value: A. thaliana
  misc_feature: MA Experiment 20000269 PARAMETER Experiment Name: At_1mM_KNO3_L-vs-H_Roots_P Parameter: Plant Line Value: WS
  misc_feature: MA Experiment 20000269 PARAMETER Experiment Name: At_1mM_KNO3_L-vs-H_Roots_P Parameter: Timepoint (day) Value: 7,10,12
  misc_feature: MA Experiment 20000269 PARAMETER Experiment Name: At_1mM_KNO3_L-vs-H_Roots_P Parameter: Tissue Value: Roots
  misc_feature: MA Experiment 20000269 PARAMETER Experiment Name: At_1mM_KNO3_L-vs-H_Roots_P Parameter: Treatment Value: 1mM KNO3 vs. 50mM KNO3
atgagttcaagaattgaagtctttgtgctcttgatcttgctttcgttccaattttgttctgtatctgcgcagacaaatggtttcgatgctgatgctttacaatacctgaagagtagtttgaccatacctcctcggaattggaaaggctatgatccttgtggaaccaattgggttggaattgcatgtgaatatggccgcgttactataaaatcactaggcaaccttaacttggaaggaaagcttcctgcctttattacgacgttgtctgaattgcataccctggatttgacatctaatcctaatttgaccggaccgcttccactaaatatcggtaaccttaaggagttgacgaacttaaatcttatgggatgtggtttcagtggtcaaatccctgagtccataggatctctagaacaacttgtaacactctccttgaattcaaataaatttaatggaacgattccggcttccattggcctgttatcgaaactatattggtttgatatagctgacaatcagatagaaggaaagcttccagtttctgatggggcttctttacctggacttgatatgcttcttcaaactaagcattttcattttggaaaaaacaagctttctggtgatatccctgaaaagctattcagtgccaacatgactttaaaacatttgctattcgatggaaacctactaaccggtgaaatcccacaaagcctcagccttgttaaaacattgacggtgttacgccttgataggaatagactaagtggagaaattcctccaagtcttaataatctcacaaatcttcaagaactgtacttgtccgacaacaaatttaccggtagtcttccaagtttaaccagcttgaccagtctctccacattagctgtcagcaataaccgattaacttcctcacaaatttcatcatggatctcattattaccgacttccttggcaacattgtatgaacatcatctctctctcgctcttgatctccatgtgtatatacttgctaagaacaaatggtcttctgcttggcagaaggatggcagggctccaacttcaagtatcctaaagcgtaactggctaaacgaaacactagacttcggtaccaacaagagccaaaacctagattttgtggatttacaatataatgacataacagagtatattaaacaaccagctaataaaggaagcagcaggatagtaatgtatgtatgcttggcaaataatccagtgtgccccgaggtagggaacccaccaaatgaatactgcatagaagtcgaacacaattcctcatattcttcccctaagaacacatgtggtcgttgtagtggtgaggacagggaacccattcccaccacgtgccgttgtgtgtatccaatcacaggaacactcacttttaggtcaccttccttctcagggtattccaacaacgatacattcgagaacctcaggctaaacctaactggtttctttgagaatagaaattatacagtggattctgtggccataagaaacataagagaagatgaagatgatcattatcttctaatagatctctctctctttccatataaacaagacagatttaatgagacgggaatggatagtgttatttccaggtttagcacacagacttataagcctcctaatacctttggcccttacatattcaaagccaataagtacaataagttccctgcaggaggttcaaactcgtcacacatcattggagctgtagttggttctactgtttttctgttaattctaatgatagctgggatctatgctcttaagcaaaagagaagagcagagaaagcaaatgatcaaattaatccttttgccaagtgggatgcgaatcagaacagtgtcgatgcaccacagcttatgggaacaaaagcatttacttttgaagagatgaggaaatgtgcaaacaacttttcagtggcaaatgatgtcggtggtggaggttatggccaagtatacaaagggattcttccttctggtcaactcatagcaattaaaagagctcaaccaggatctttgcaaggagcgttggagtttaaaactgagatcgagcttctttcaagggtccatcataaaaatgttgtcaaactcttaggcttttgctttgatcgaggagaacaaatgctcgtctacgagtatattccaaatggttctcttagagatagtctatcagggaaaagtgggattagacttgattggacgagaaggcttagaatagcacttggttcagggaagggtttggcttatcttcatgagcttgcagatcctccaattatacacagagacgttaaatcaagtaatgtattacttgatgaaagtttaactgcaaaagttgctgattttggcttatctcaacttgtggaagatgctgagaaagctaatgtaacggcacaagtgaagggaactatgggctacttggatcctgagtactacatgacgaatcaattgacagagaagagcgatgtatatgggtttggggttatgatgcttgagctactgactggtaagattcctatagagaatggaaaatatgtggtgaaagagatgaagatgaagatgaataaatcgaagaacttgtatgacctacaagattttctggacactacgatcagcgcaacgtccaacaggaatcttaagggatttgaaaagtatgtagatgtggctctaagatgcgtagatccagaaggagtgaagaggccatcaatgaatgaggttgtgaaagagattgagaacataatgcagtatgcaggattaaaccctaacgtagaatcatatgcgagttcaagaacgtatgatgaagcaagcaaagaatctggagatctttatggaaacaactcttttgagtatagtgcaagtttcccaactacaaacctcgaacctcaatga

SEQ ID NO: 79056 - protein, 970 aa, Arabidopsis thaliana
  peptide (1)..(970): Ceres Seq. ID no. 12648258
  misc_feature (647)..(847): Pfam Name: Protein kinase domain Pfam Description: Protein kinase domain
  misc_feature (116)..(949): Homolog of NCBI NO: 8978273 NR Description: receptor protein kinase-like [Arabidopsis
  misc_feature (9)..(970): Homolog of NCBI NO: 7715608 NR Description: F20B17.5 [Arabidopsis thaliana]
  misc_feature (89)..(970): Homolog of NCBI NO: 30699436 NR Description: leucine-rich repeat transmembrane protein kinase, [Arabidopsis thaliana] >gi|26450791|dbj|BAC42504.1| unknown
  misc_feature (1)..(330): Homolog of NCBI NO: 15240549 NR Description: leucine-rich repeat transmembrane protein kinase, protein id: At5g49780.1 [Arabidopsis thaliana]
  misc_feature (206)..(970): Homolog of NCBI NO: 34909240 NR Description: putative receptor protein kinase [Oryza sativa
  misc_feature (74)..(923): Homolog of NCBI NO: 15222211 NR Description: leucine-rich repeat transmembrane protein kinase,
  misc_feature (1)..(320): Homolog of NCBI NO: 8978273 NR Description: receptor protein kinase-like [Arabidopsis
  misc_feature (85)..(955): Homolog of NCBI NO: 30679474 NR Description: leucine-rich repeat transmembrane protein kinase,
  misc_feature (119)..(936): Homolog of NCBI NO: 34905792 NR Description: P0401G10.22 [Oryza sativa (japonica
  misc_feature (143)..(955): Homolog of NCBI NO: 11346408 NR Description: hypothetical protein T20L15.220 - Arabidopsis >gi|7329668|emb|CAB82765.1| putative protein [Arabidopsis
MSSRIEVFVLLILLSFQFCSVSAQTNGFDADALQYLKSSLTIPPRNWKGYDPCGTNWVGIACEYGRVTIKSLGNLNLEGKLPAFITTLSELHTLDLTSNPNLTGPLPLNIGNLKELTNLNLMGCGFSGQIPESIGSLEQLVTLSLNSNKFNGTIPASIGLLSKLYWFDIADNQIEGKLPVSDGASLPGLDMLLQTKHFHFGKNKLSGDIPEKLFSANMTLKHLLFDGNLLTGEIPQSLSLVKTLTVLRLDRNRLSGEIPPSLNNLTNLQELYLSDNKFTGSLPSLTSLTSLSTLAVSNNRLTSSQISSWISLLPTSLATLYEHHLSLALDLHVYILAKNKWSSAWQKDGRAPTSSILKRNWLNETLDFGTNKSQNLDFVDLQYNDITEYIKQPANKGSSRIVMYVCLANNPVCPEVGNPPNEYCIEVEHNSSYSSPKNTCGRCSGEDREPIPTTCRCVYPITGTLTFRSPSFSGYSNNDTFENLRLNLTGFFENRNYTVDSVAIRNIREDEDDHYLLIDLSLFPYKQDRFNETGMDSVISRFSTQTYKPPNTFGPYIFKANKYNKFPAGGSNSSHIIGAVVGSTVFLLILMIAGIYALKQKRRAEKANDQINPFAKWDANQNSVDAPQLMGTKAFTFEEMRKCANNFSVANDVGGGGYGQVYKGILPSGQLIAIKRAQPGSLQGALEFKTEIELLSRVHHKNVVKLLGFCFDRGEQMLVYEYIPNGSLRDSLSGKSGIRLDWTRRLRIALGSGKGLAYLHELADPPIIHRDVKSSNVLLDESLTAKVADFGLSQLVEDAEKANVTAQVKGTMGYLDPEYYMTNQLTEKSDVYGFGVMMLELLTGKIPIENGKYVVKEMKMKMNKSKNLYDLQDFLDTTISATSNRNLKGFEKYVDVALRCVDPEGVKRPSMNEVVKEIENIMQYAGLNPNVESYASSRTYDEASKESGDLYGNNSFEYSASFPTTNLEPQ

SEQ ID NO: 79057 - protein, 849 aa, Arabidopsis thaliana
  peptide (1)..(849): Ceres Seq. ID no. 12648259
  misc_feature (526)..(726): Pfam Name: Protein kinase domain Pfam Description: Protein kinase domain
  misc_feature (1)..(828): Homolog of NCBI NO: 8978273 NR Description: receptor protein kinase-like [Arabidopsis
  misc_feature (1)..(849): Homolog of NCBI NO: 7715608 NR Description: F20B17.5 [Arabidopsis thaliana]
  misc_feature (1)..(849): Homolog of NCBI NO: 30699436 NR Description: leucine-rich repeat transmembrane protein kinase, [Arabidopsis thaliana] >gi|26450791|dbj|BAC42504.1| unknown
  misc_feature (1)..(209): Homolog of NCBI NO: 15240549 NR Description: leucine-rich repeat transmembrane protein kinase, protein id: At5g49780.1 [Arabidopsis thaliana]
  misc_feature (85)..(849): Homolog of NCBI NO: 34909240 NR Description: putative receptor protein kinase [Oryza sativa
  misc_feature (1)..(802): Homolog of NCBI NO: 15222211 NR Description: leucine-rich repeat transmembrane protein kinase,
  misc_feature (1)..(199): Homolog of NCBI NO: 8978273 NR Description: receptor protein kinase-like [Arabidopsis
  misc_feature (1)..(834): Homolog of NCBI NO: 30679474 NR Description: leucine-rich repeat transmembrane protein kinase,
  misc_feature (1)..(815): Homolog of NCBI NO: 34905792 NR Description: P0401G10.22 [Oryza sativa (japonica
  misc_feature (22)..(834): Homolog of NCBI NO: 11346408 NR Description: hypothetical protein T20L15.220 - Arabidopsis >gi|7329668|emb|CAB82765.1| putative protein [Arabidopsis
MGCGFSGQIPESIGSLEQLVTLSLNSNKFNGTIPASIGLLSKLYWFDIADNQIEGKLPVSDGASLPGLDMLLQTKHFHFGKNKLSGDIPEKLFSANMTLKHLLFDGNLLTGEIPQSLSLVKTLTVLRLDRNRLSGEIPPSLNNLTNLQELYLSDNKFTGSLPSLTSLTSLSTLAVSNNRLTSSQISSWISLLPTSLATLYEHHLSLALDLHVYILAKNKWSSAWQKDGRAPTSSILKRNWLNETLDFGTNKSQNLDFVDLQYNDITEYIKQPANKGSSRIVMYVCLANNPVCPEVGNPPNEYCIEVEHNSSYSSPKNTCGRCSGEDREPIPTTCRCVYPITGTLTFRSPSFSGYSNNDTFENLRLNLTGFFENRNYTVDSVAIRNIREDEDDHYLLIDLSLFPYKQDRFNETGMDSVISRFSTQTYKPPNTFGPYIFKANKYNKFPAGGSNSSHIIGAVVGSTVFLLILMIAGIYALKQKRRAEKANDQINPFAKWDANQNSVDAPQLMGTKAFTFEEMRKCANNFSVANDVGGGGYGQVYKGILPSGQLIAIKRAQPGSLQGALEFKTEIELLSRVHHKNVVKLLGFCFDRGEQMLVYEYIPNGSLRDSLSGKSGIRLDWTRRLRIALGSGKGLAYLHELADPPIIHRDVKSSNVLLDESLTAKVADFGLSQLVEDAEKANVTAQVKGTMGYLDPEYYMTNQLTEKSDVYGFGVMMLELLTGKIPIENGKYVVKEMKMKMNKSKNLYDLQDFLDTTISATSNRNLKGFEKYVDVALRCVDPEGVKRPSMNEVVKEIENIMQYAGLNPNVESYASSRTYDEASKESGDLYGNNSFEYSASFPTTNLEPQ

SEQ ID NO: 79058 - protein, 780 aa, Arabidopsis thaliana
  peptide (1)..(780): Ceres Seq. ID no. 12648260
  misc_feature (457)..(657): Pfam Name: Protein kinase domain Pfam Description: Protein kinase domain
  misc_feature (1)..(759): Homolog of NCBI NO: 8978273 NR Description: receptor protein kinase-like [Arabidopsis
  misc_feature (1)..(780): Homolog of NCBI NO: 7715608 NR Description: F20B17.5 [Arabidopsis thaliana]
  misc_feature (1)..(780): Homolog of NCBI NO: 30699436 NR Description: leucine-rich repeat transmembrane protein kinase, [Arabidopsis thaliana] >gi|26450791|dbj|BAC42504.1| unknown
  misc_feature (1)..(140): Homolog of NCBI NO: 15240549 NR Description: leucine-rich repeat transmembrane protein kinase, protein id: At5g49780.1 [Arabidopsis thaliana]
  misc_feature (16)..(780): Homolog of NCBI NO: 34909240 NR Description: putative receptor protein kinase [Oryza sativa
  misc_feature (1)..(733): Homolog of NCBI NO: 15222211 NR Description: leucine-rich repeat transmembrane protein kinase,
  misc_feature (1)..(130): Homolog of NCBI NO: 8978273 NR Description: receptor protein kinase-like [Arabidopsis
  misc_feature (1)..(765): Homolog of NCBI NO: 30679474 NR Description: leucine-rich repeat transmembrane protein kinase,
  misc_feature (1)..(746): Homolog of NCBI NO: 34905792 NR Description: P0401G10.22 [Oryza sativa (japonica
  misc_feature (1)..(765): Homolog of NCBI NO: 11346408 NR Description: hypothetical protein T20L15.220 - Arabidopsis >gi|7329668|emb|CAB82765.1| putative protein [Arabidopsis
MLLQTKHFHFGKNKLSGDIPEKLFSANMTLKHLLFDGNLLTGEIPQSLSLVKTLTVLRLDRNRLSGEIPPSLNNLTNLQELYLSDNKFTGSLPSLTSLTSLSTLAVSNNRLTSSQISSWISLLPTSLATLYEHHLSLALDLHVYILAKNKWSSAWQKDGRAPTSSILKRNWLNETLDFGTNKSQNLDFVDLQYNDITEYIKQPANKGSSRIVMYVCLANNPVCPEVGNPPNEYCIEVEHNSSYSSPKNTCGRCSGEDREPIPTTCRCVYPITGTLTFRSPSFSGYSNNDTFENLRLNLTGFFENRNYTVDSVAIRNIREDEDDHYLLIDLSLFPYKQDRFNETGMDSVISRFSTQTYKPPNTFGPYIFKANKYNKFPAGGSNSSHIIGAVVGSTVFLLILMIAGIYALKQKRRAEKANDQINPFAKWDANQNSVDAPQLMGTKAFTFEEMRKCANNFSVANDVGGGGYGQVYKGILPSGQLIAIKRAQPGSLQGALEFKTEIELLSRVHHKNVVKLLGFCFDRGEQMLVYEYIPNGSLRDSLSGKSGIRLDWTRRLRIALGSGKGLAYLHELADPPIIHRDVKSSNVLLDESLTAKVADFGLSQLVEDAEKANVTAQVKGTMGYLDPEYYMTNQLTEKSDVYGFGVMMLELLTGKIPIENGKYVVKEMKMKMNKSKNLYDLQDFLDTTISATSNRNLKGFEKYVDVALRCVDPEGVKRPSMNEVVKEIENIMQYAGLNPNVESYASSRTYDEASKESGDLYGNNSFEYSASFPTTNLEPQ

SEQ ID NO: 79059 - DNA, 1329 bp, Arabidopsis thaliana
  misc_feature (1)..(1329): Ceres Seq. ID no. 12648299
  misc_feature: MA Experiment ID: 20000112 Result: Up-regulated in Transcription
  misc_feature: MA Experiment 20000112 PARAMETER Experiment Name: At_42deg_Heat_cDNA_P Parameter: Temperature (deg C) Value: 42 vs. 22
  misc_feature: MA Experiment 20000112 PARAMETER Experiment Name: At_42deg_Heat_cDNA_P Parameter: Timepoint (hr) Value: 2
  misc_feature: MA Experiment 20000112 PARAMETER Experiment Name: At_42deg_Heat_cDNA_P Parameter: Tissue Value: Aerial
  misc_feature: MA Experiment ID: 20000264 Result: Up-regulated in Transcription
  misc_feature: MA Experiment 20000264 PARAMETER Experiment Name: At_Open_Flower_P Parameter: Age (day) Value: 21
  misc_feature: MA Experiment 20000264 PARAMETER Experiment Name: At_Open_Flower_P Parameter: Plant Line Value: WS
  misc_feature: MA Experiment 20000264 PARAMETER Experiment Name: At_Open_Flower_P Parameter: Tissue Value: Open Flower vs. Whole Plant
  misc_feature: MA Experiment ID: 20000286 Result: Up-regulated in Transcription
  misc_feature: MA Experiment 20000286 PARAMETER Experiment Name: At_Open_Flower_P Parameter: Age (day) Value: 21
  misc_feature: MA Experiment 20000286 PARAMETER Experiment Name: At_Open_Flower_P Parameter: Plant Line Value: WS
  misc_feature: MA Experiment 20000286 PARAMETER Experiment Name: At_Open_Flower_P Parameter: Tissue Value: Half Open vs. Whole Plant
atgacttcttcttctcattgtttcttgatcgtttcagtggcacttctattgcaagttctcttatcccctgtttcggccttaaccttaacctccacaaaatacattaataaattatgccagatgtcatttgtcgacaataaacccttctgtttgcaaacattgagtgcctatcctcctgcggcttctgccactggcttgctcccacttgcgtcagccgtgatccgcggcattgtcctaccccaagccaagaagtctgcgagttttgcaaatggagcagcgaaaaaggagccgagcttgaagacacagttccagacgtgccaagaggcctttgtaagtattggagattctctcatgagcgcttttgaagaactcaagcgcgatccacatatcgcaacctatgatgttatgacttgtaccgaccatacaacccaagtgaagaatttggtcggaaaaaacacagatgtggcttcgaagactctcatagagatgacaatgcaaatggagaagctcattcctcttgctcttgcatccacacaagtggcaaaccaaggagaacaagaagagtccagggccaatgagcctgagggtatcaaatcagtgattgatgacatctacatttttgaagacgaccctgtggttgataggttcaataggtttggcacggagatgtctgccatggtctcggccttgacacaggtggtttctgctcgctctcagactgaggctgaaggtgctcactcttcttcctcttcggctggacataaaagaggatggcttggaatcgattctgctcctattccctcatcatttgctcgtgtagactcttcacataatccgatcgaagaatccatgagcaaggcatttccagaggaagcaagggagaaaaaaaggaggtacagaggagtaaggcagagaccatggggcaaatgggcagctgagatacgtgatccacatagagccgctagggtttggctcgggacgtttgatacagcggaggccgcggctagagcctacgacgaggctgcactccggttccgtggaaataaagcaaagctaaatttcccagaggatgtaaggattcttcctcctccccctcctcttcttcgttcaccagctgacacggtggcgaataaagcagaagaggatctgataaattattggagttatacaaagttgttgcaaagttcaggccaacggtcatttctcgagcgaggacaagaagagagtagtaacatatttgaacattcaccaatggaacaacctctgcctccttcaagttctggtccaagttcctctaattttcctgcaccttctctacctaatacatag

SEQ ID NO: 79060 - protein, 442 aa, Arabidopsis thaliana
  peptide (1)..(442): Ceres Seq. ID no. 12648300
  misc_feature (296)..(360): Pfam Name: AP2 domain Pfam Description: AP2 domain
  misc_feature (223)..(442): Homolog of NCBI NO: 34221731 NR Description: putative AP2 domain transcription factor
  misc_feature (223)..(442): Homolog of NCBI NO: 15240610 NR Description: putative protein; protein id: At5g50080.1 thaliana] >gi|10177219|dbj|BAB10294.1| contains similarity to AP2
  misc_feature (1)..(180): Homolog of NCBI NO: 15240609 NR Description: putative protein; protein id: At5g50070.1
  misc_feature (9)..(180): Homolog of NCBI NO: 15221951 NR Description: hypothetical protein; protein id: At1g54980.1
  misc_feature (1)..(190): Homolog of NCBI NO: 15240602 NR Description: putative protein; protein id: At5g50030.1
  misc_feature (1)..(178): Homolog of NCBI NO: 15240603 NR Description: putative protein; protein id: At5g50040.1
  misc_feature (268)..(394): Homolog of NCBI NO: 34908616 NR Description: P0677H08.8 [Oryza sativa (japonica
  misc_feature (1)..(186): Homolog of NCBI NO: 15233902 NR Description: Bnm1 like protein; protein id: At4g24640.1, by cDNA: 39461., supported by cDNA: gi_4097527 [Arabidopsis
  misc_feature (1)..(178): Homolog of NCBI NO: 15240605 NR Description: putative protein; protein id: At5g50050.1 thaliana] >gi|10177216|dbj|BAB10291.1|
  misc_feature (13)..(178): Homolog of NCBI NO: 15240606 NR Description: putative protein; protein id: At5g50060.1
MTSSSHCFLIVSVALLLQVLLSPVSALTLTSTKYINKLCQMSFVDNKPFCLQTLSAYPPAASATGLLPLASAVIRGIVLPQAKKSASFANGAAKKEPSLKTQFQTCQEAFVSIGDSLMSAFEELKRDPHIATYDVMTCTDHTTQVKNLVGKNTDVASKTLIEMTMQMEKLIPLALASTQVANQGEQEESRANEPEGIKSVIDDIYIFEDDPVVDRFNRFGTEMSAMVSALTQVVSARSQTEAEGAHSSSSSAGHKRGWLGIDSAPIPSSFARVDSSHNPIEESMSKAFPEEAREKKRRYRGVRQRPWGKWAAEIRDPHRAARVWLGTFDTAEAAARAYDEAALRFRGNKAKLNFPEDVRILPPPPPLLRSPADTVANKAEEDLINYWSYTKLLQSSGQRSFLERGQEESSNIFEHSPMEQPLPPSSSGPSSSNFPAPSLPNT

SEQ ID NO: 79061 - protein, 402 aa, Arabidopsis thaliana
  peptide (1)..(402): Ceres Seq. ID no. 12648301
  misc_feature (256)..(320): Pfam Name: AP2 domain Pfam Description: AP2 domain
  misc_feature (183)..(402): Homolog of NCBI NO: 34221731 NR Description: putative AP2 domain transcription factor
  misc_feature (183)..(402): Homolog of NCBI NO: 15240610 NR Description: putative protein; protein id: At5g50080.1 thaliana] >gi|10177219|dbj|BAB10294.1| contains similarity to AP2
  misc_feature (1)..(140): Homolog of NCBI NO: 15240609 NR Description: putative protein; protein id: At5g50070.1
  misc_feature (1)..(140): Homolog of NCBI NO: 15221951 NR Description: hypothetical protein; protein id: At1g54980.1
  misc_feature (1)..(150): Homolog of NCBI NO: 15240602 NR Description: putative protein; protein id: At5g50030.1
  misc_feature (1)..(138): Homolog of NCBI NO: 15240603 NR Description: putative protein; protein id: At5g50040.1
  misc_feature (228)..(354): Homolog of NCBI NO: 34908616 NR Description: P0677H08.8 [Oryza sativa (japonica
  misc_feature (1)..(146): Homolog of NCBI NO: 15233902 NR Description: Bnm1 like protein; protein id: At4g24640.1, by cDNA: 39461., supported by cDNA: gi_4097527 [Arabidopsis
  misc_feature (1)..(138): Homolog of NCBI NO: 15240605 NR Description: putative protein; protein id: At5g50050.1 thaliana] >gi|10177216|dbj|BAB10291.1|
  misc_feature (1)..(138): Homolog of NCBI NO: 15240606 NR Description: putative protein; protein id: At5g50060.1
MSFVDNKPFCLQTLSAYPPAASATGLLPLASAVIRGIVLPQAKKSASFANGAAKKEPSLKTQFQTCQEAFVSIGDSLMSAFEELKRDPHIATYDVMTCTDHTTQVKNLVGKNTDVASKTLIEMTMQMEKLIPLALASTQVANQGEQEESRANEPEGIKSVIDDIYIFEDDPVVDRFNRFGTEMSAMVSALTQVVSARSQTEAEGAHSSSSSAGHKRGWLGIDSAPIPSSFARVDSSHNPIEESMSKAFPEEAREKKRRYRGVRQRPWGKWAAEIRDPHRAARVWLGTFDTAEAAARAYDEAALRFRGNKAKLNFPEDVRILPPPPPLLRSPADTVANKAEEDLINYWSYTKLLQSSGQRSFLERGQEESSNIFEHSPMEQPLPPSSSGPSSSNFPAPSLPNT

SEQ ID NO: 79062 - protein, 325 aa, Arabidopsis thaliana
  peptide (1)..(325): Ceres Seq. ID no. 12648302
  misc_feature (179)..(243): Pfam Name: AP2 domain Pfam Description: AP2 domain
  misc_feature (106)..(325): Homolog of NCBI NO: 34221731 NR Description: putative AP2 domain transcription factor
  misc_feature (106)..(325): Homolog of NCBI NO: 15240610 NR Description: putative protein; protein id: At5g50080.1 thaliana] >gi|10177219|dbj|BAB10294.1| contains similarity to AP2
  misc_feature (1)..(63): Homolog of NCBI NO: 15240609 NR Description: putative protein; protein id: At5g50070.1
  misc_feature (1)..(63): Homolog of NCBI NO: 15221951 NR Description: hypothetical protein; protein id: At1g54980.1
  misc_feature (1)..(73): Homolog of NCBI NO: 15240602 NR Description: putative protein; protein id: At5g50030.1
  misc_feature (1)..(61): Homolog of NCBI NO: 15240603 NR Description: putative protein; protein id: At5g50040.1
  misc_feature (151)..(277): Homolog of NCBI NO: 34908616 NR Description: P0677H08.8 [Oryza sativa (japonica
  misc_feature (1)..(69): Homolog of NCBI NO: 15233902 NR Description: Bnm1 like protein; protein id: At4g24640.1, by cDNA: 39461., supported by cDNA: gi_4097527 [Arabidopsis
  misc_feature (1)..(61): Homolog of NCBI NO: 15240605 NR Description: putative protein; protein id: At5g50050.1 thaliana] >gi|10177216|dbj|BAB10291.1|
  misc_feature (1)..(61): Homolog of NCBI NO: 15240606 NR Description: putative protein; protein id: At5g50060.1
MSAFEELKRDPHIATYDVMTCTDHTTQVKNLVGKNTDVASKTLIEMTMQMEKLIPLALASTQVANQGEQEESRANEPEGIKSVIDDIYIFEDDPVVDRFNRFGTEMSAMVSALTQVVSARSQTEAEGAHSSSSSAGHKRGWLGIDSAPIPSSFARVDSSHNPIEESMSKAFPEEAREKKRRYRGVRQRPWGKWAAEIRDPHRAARVWLGTFDTAEAAARAYDEAALRFRGNKAKLNFPEDVRILPPPPPLLRSPADTVANKAEEDLINYWSYTKLLQSSGQRSFLERGQEESSNIFEHSPMEQPLPPSSSGPSSSNFPAPSLPNT

SEQ ID NO: 79063 - DNA, 2076 bp, Arabidopsis thaliana
  misc_feature (1)..(2076): Ceres Seq. ID no. 12648364
  misc_feature: MA Experiment ID: 20000307 Result: Up-regulated in Transcription
  misc_feature: MA Experiment 20000307 PARAMETER Experiment Name: At_Germinating_Seeds_Sub_P Parameter: Age (hr) Value: 24 vs. 0
  misc_feature: MA Experiment 20000307 PARAMETER Experiment Name: At_Germinating_Seeds_Sub_P Parameter: Organism Value: A. thaliana
  misc_feature: MA Experiment 20000307 PARAMETER Experiment Name: At_Germinating_Seeds_Sub_P Parameter: Plant Line Value: WS
  misc_feature: MA Experiment 20000307 PARAMETER Experiment Name: At_Germinating_Seeds_Sub_P Parameter: Tissue Value: Germinating Seeds
  misc_feature: MA Experiment ID: 20000314 Result: Up-regulated in Transcription
  misc_feature: MA Experiment 20000314 PARAMETER Experiment Name: At_14day_Shoots-Roots_Sub_P Parameter: Age (day) Value: 14
  misc_feature: MA Experiment 20000314 PARAMETER Experiment Name: At_14day_Shoots-Roots_Sub_P Parameter: Organism Value: A. thaliana
  misc_feature: MA Experiment 20000314 PARAMETER Experiment Name: At_14day_Shoots-Roots_Sub_P Parameter: Plant Line Value: WS
  misc_feature: MA Experiment 20000314 PARAMETER Experiment Name: At_14day_Shoots-Roots_Sub_P Parameter: Tissue Value: Roots vs. Whole Plant
  misc_feature: MA Experiment ID: 20000327 Result: Down-regulated in Transcription
  misc_feature: MA Experiment 20000327 PARAMETER Experiment Name: At_42deg_Heat_Sub_P Parameter: Age (day) Value: 14
  misc_feature: MA Experiment 20000327 PARAMETER Experiment Name: At_42deg_Heat_Sub_P Parameter: Organism Value: A. thaliana
  misc_feature: MA Experiment 20000327 PARAMETER Experiment Name: At_42deg_Heat_Sub_P Parameter: Plant Line Value: WS
  misc_feature: MA Experiment 20000327 PARAMETER Experiment Name: At_42deg_Heat_Sub_P Parameter: Temperature (deg C) Value: 42 vs. 22
  misc_feature: MA Experiment 20000327 PARAMETER Experiment Name: At_42deg_Heat_Sub_P Parameter: Timepoint (hr) Value: 1
  misc_feature: MA Experiment 20000327 PARAMETER Experiment Name: At_42deg_Heat_Sub_P Parameter: Tissue Value: Aerial
  misc_feature: MA Experiment ID: 20000328 Result: Down-regulated in Transcription
  misc_feature: MA Experiment 20000328 PARAMETER Experiment Name: At_42deg_Heat_Sub_P Parameter: Age (day) Value: 14
  misc_feature: MA Experiment 20000328 PARAMETER Experiment Name: At_42deg_Heat_Sub_P Parameter: Organism Value: A. thaliana
  misc_feature: MA Experiment 20000328 PARAMETER Experiment Name: At_42deg_Heat_Sub_P Parameter: Plant Line Value: WS
  misc_feature: MA Experiment 20000328 PARAMETER Experiment Name: At_42deg_Heat_Sub_P Parameter: Temperature (deg C) Value: 42 vs. 22
  misc_feature: MA Experiment 20000328 PARAMETER Experiment Name: At_42deg_Heat_Sub_P Parameter: Timepoint (hr) Value: 6
  misc_feature: MA Experiment 20000328 PARAMETER Experiment Name: At_42deg_Heat_Sub_P Parameter: Tissue Value: Aerial
  misc_feature: MA Experiment ID: 20000332 Result: Down-regulated in Transcription
  misc_feature: MA Experiment 20000332 PARAMETER Experiment Name: At_4deg_Cold_Sub_P Parameter: Age (day) Value: 14
  misc_feature: MA Experiment 20000332 PARAMETER Experiment Name: At_4deg_Cold_Sub_P Parameter: Organism Value: A. thaliana
  misc_feature: MA Experiment 20000332 PARAMETER Experiment Name: At_4deg_Cold_Sub_P Parameter: Plant Line Value: WS
  misc_feature: MA Experiment 20000332 PARAMETER Experiment Name: At_4deg_Cold_Sub_P Parameter: Temperature (deg C) Value: 4 vs. 22
  misc_feature: MA Experiment 20000332 PARAMETER Experiment Name: At_4deg_Cold_Sub_P Parameter: Timepoint (hr) Value: 2
  misc_feature: MA Experiment 20000332 PARAMETER Experiment Name: At_4deg_Cold_Sub_P Parameter: Tissue Value: Aerial
  misc_feature: MA Experiment ID: 20000355 Result: Up-regulated in Transcription
  misc_feature: MA Experiment 20000355 PARAMETER Experiment Name: At_Siliques_Sub_P Parameter: Age (day) Value: 21
  misc_feature: MA Experiment 20000355 PARAMETER Experiment Name: At_Siliques_Sub_P Parameter: Organism Value: A. thaliana
  misc_feature: MA Experiment 20000355 PARAMETER Experiment Name: At_Siliques_Sub_P Parameter: Plant Line Value: WS
  misc_feature: MA Experiment 20000355 PARAMETER Experiment Name: At_Siliques_Sub_P Parameter: Tissue Value: Less Than 5mm Siliques vs. Whole Plant
  misc_feature: MA Experiment ID: 20000440 Result: Up-regulated in Transcription
  misc_feature: MA Experiment 20000440 PARAMETER Experiment Name: At_Closed-Flower__Sub_P Parameter: Tissue Value: Closed Flower vs. Whole Plant
atggagattccactctcgcgttaccagagcataagattagacgagattcgagactcttcttccaatcccaaggttctcactttcccgcgaaaattctcgttacgaggaagaagatggaagaacccatttggaagactcagttgttcttctgtagttcaaggtctgaaaccaaaaccaaagctgaaaccagaaccaattagaatcgaggttaaggaatcgaaagatcagattttggatgatacccagatcagtaaatctggtgtaacgatttgtagtcagatagagaagttggttttgtgtaatagattcagagaagcttttgaattgtttgagattctggagattcgctgtagttttaaggttggtgttagtacttatgatgctttagtggaagcttgtattcgtttgaaatcgattcggtgtgttaaaagggtttatgggtttatgatgagtaatgggtttgagccggagcagtatatgatgaacagaatcttgttgatgcatgtcaagtgtgggatgattattgatgcacgtaggttgtttgatgaaatccctgagagaaatttgtattcttattactcgattatctctgggtttgttaattttgggaattatgttgaagcttttgagttgtttaagatgatgtgggaggagctttctgattgtgagactcatacgtttgcggtgatgctacgggcctcggctggcttagggtctatttatgtggggaaacagttacacgtttgtgcgttgaagttaggagttgttgataatacctttgtctcgtgtggattgattgatatgtatagcaagtgtggggatattgaagatgctcgatgtgcttttgagtgtatgcccgagaaaactactgttgcttggaacaacgttattgcgggttatgcgcttcatggttatagtgaggaagctctgtgtttgttgtatgacatgcgagactcaggtgtgtctattgatcagttcacactttcgataatgataagaatttctacaaagcttgcaaagcttgagcttactaagcaggcacacgctagtttaattcgaaacggttttgaatcggaaatcgttgcaaacacagctcttgtagacttttatagcaaatggggtagagtagatactgctagatatgtttttgataaattgccgagaaaaaatataatctcatggaacgctttgatgggtggatatgcaaatcatggtagaggaactgatgctgttaagttgtttgagaaaatgattgcagcaaacgtcgctccaaaccatgtcacatttcttgcagttctatcagcttgtgcctattcaggtttatctgagcaaggttgggagatttttctatcgatgagtgaggttcatgggatcaaaccaagggcgatgcattatgcctgcatgattgagctgttgggtagagacggtttattagatgaagccattgcgtttatccgaagagctcctttgaaaaccacggtgaacatgtgggcagcactcttgaatgcctgtaggatgcaggaaaacttagagcttggaagagtggttgctgaaaaactctatggaatgggacccgagaagctcggaaactacgttgtgatgtataatatgtacaacagtatgggaaaaactgcagaagctgcaggggttttggagacattggagagcaaaggattaagcatgatgccggcttgtacttgggttgaggttggagatcagactcacagctttctttcaggagataggcagatataccaaaaagtggatgaactaatggaagagatttccgagtatgggtactcagaggaggagcaacaccttcttccagacgtagatgaaaaggaagaagagcgagtagggcgatatcacagcgagaaactagccatagcttacggattggtgaatacgccggaatggaatccattgcagattactcagaaccataggatatgcaaaaattgccacaaggtggttgagttcatatctttggttacaggacgagagatggtagtgagagacgcgagccggttccatcattttaaagaagggaagtgttcttgtggaggttattggtga

SEQ ID NO: 79064 - protein, 691 aa, Arabidopsis thaliana
  peptide (1)..(691): Ceres Seq. ID no. 12648365
  misc_feature (190)..(224): Pfam Name: PPR repeat Pfam Description: PPR repeat
  misc_feature (22)..(691): Homolog of NCBI NO: 38636769 NR Description: putative pentatricopeptide (PPR)
  misc_feature (85)..(691): Homolog of NCBI NO: 15232837 NR Description: hypothetical protein; protein id: At3g02010.1 thaliana] >gi|6091739|gb|AAF03451.1|AC010797_27 hypothetical [Arabidopsis thaliana] >gi|6513930|gb|AAF14834.1|AC011664_16
  misc_feature (164)..(691): Homolog of NCBI NO: 34906110 NR Description: P0020E09.15 [Oryza sativa (japonica
  misc_feature (126)..(691): Homolog of NCBI NO: 15229561 NR Description: hypothetical protein; protein id: At3g24000.1 thaliana] >gi|9294669|dbj|BAB03018.1| contains similarity to
  misc_feature (126)..(690): Homolog of NCBI NO: 37534806 NR Description: putative PPR-repeat containing protein [Oryza
  misc_feature (157)..(691): Homolog of NCBI NO: 18483237 NR Description: putative vegetative storage protein [Sorghum
  misc_feature (105)..(691): Homolog of NCBI NO: 34894002 NR Description: P0672D08.11 [Oryza sativa (japonica >gi|15128441|dbj|BAB62625.1| hypothetical protein~similar to thaliana chromosome 3, F28J7.34 [Oryza sativa (japonica F28J7.34
  misc_feature (99)..(691): Homolog of NCBI NO: 15231358 NR Description: hypothetical protein; protein id: At3g13770.1
  misc_feature (94)..(691): Homolog of NCBI NO: 34915012 NR Description: P0458A05.10 [Oryza sativa (japonica
  misc_feature (125)..(691): Homolog of NCBI NO: 34897884 NR Description: Similar to Arabidopsis thaliana DNA chromosome 4,
MEIPLSRYQSIRLDEIRDSSSNPKVLTFPRKFSLRGRRWKNPFGRLSCSSVVQGLKPKPKLKPEPIRIEVKESKDQILDDTQISKSGVTICSQIEKLVLCNRFREAFELFEILEIRCSFKVGVSTYDALVEACIRLKSIRCVKRVYGFMMSNGFEPEQYMMNRILLMHVKCGMIIDARRLFDEIPERNLYSYYSIISGFVNFGNYVEAFELFKMMWEELSDCETHTFAVMLRASAGLGSIYVGKQLHVCALKLGVVDNTFVSCGLIDMYSKCGDIEDARCAFECMPEKTTVAWNNVIAGYALHGYSEEALCLLYDMRDSGVSIDQFTLSIMIRISTKLAKLELTKQAHASLIRNGFESEIVANTALVDFYSKWGRVDTARYVFDKLPRKNIISWNALMGGYANHGRGTDAVKLFEKMIAANVAPNHVTFLAVLSACAYSGLSEQGWEIFLSMSEVHGIKPRAMHYACMIELLGRDGLLDEAIAFIRRAPLKTTVNMWAALLNACRMQENLELGRVVAEKLYGMGPEKLGNYVVMYNMYNSMGKTAEAAGVLETLESKGLSMMPACTWVEVGDQTHSFLSGDRQIYQKVDELMEEISEYGYSEEEQHLLPDVDEKEEERVGRYHSEKLAIAYGLVNTPEWNPLQITQNHRICKNCHKVVEFISLVTGREMVVRDASRFHHFKEGKCSCGGYW

SEQ ID NO: 79065 - protein, 543 aa, Arabidopsis thaliana
  peptide (1)..(543): Ceres Seq. ID no. 12648366
  misc_feature (42)..(76): Pfam Name: PPR repeat Pfam Description: PPR repeat
  misc_feature (1)..(543): Homolog of NCBI NO: 38636769 NR Description: putative pentatricopeptide (PPR)
  misc_feature (1)..(543): Homolog of NCBI NO: 15232837 NR Description: hypothetical protein; protein id: At3g02010.1 thaliana] >gi|6091739|gb|AAF03451.1|AC010797_27 hypothetical [Arabidopsis thaliana] >gi|6513930|gb|AAF14834.1|AC011664_16
  misc_feature (16)..(543): Homolog of NCBI NO: 34906110 NR Description: P0020E09.15 [Oryza sativa (japonica
  misc_feature (1)..(543): Homolog of NCBI NO: 15229561 NR Description: hypothetical protein; protein id: At3g24000.1 thaliana] >gi|9294669|dbj|BAB03018.1| contains similarity to
  misc_feature (1)..(542): Homolog of NCBI NO: 37534806 NR Description: putative PPR-repeat containing protein [Oryza
  misc_feature (9)..(543): Homolog of NCBI NO: 18483237 NR Description: putative vegetative storage protein [Sorghum
  misc_feature (1)..(543): Homolog of NCBI NO: 34894002 NR Description: P0672D08.11 [Oryza sativa (japonica >gi|15128441|dbj|BAB62625.1| hypothetical protein~similar to thaliana chromosome 3, F28J7.34 [Oryza sativa (japonica F28J7.34
  misc_feature (1)..(543): Homolog of NCBI NO: 15231358 NR Description: hypothetical protein; protein id: At3g13770.1
  misc_feature (1)..(543): Homolog of NCBI NO: 34915012 NR Description: P0458A05.10 [Oryza sativa (japonica
  misc_feature (1)..(543): Homolog of NCBI NO: 34897884 NR Description: Similar to Arabidopsis thaliana DNA chromosome 4,
MMSNGFEPEQYMMNRILLMHVKCGMIIDARRLFDEIPERNLYSYYSIISGFVNFGNYVEAFELFKMMWEELSDCETHTFAVMLRASAGLGSIYVGKQLHVCALKLGVVDNTFVSCGLIDMYSKCGDIEDARCAFECMPEKTTVAWNNVIAGYALHGYSEEALCLLYDMRDSGVSIDQFTLSIMIRISTKLAKLELTKQAHASLIRNGFESEIVANTALVDFYSKWGRVDTARYVFDKLPRKNIISWNALMGGYANHGRGTDAVKLFEKMIAANVAPNHVTFLAVLSACAYSGLSEQGWEIFLSMSEVHGIKPRAMHYACMIELLGRDGLLDEAIAFIRRAPLKTTVNMWAALLNACRMQENLELGRVVAEKLYGMGPEKLGNYVVMYNMYNSMGKTAEAAGVLETLESKGLSMMPACTWVEVGDQTHSFLSGDRQIYQKVDELMEEISEYGYSEEEQHLLPDVDEKEEERVGRYHSEKLAIAYGLVNTPEWNPLQITQNHRICKNCHKVVEFISLVTGREMVVRDASRFHHFKEGKCSCGGYW

SEQ ID NO: 79066 - protein, 542 aa, Arabidopsis thaliana
  peptide (1)..(542): Ceres Seq. ID no. 12648367
  misc_feature (41)..(75): Pfam Name: PPR repeat Pfam Description: PPR repeat
  misc_feature (1)..(542): Homolog of NCBI NO: 38636769 NR Description: putative pentatricopeptide (PPR)
  misc_feature (1)..(542): Homolog of NCBI NO: 15232837 NR Description: hypothetical protein; protein id: At3g02010.1 thaliana] >gi|6091739|gb|AAF03451.1|AC010797_27 hypothetical [Arabidopsis thaliana] >gi|6513930|gb|AAF14834.1|AC011664_16
  misc_feature (15)..(542): Homolog of NCBI NO: 34906110 NR Description: P0020E09.15 [Oryza sativa (japonica
  misc_feature (1)..(542): Homolog of NCBI NO: 15229561 NR Description: hypothetical protein; protein id: At3g24000.1 thaliana] >gi|9294669|dbj|BAB03018.1| contains similarity to
  misc_feature (1)..(541): Homolog of NCBI NO: 37534806 NR Description: putative PPR-repeat containing protein [Oryza
  misc_feature (8)..(542): Homolog of NCBI NO: 18483237 NR Description: putative vegetative storage protein [Sorghum
  misc_feature (1)..(542): Homolog of NCBI NO: 34894002 NR Description: P0672D08.11 [Oryza sativa (japonica >gi|15128441|dbj|BAB62625.1| hypothetical protein~similar to thaliana chromosome 3, F28J7.34 [Oryza sativa (japonica F28J7.34
  misc_feature (1)..(542): Homolog of NCBI NO: 15231358 NR Description: hypothetical protein; protein id: At3g13770.1
  misc_feature (1)..(542): Homolog of NCBI NO: 34915012 NR Description: P0458A05.10 [Oryza sativa (japonica
  misc_feature (1)..(542): Homolog of NCBI NO: 34897884 NR Description: Similar to Arabidopsis thaliana DNA chromosome 4,
MSNGFEPEQYMMNRILLMHVKCGMIIDARRLFDEIPERNLYSYYSIISGFVNFGNYVEAFELFKMMWEELSDCETHTFAVMLRASAGLGSIYVGKQLHVCALKLGVVDNTFVSCGLIDMYSKCGDIEDARCAFECMPEKTTVAWNNVIAGYALHGYSEEALCLLYDMRDSGVSIDQFTLSIMIRISTKLAKLELTKQAHASLIRNGFESEIVANTALVDFYSKWGRVDTARYVFDKLPRKNIISWNALMGGYANHGRGTDAVKLFEKMIAANVAPNHVTFLAVLSACAYSGLSEQGWEIFLSMSEVHGIKPRAMHYACMIELLGRDGLLDEAIAFIRRAPLKTTVNMWAALLNACRMQENLELGRVVAEKLYGMGPEKLGNYVVMYNMYNSMGKTAEAAGVLETLESKGLSMMPACTWVEVGDQTHSFLSGDRQIYQKVDELMEEISEYGYSEEEQHLLPDVDEKEEERVGRYHSEKLAIAYGLVNTPEWNPLQITQNHRICKNCHKVVEFISLVTGREMVVRDASRFHHFKEGKCSCGGYW

SEQ ID NO: 79067 - DNA, 1526 bp, Arabidopsis thaliana
  misc_feature (1)..(1526): Ceres Seq. ID no. 12648398
  misc_feature: MA Experiment ID: 108434 Result: Up-regulated in Transcription
  misc_feature: MA Experiment 108434 PARAMETER Experiment Name: At_Root_Tips_cDNA_P Parameter: Tissue Value: Root Tips
  misc_feature: MA Experiment ID: 108464 Result: Down-regulated in Transcription
  misc_feature: MA Experiment 108464 PARAMETER Experiment Name: At_Germinating_Seeds_cDNA_P Parameter: Age (day) Value: 4 vs. 0
  misc_feature: MA Experiment 108464 PARAMETER Experiment Name: At_Germinating_Seeds_cDNA_P Parameter: Tissue Value: Germinating Seeds
  misc_feature: MA Experiment ID: 20000171 Result: Up-regulated in Transcription
  misc_feature: MA Experiment 20000171 PARAMETER Experiment Name: At_42deg_Heat_P Parameter: Age (day) Value: 14
  misc_feature: MA Experiment 20000171 PARAMETER Experiment Name: At_42deg_Heat_P Parameter: Organism Value: A. thaliana
  misc_feature: MA Experiment 20000171 PARAMETER Experiment Name: At_42deg_Heat_P Parameter: Plant Line Value: WS
  misc_feature: MA Experiment 20000171 PARAMETER Experiment Name: At_42deg_Heat_P Parameter: Temperature (deg C) Value: 42 vs. 22
  misc_feature: MA Experiment 20000171 PARAMETER Experiment Name: At_42deg_Heat_P Parameter: Timepoint (hr) Value: 1
  misc_feature: MA Experiment 20000171 PARAMETER Experiment Name: At_42deg_Heat_P Parameter: Tissue Value: Aerial
  misc_feature: MA Experiment ID: 20000224 Result: Down-regulated in Transcription
  misc_feature: MA Experiment ID: 20000264 Result: Down-regulated in Transcription
  misc_feature: MA Experiment 20000264 PARAMETER Experiment Name: At_Open_Flower_P Parameter: Age (day) Value: 21
  misc_feature: MA Experiment 20000264 PARAMETER Experiment Name: At_Open_Flower_P Parameter: Plant Line Value: WS
  misc_feature: MA Experiment 20000264 PARAMETER Experiment Name: At_Open_Flower_P Parameter: Tissue Value: Open Flower vs. Whole Plant
  misc_feature: MA Experiment ID: 20000451 Result: Up-regulated in Transcription
  misc_feature: MA Experiment 20000451 PARAMETER Experiment Name: At_CS6879_Shoots-Roots_P Parameter: Age (day) Value: 14
  misc_feature: MA Experiment 20000451 PARAMETER Experiment Name: At_CS6879_Shoots-Roots_P Parameter: Organism Value: A. thaliana
  misc_feature: MA Experiment 20000451 PARAMETER Experiment Name: At_CS6879_Shoots-Roots_P Parameter: Plant Line Value: CS6879 vs. WS
  misc_feature: MA Experiment 20000451 PARAMETER Experiment Name: At_CS6879_Shoots-Roots_P Parameter: Tissue Value: Roots
  misc_feature: MA Experiment ID: 20000794 Result: Down-regulated in Transcription
  misc_feature: MA Experiment 20000794 PARAMETER Experiment Name: At_Petals_P Parameter: Age (day) Value: 23-25 days
  misc_feature: MA Experiment 20000794 PARAMETER Experiment Name: At_Petals_P Parameter: Plant Line Value: WS
  misc_feature: MA Experiment 20000794 PARAMETER Experiment Name: At_Petals_P Parameter: Tissue Value: Petals vs. Whole plant
atgaaacttcaagggaagtatgaatacacagtaactggtatgtacgatgtgaatgacaaagataatagtattcgcatcaccgagttgactacaaaaatgacggcccatctccgttgtcgtcttcaaggtcacgcttacagacttggctccgccgctccggcattgagctccgtcgagagaatggcgagtaatcaacaaccaccgtcgaatctacagacctacggtgtaccaatttacgccgtcgactggattctagaggaagctgtcagatccaaaatcactaaggatcaggatgatgatgatgatgatggatcgtcgtcgtcgtcgtacatcgttttatccggcggaggaggagaaggacgaagtggaatacctaatgtcatcttaatctgtcgtgttgatctccacaccaattctctctctgaacaacctattggtaggcgtgtgattggcactgatctaccttatcgtatggctattcatcctcgtcaaggtggtcttatttgtgcattgcctaacagttgcagactgtttgattgggaaaacattatagaggatgataatgaggaagagtcagagaaagttgttaaagagttaaaagatgttggacaacagttgtctctctcgtttaatcaggatgggactgttctagctactggtgcagaggatgggactttgagggtttttgaatggccaagcatgaagactttacttaatgagtctaagacacatgcatcagttaaaagcctaactttcagcgaaagtggtaagtttcttgtatctcttggagctccactttgtcgggtttgggatgtgaatgcttctgctgctattgccagtctatcaaaagagaaggacgagatgtttgcctcgtgtagattctctgtagacaattcaggcagtgaagttctttatgttgctgcaaacactcaacgtggtgggagtattataacatgggatacaacatcatggagaagaagaagttcaaagcttattaaaagaaacaactctatatctgcctttaatgtctcagctgatgggaagcttcttgcagtaggaaccctcgaaggagatgttttaataattgattcgacaaagatgcaaactaaccaaatcgtcaagaaagctcatctcggtttggtcaccgcactgactttctcccctgattcaaggtgcttagtgtcagtatcttttgactcaagggcaaggctaaccgtgatcaaacaaaagggtgaaaaacgtcgagtatatctgtgggtggcggcattgttgtttgtgttggtatacgtggttttgtattatttgatggtggcaatggggatcatacattagacatacgtaaagaaagcctctaagtaaatccacacgacaatacatggaatggcttgaagaaaccaacatacagatttataccctcgttaagttttcttagactttgtgttttgagtaggtcgtagagattcttcacagaaactttcatgcttttattagtttacatcatatattcatattctcgtttctatctt

SEQ ID NO: 79068 - protein, 443 aa, Arabidopsis thaliana
  peptide (1)..(443): Ceres Seq. ID no. 12648399
  misc_feature (61)..(443): Homolog of NCBI NO: 18423177 NR Description: St12p protein; protein id: At5g50550.1 thaliana] >gi|22327692|ref|NP_680414.1| St12p protein; protein At5g50650.1 [Arabidopsis thaliana] >gi|9758764|dbj|BAB09140.1|
  misc_feature (61)..(419): Homolog of NCBI NO: 8777388 NR Description: protein transport protein SEC12p-like
  misc_feature (63)..(442): Homolog of NCBI NO: 11358859 NR Description: St12p protein [imported] - Arabidopsis thaliana
  misc_feature (63)..(442): Homolog of NCBI NO: 15226281 NR Description: putative protein transport protein SEC12p; id: At2g01470.1, supported by cDNA: gi_166877, supported by cDNA: [Arabidopsis thaliana] >gi|25410908|pir||B84425 probable protein
  misc_feature (63)..(413): Homolog of NCBI NO: 322598 NR Description: St12p protein - Arabidopsis thaliana
  misc_feature (63)..(321): Homolog of NCBI NO: 17473926 NR Description: putative protein transport protein SEC12p
  misc_feature (120)..(435): Homolog of NCBI NO: 34394605 NR Description: transducin / WD-40 repeat protein-like [Oryza
  misc_feature (132)..(433): Homolog of NCBI NO: 34897162 NR Description: putative membrane protein [Oryza sativa (japonica group)] >gi|28209528|gb|AAO37546.1| putative membrane protein
  misc_feature (125)..(427): Homolog of NCBI NO: 18409509 NR Description: expressed protein; protein id: At3g52190.1, by cDNA: 124263. [Arabidopsis thaliana] >gi|11357774|pir||T49098
  misc_feature (208)..(427): Homolog of NCBI NO: 26450470 NR Description: unknown protein [Arabidopsis thaliana]
MKLQGKYEYTVTGMYDVNDKDNSIRITELTTKMTAHLRCRLQGHAYRLGSAAPALSSVERMASNQQPPSNLQTYGVPIYAVDWILEEAVRSKITKDQDDDDDDGSSSSSYIVLSGGGGEGRSGIPNVILICRVDLHTNSLSEQPIGRRVIGTDLPYRMAIHPRQGGLICALPNSCRLFDWENIIEDDNEEESEKVVKELKDVGQQLSLSFNQDGTVLATGAEDGTLRVFEWPSMKTLLNESKTHASVKSLTFSESGKFLVSLGAPLCRVWDVNASAAIASLSKEKDEMFASCRFSVDNSGSEVLYVAANTQRGGSIITWDTTSWRRRSSKLIKRNNSISAFNVSADGKLLAVGTLEGDVLIIDSTKMQTNQIVKKAHLGLVTALTFSPDSRCLVSVSFDSRARLTVIKQKGEKRRVYLWVAALLFVLVYVVLYYLMVAMGIIH

SEQ ID NO: 79069 - protein, 430 aa, Arabidopsis thaliana
  peptide (1)..(430): Ceres Seq. ID no. 12648400
  misc_feature (48)..(430): Homolog of NCBI NO: 18423177 NR Description: St12p protein; protein id: At5g50550.1 thaliana] >gi|22327692|ref|NP_680414.1| St12p protein; protein At5g50650.1 [Arabidopsis thaliana] >gi|9758764|dbj|BAB09140.1|
  misc_feature (48)..(406): Homolog of NCBI NO: 8777388 NR Description: protein transport protein SEC12p-like
  misc_feature (50)..(429): Homolog of NCBI NO: 11358859 NR Description: St12p protein [imported] - Arabidopsis thaliana
  misc_feature (50)..(429): Homolog of NCBI NO: 15226281 NR Description: putative protein transport protein SEC12p; id: At2g01470.1, supported by cDNA: gi_166877, supported by cDNA: [Arabidopsis thaliana] >gi|25410908|pir||B84425 probable protein
  misc_feature (50)..(400): Homolog of NCBI NO: 322598 NR Description: St12p protein - Arabidopsis thaliana
  misc_feature (50)..(308): Homolog of NCBI NO: 17473926 NR Description: putative protein transport protein SEC12p
  misc_feature (107)..(422): Homolog of NCBI NO: 34394605 NR Description: transducin / WD-40 repeat protein-like [Oryza
  misc_feature (119)..(420): Homolog of NCBI NO: 34897162 NR Description: putative membrane protein [Oryza sativa (japonica group)] >gi|28209528|gb|AAO37546.1| putative membrane protein
  misc_feature (112)..(414): Homolog of NCBI NO: 18409509 NR Description: expressed protein; protein id: At3g52190.1, by cDNA: 124263. [Arabidopsis thaliana] >gi|11357774|pir||T49098
  misc_feature (195)..(414): Homolog of NCBI NO: 26450470 NR Description: unknown protein [Arabidopsis thaliana]
MYDVNDKDNSIRITELTTKMTAHLRCRLQGHAYRLGSAAPALSSVERMASNQQPPSNLQTYGVPIYAVDWILEEAVRSKITKDQDDDDDDGSSSSSYIVLSGGGGEGRSGIPNVILICRVDLHTNSLSEQPIGRRVIGTDLPYRMAIHPRQGGLICALPNSCRLFDWENIIEDDNEEESEKVVKELKDVGQQLSLSFNQDGTVLATGAEDGTLRVFEWPSMKTLLNESKTHASVKSLTFSESGKFLVSLGAPLCRVWDVNASAAIASLSKEKDEMFASCRFSVDNSGSEVLYVAANTQRGGSIITWDTTSWRRRSSKLIKRNNSISAFNVSADGKLLAVGTLEGDVLIIDSTKMQTNQIVKKAHLGLVTALTFSPDSRCLVSVSFDSRARLTVIKQKGEKRRVYLWVAALLFVLVYVVLYYLMVAMGIIH

SEQ ID NO: 79070 - protein, 411 aa, Arabidopsis thaliana
  peptide (1)..(411): Ceres Seq. ID no. 12648401
  misc_feature (29)..(411): Homolog of NCBI NO: 18423177 NR Description: St12p protein; protein id: At5g50550.1 thaliana] >gi|22327692|ref|NP_680414.1| St12p protein; protein At5g50650.1 [Arabidopsis thaliana] >gi|9758764|dbj|BAB09140.1|
  misc_feature (29)..(387): Homolog of NCBI NO: 8777388 NR Description: protein transport protein SEC12p-like
  misc_feature (31)..(410): Homolog of NCBI NO: 11358859 NR Description: St12p protein [imported] - Arabidopsis thaliana
  misc_feature (31)..(410): Homolog of NCBI NO: 15226281 NR Description: putative protein transport protein SEC12p; id: At2g01470.1, supported by cDNA: gi_166877, supported by cDNA: [Arabidopsis thaliana] >gi|25410908|pir||B84425 probable protein
  misc_feature (31)..(381): Homolog of NCBI NO: 322598 NR Description: St12p protein - Arabidopsis thaliana
  misc_feature (31)..(289): Homolog of NCBI NO: 17473926 NR Description: putative protein transport protein SEC12p
  misc_feature (88)..(403): Homolog of NCBI NO: 34394605 NR Description: transducin / WD-40 repeat protein-like [Oryza
  misc_feature (100)..(401): Homolog of NCBI NO: 34897162 NR Description: putative membrane protein [Oryza sativa (japonica group)] >gi|28209528|gb|AAO37546.1| putative membrane protein
  misc_feature (93)..(395): Homolog of NCBI NO: 18409509 NR Description: expressed protein; protein id: At3g52190.1, by cDNA: 124263. [Arabidopsis thaliana] >gi|11357774|pir||T49098
  misc_feature (176)..(395): Homolog of NCBI NO: 26450470 NR Description: unknown protein [Arabidopsis thaliana]
MTAHLRCRLQGHAYRLGSAAPALSSVERMASNQQPPSNLQTYGVPIYAVDWILEEAVRSKITKDQDDDDDDGSSSSSYIVLSGGGGEGRSGIPNVILICRVDLHTNSLSEQPIGRRVIGTDLPYRMAIHPRQGGLICALPNSCRLFDWENIIEDDNEEESEKVVKELKDVGQQLSLSFNQDGTVLATGAEDGTLRVFEWPSMKTLLNESKTHASVKSLTFSESGKFLVSLGAPLCRVWDVNASAAIASLSKEKDEMFASCRFSVDNSGSEVLYVAANTQRGGSIITWDTTSWRRRSSKLIKRNNSISAFNVSADGKLLAVGTLEGDVLIIDSTKMQTNQIVKKAHLGLVTALTFSPDSRCLVSVSFDSRARLTVIKQKGEKRRVYLWVAALLFVLVYVVLYYLMVAMGIIH

SEQ ID NO: 79071 - DNA, 1150 bp, Arabidopsis thaliana
  misc_feature (1)..(1150): Ceres Seq. ID no. 12648687
  misc_feature: MA Experiment ID: 108569 Result: Down-regulated in Transcription
  misc_feature: MA Experiment 108569 PARAMETER Experiment Name: At_0.001%_MeJA__cDNA_P Parameter: Timepoint (hr) Value: 6
  misc_feature: MA Experiment 108569 PARAMETER Experiment Name: At_0.001%_MeJA__cDNA_P Parameter: Tissue Value: Aerial
  misc_feature: MA Experiment 108569 PARAMETER Experiment Name: At_0.001%_MeJA__cDNA_P Parameter: Treatment Value: 0.001% MeJA vs. No Treatment
  misc_feature: MA Experiment ID: 108605 Result: Up-regulated in Transcription
  misc_feature: MA Experiment 108605 PARAMETER Experiment Name: At_100uM_ABA_cDNA_P Parameter: Timepoint (hr) Value: 6
  misc_feature: MA Experiment 108605 PARAMETER Experiment Name: At_100uM_ABA_cDNA_P Parameter: Tissue Value: Aerial
  misc_feature: MA Experiment 108605 PARAMETER Experiment Name: At_100uM_ABA_cDNA_P Parameter: Treatment Value: 100uM ABA vs. No Treatment
  misc_feature: MA Experiment ID: 108609 Result: Up-regulated in Transcription
  misc_feature: MA Experiment 108609 PARAMETER Experiment Name: At_100uM_ABA_cDNA_P Parameter: Timepoint (hr) Value: 24
  misc_feature: MA Experiment 108609 PARAMETER Experiment Name: At_100uM_ABA_cDNA_P Parameter: Tissue Value: Aerial
  misc_feature: MA Experiment 108609 PARAMETER Experiment Name: At_100uM_ABA_cDNA_P Parameter: Treatment Value: 100uM ABA vs. No Treatment
  misc_feature: MA Experiment ID: 20000185 Result: Down-regulated in Transcription
  misc_feature: MA Experiment 20000185 PARAMETER Experiment Name: At_Roots__P Parameter: Age (day) Value: 7 vs. 21
  misc_feature: MA Experiment 20000185 PARAMETER Experiment Name: At_Roots__P Parameter: Organism Value: A. thaliana
  misc_feature: MA Experiment 20000185 PARAMETER Experiment Name: At_Roots__P Parameter: Tissue Value: Roots vs. Whole Plant
  misc_feature: MA Experiment ID: 20000234 Result: Down-regulated in Transcription
  misc_feature: MA Experiment 20000234 PARAMETER Experiment Name: At_Siliques_P Parameter: Age (day) Value: 21
  misc_feature: MA Experiment 20000234 PARAMETER Experiment Name: At_Siliques_P Parameter: Organism Value: A. thaliana
  misc_feature: MA Experiment 20000234 PARAMETER Experiment Name: At_Siliques_P Parameter: Plant Line Value: WS
  misc_feature: MA Experiment 20000234 PARAMETER Experiment Name: At_Siliques_P Parameter: Tissue Value: Less Than 5mm Siliques vs. Whole Plant
  misc_feature: MA Experiment ID: 20000265 Result: Down-regulated in Transcription
  misc_feature: MA Experiment 20000265 PARAMETER Experiment Name: At_Open_Flower_P Parameter: Age (day) Value: 21
  misc_feature: MA Experiment 20000265 PARAMETER Experiment Name: At_Open_Flower_P Parameter: Plant Line Value: WS
  misc_feature: MA Experiment 20000265 PARAMETER Experiment Name: At_Open_Flower_P Parameter: Tissue Value: Closed Flower vs. Whole Plant
  misc_feature: MA Experiment ID: 20000456 Result: Up-regulated in Transcription
  misc_feature: MA Experiment 20000456 PARAMETER Experiment Name: At_100uM_BA_P Parameter: Age (day) Value: 14
  misc_feature: MA Experiment 20000456 PARAMETER Experiment Name: At_100uM_BA_P Parameter: Organism Value: A. thaliana
  misc_feature: MA Experiment 20000456 PARAMETER Experiment Name: At_100uM_BA_P Parameter: Plant Line Value: WS
  misc_feature: MA Experiment 20000456 PARAMETER Experiment Name: At_100uM_BA_P Parameter: Timepoint (hr) Value: 6
  misc_feature: MA Experiment 20000456 PARAMETER Experiment Name: At_100uM_BA_P Parameter: Tissue Value: Aerial
  misc_feature: MA Experiment 20000456 PARAMETER Experiment Name: At_100uM_BA_P Parameter: Treatment Value: 100uM BA vs. No Treatment
  misc_feature: MA Experiment ID: 20000709 Result: Down-regulated in Transcription
  misc_feature: MA Experiment 20000709 PARAMETER Experiment Name: At_15mM_NH4NO3_L-to-H_P Parameter: Age (hr) Value: 14
  misc_feature: MA Experiment 20000709 PARAMETER Experiment Name: At_15mM_NH4NO3_L-to-H_P Parameter: Organism Value: A. thaliana
  misc_feature: MA Experiment 20000709 PARAMETER Experiment Name: At_15mM_NH4NO3_L-to-H_P Parameter: Plant Line Value: WS
  misc_feature: MA Experiment 20000709 PARAMETER Experiment Name: At_15mM_NH4NO3_L-to-H_P Parameter: Timepoint (hr) Value: 4
  misc_feature: MA Experiment 20000709 PARAMETER Experiment Name: At_15mM_NH4NO3_L-to-H_P Parameter: Tissue Value: Aerial
  misc_feature: MA Experiment 20000709 PARAMETER Experiment Name: At_15mM_NH4NO3_L-to-H_P Parameter: Treatment Value: 15mM NH4NO3 vs. 30mM Mannitol
atgcaaaaataaacatagtaacaatactttaaactatttacaccactttaatcttattctccactctttgaacgtaatggagaagaaccatagtagtggagagtgggagaagatgaagaacgagatcaacgagctaatgatagaaggaagagactatgcacaccagtttggatcagcttcatctcaagaaacacgtgaacatttagccaaaaagattcttcaatcttaccacaagtctctcaccatcatgaactactccggcgaacttgaccaagtttctcagggtggaggaagccccaagagcgatgattccgatcaagaaccacttgtcatcaagagttcgaagaagtcaatgccaaggtggagttcaaaagtcagaattgcccctggagctggtgttgatagaacgctggacgatggattcagttggagaaagtacggccagaaggatattctcggagccaaatttccaagaggatactatagatgcacgtatagaaagtctcaaggatgtgaagccactaaacaagtccaaagatctgatgaaaatcagatgctccttgagatcagttaccgaggaatacattcttgctctcaagctgcaaatgtcggtacaacaatgccgatacaaaacctcgaaccgaaccagacccaagaacacggaaatcttgacatggtaaaggaaagtgtagacaactacaatcaccaagcacatttgcatcacaaccttcactatccattgtcatctaccccaaatctagagaataacaatgcctatatgcttcaaatgcgagatcaaaacatcgaatattttggatctacgagcttctctagtgatctaggaactagtatcaactacaattttccagcatctggctcggcttctcactcagcatcaaactctccgtccaccgtccctttggaatccccgtttgaaagctatgatccaaatcatccatatggaggatttggtgggttctattcttagttatctacttaagggagggacggaactttttacatgacctcttgattaaagagagagttttcataatagctaatcaatttcctattcaaatatccgagttttttttctaatcatgtttatcaattgtcttattacagaaggcttattttcaggtctatgttg

SEQ ID NO: 79072 - protein, 328 aa, Arabidopsis thaliana; identical to SEQ ID NO: 27437
  peptide (1)..(328): Ceres Seq. ID no. 12648688
  misc_feature (137)..(199): Pfam Name: WRKY DNA -binding domain Pfam Description: WRKY DNA -binding domain
  misc_feature (26)..(328): Homolog of NCBI NO: 18420751 NR Description: WRKY family transcription factor; protein id: supported by cDNA: 6469., supported by cDNA: gi_15384218 thaliana] >gi|10178159|dbj|BAB11571.1| gene_id:MLE8.3~unknown
  misc_feature (75)..(216): Homolog of NCBI NO: 15236622 NR Description: WRKY family transcription factor; protein id: supported by cDNA: gi_13507100, supported by cDNA: gi_13877710 thaliana] >gi|7486745|pir||T05613 hypothetical protein putative
  misc_feature (98)..(201): Homolog of NCBI NO: 40253471 NR Description: putative transcription factor WRKY5 [Oryza sativa
  misc_feature (115)..(326): Homolog of NCBI NO: 34898262 NR Description: WRKY family transcription factor-like protein
  misc_feature (97)..(199): Homolog of NCBI NO: 15237039 NR Description: WRKY family transcription factor; protein id: supported by cDNA: gi_17064163 [Arabidopsis thaliana]
  misc_feature (97)..(199): Homolog of NCBI NO: 30681651 NR Description: WRKY family transcription factor [Arabidopsis >gi|24762209|gb|AAN64171.1| putative WRKY family transcription
  misc_feature (115)..(198): Homolog of NCBI NO: 34911952 NR Description: P0694A04.6 [Oryza sativa (japonica
  misc_feature (26)..(231): Homolog of NCBI NO: 11358951 NR Description: DNA-binding protein 4 [imported] - common tobacco
  misc_feature (42)..(314): Homolog of NCBI NO: 15225975 NR Description: WRKY family transcription factor; protein id: supported by cDNA: gi_15430276, supported by cDNA: gi_19423941
  misc_feature (39)..(198): Homolog of NCBI NO: 7406995 NR Description: DNA-binding protein 3 [Nicotiana tabacum]

SEQ ID NO: 79073 - protein, 303 aa, Arabidopsis thaliana; identical to SEQ ID NO: 27438
  peptide (1)..(303): Ceres Seq. ID no. 12648689
  misc_feature (112)..(174): Pfam Name: WRKY DNA -binding domain Pfam Description: WRKY DNA -binding domain
  misc_feature (1)..(303): Homolog of NCBI NO: 18420751 NR Description: WRKY family transcription factor; protein id: supported by cDNA: 6469., supported by cDNA: gi_15384218 thaliana] >gi|10178159|dbj|BAB11571.1| gene_id:MLE8.3~unknown
  misc_feature (50)..(191): Homolog of NCBI NO: 15236622 NR Description: WRKY family transcription factor; protein id: supported by cDNA: gi_13507100, supported by cDNA: gi_13877710 thaliana] >gi|7486745|pir||T05613 hypothetical protein putative
  misc_feature (73)..(176): Homolog of NCBI NO: 40253471 NR Description: putative transcription factor WRKY5 [Oryza sativa
  misc_feature (90)..(301): Homolog of NCBI NO: 34898262 NR Description: WRKY family transcription factor-like protein
  misc_feature (72)..(174): Homolog of NCBI NO: 15237039 NR Description: WRKY family transcription factor; protein id: supported by cDNA: gi_17064163 [Arabidopsis thaliana]
  misc_feature (72)..(174): Homolog of NCBI NO: 30681651 NR Description: WRKY family transcription factor [Arabidopsis >gi|24762209|gb|AAN64171.1| putative WRKY family transcription
  misc_feature (90)..(173): Homolog of NCBI NO: 34911952 NR Description: P0694A04.6 [Oryza sativa (japonica
  misc_feature (1)..(206): Homolog of NCBI NO: 11358951 NR Description: DNA-binding protein 4 [imported] - common tobacco
  misc_feature (17)..(289): Homolog of NCBI NO: 15225975 NR Description: WRKY family transcription factor; protein id: supported by cDNA: gi_15430276, supported by cDNA: gi_19423941
  misc_feature (14)..(173): Homolog of NCBI NO: 7406995 NR Description: DNA-binding protein 3 [Nicotiana tabacum]

SEQ ID NO: 79074 - protein, 291 aa, Arabidopsis thaliana; identical to SEQ ID NO: 27439
  peptide (1)..(291): Ceres Seq. ID no. 12648690
  misc_feature (100)..(162): Pfam Name: WRKY DNA -binding domain Pfam Description: WRKY DNA -binding domain
  misc_feature (1)..(291): Homolog of NCBI NO: 18420751 NR Description: WRKY family transcription factor; protein id: supported by cDNA: 6469., supported by cDNA: gi_15384218 thaliana] >gi|10178159|dbj|BAB11571.1| gene_id:MLE8.3~unknown
  misc_feature (38)..(179): Homolog of NCBI NO: 15236622 NR Description: WRKY family transcription factor; protein id: supported by cDNA: gi_13507100, supported by cDNA: gi_13877710 thaliana] >gi|7486745|pir||T05613 hypothetical protein putative
  misc_feature (61)..(164): Homolog of NCBI NO: 40253471 NR Description: putative transcription factor WRKY5 [Oryza sativa
  misc_feature (78)..(289): Homolog of NCBI NO: 34898262 NR Description: WRKY family transcription factor-like protein
  misc_feature (60)..(162): Homolog of NCBI NO: 15237039 NR Description: WRKY family transcription factor; protein id: supported by cDNA: gi_17064163 [Arabidopsis thaliana]
  misc_feature (60)..(162): Homolog of NCBI NO: 30681651 NR Description: WRKY family transcription factor [Arabidopsis >gi|24762209|gb|AAN64171.1| putative WRKY family transcription
  misc_feature (78)..(161): Homolog of NCBI NO: 34911952 NR Description: P0694A04.6 [Oryza sativa (japonica
  misc_feature (1)..(194): Homolog of NCBI NO: 11358951 NR Description: DNA-binding protein 4 [imported] - common tobacco
  misc_feature (5)..(277): Homolog of NCBI NO: 15225975 NR Description: WRKY family transcription factor; protein id: supported by cDNA: gi_15430276, supported by cDNA: gi_19423941
  misc_feature (2)..(161): Homolog of NCBI NO: 7406995 NR Description: DNA-binding protein 3 [Nicotiana tabacum]

SEQ ID NO: 79075 - DNA, 1461 bp, Arabidopsis thaliana
  misc_feature (1)..(1461): Ceres Seq. ID no. 12648732
  misc_feature: MA Experiment ID: 20000307 Result: Up-regulated in Transcription
  misc_feature: MA Experiment 20000307 PARAMETER Experiment Name: At_Germinating_Seeds_Sub_P Parameter: Age (hr) Value: 24 vs. 0
  misc_feature: MA Experiment 20000307 PARAMETER Experiment Name: At_Germinating_Seeds_Sub_P Parameter: Organism Value: A. thaliana
  misc_feature: MA Experiment 20000307 PARAMETER Experiment Name: At_Germinating_Seeds_Sub_P Parameter: Plant Line Value: WS
  misc_feature: MA Experiment 20000307 PARAMETER Experiment Name: At_Germinating_Seeds_Sub_P Parameter: Tissue Value: Germinating Seeds
  misc_feature: MA Experiment ID: 20000315 Result: Down-regulated in Transcription
  misc_feature: MA Experiment 20000315 PARAMETER Experiment Name: At_14day_Shoots-Roots_Sub_P Parameter: Age (day) Value: 14
  misc_feature: MA Experiment 20000315 PARAMETER Experiment Name: At_14day_Shoots-Roots_Sub_P Parameter: Organism Value: A. thaliana
  misc_feature: MA Experiment 20000315 PARAMETER Experiment Name: At_14day_Shoots-Roots_Sub_P Parameter: Plant Line Value: WS
  misc_feature: MA Experiment 20000315 PARAMETER Experiment Name: At_14day_Shoots-Roots_Sub_P Parameter: Tissue Value: Shoots vs. Whole Plant
  misc_feature: MA Experiment ID: 20000327 Result: Up-regulated in Transcription
  misc_feature: MA Experiment 20000327 PARAMETER Experiment Name: At_42deg_Heat_Sub_P Parameter: Age (day) Value: 14
  misc_feature: MA Experiment 20000327 PARAMETER Experiment Name: At_42deg_Heat_Sub_P Parameter: Organism Value: A. thaliana
  misc_feature: MA Experiment 20000327 PARAMETER Experiment Name: At_42deg_Heat_Sub_P Parameter: Plant Line Value: WS
  misc_feature: MA Experiment 20000327 PARAMETER Experiment Name: At_42deg_Heat_Sub_P Parameter: Temperature (deg C) Value: 42 vs. 22
  misc_feature: MA Experiment 20000327 PARAMETER Experiment Name: At_42deg_Heat_Sub_P Parameter: Timepoint (hr) Value: 1
  misc_feature: MA Experiment 20000327 PARAMETER Experiment Name: At_42deg_Heat_Sub_P Parameter: Tissue Value: Aerial
  misc_feature: MA Experiment ID: 20000355 Result: Up-regulated in Transcription
  misc_feature: MA Experiment 20000355 PARAMETER Experiment Name: At_Siliques_Sub_P Parameter: Age (day) Value: 21
  misc_feature: MA Experiment 20000355 PARAMETER Experiment Name: At_Siliques_Sub_P Parameter: Organism Value: A. thaliana
  misc_feature: MA Experiment 20000355 PARAMETER Experiment Name: At_Siliques_Sub_P Parameter: Plant Line Value: WS
  misc_feature: MA Experiment 20000355 PARAMETER Experiment Name: At_Siliques_Sub_P Parameter: Tissue Value: Less Than 5mm Siliques vs. Whole Plant
atgaaagctctacgaagaatacaaacgaagtctacgtttccaaatccttcttctccgtcatctccgtggactcatttgcgttctgctttcgtccttgttacttcttcttctccagcttcttgttcttcttcttctgatccgcatcggcttaaatcgccctggtcccggagaaaagggaaaaaaccactcacacttcgccggtggagaagatgtttcacccctgagggtagaattcggaatgggggagttgatttgttgaagaaagttcggactagaggcattgatcctagcattcggtctgaggtgtggccatttcttcttggagtgtgtgatttcaatagttccgaagaagagagaggtgctacaagaacttggagaagaaaagtgtatgagagactacgcaggcagtgcaaaagcgtccacgagtctcttatcagcgataaagacaacacggaagatattggctacatgagtgatgtctcatgtacgcttgacagagactataatggttcaagacacctgaactctgagtcgtcagactcagattcatctgatgagaatgattatgttcaggtcgctccttcttgtgaagggaaagatgaaaacagtacttctccatccagcatatatatttctcgtaccaaagaggattttgtgacctggcagcgtattatccgtctagacgctctccgtgcagatacagaatggactccatattctcaatcccaagctttggtttcagagaatagggcacgtcgtgctgctgaagcagttggtctaaaggattacagttatttggaaccttcgaaaatctttcacgctgcacggcttgttgctgttcttgaagcctatgccttacatgaccctgaaattggctactgccaaggaatgagtgatcttctctcccctatactctcagtcatacctgatgactacgaggcattttggtgtttcgttgggttcatgaagaaagctcgtcagaatttcagagtcgatgaggttgggatcacaaggcaactgaacatagtctcaaagattatcaaatccaaagactcacaactctacaagcatcttgagaaagtcaaggctgaagactgtttctttgtttacagaatggttcttgttatgtttagaagagagctgactctggagcaaacattgcatctctgggaagtgatttgggcagaccaagctgcaataagagctgggatggggaaatcttcctggagcagacgaataaagcagcgggctcctcccacggaggatttgttgctgtacgtggtagctgcttctgtgttgcaaaggaggaaagtcataatagagaagtacagtagcatggaggagattctccgagagtgccacaatatggtagggaaactagacgtgtggaagctcttagacgatgcacacgaccttattgttaccctccacgccaagatcgaacattctatcccacaataa

SEQ ID NO: 79076 - protein, 486 aa, Arabidopsis thaliana
  peptide (1)..(486): Ceres Seq. ID no. 12648733
  misc_feature (139)..(483): Homolog of NCBI NO: 15229125 NR Description: GTPase activating -like protein; protein id:
  misc_feature (1)..(182): Homolog of NCBI NO: 15229125 NR Description: GTPase activating -like protein; protein id:
  misc_feature (139)..(486): Homolog of NCBI NO: 15238518 NR Description: GTPase activator-like protein of Rab-like small protein id: At5g24390.1 [Arabidopsis thaliana]
  misc_feature (189)..(481): Homolog of NCBI NO: 37536102 NR Description: putative GTPase activating protein [Oryza sativa
  misc_feature (50)..(190): Homolog of NCBI NO: 37536102 NR Description: putative GTPase activating protein [Oryza sativa
  misc_feature (146)..(481): Homolog of NCBI NO: 9759196 NR Description: GTPase activator protein of Rab-like small
  misc_feature (146)..(481): Homolog of NCBI NO: 15238777 NR Description: GTPase activator protein of Rab-like small protein; protein id: At5g53570.1, supported by cDNA: gi_14517421, by cDNA: gi_20908079 [Arabidopsis thaliana]
  misc_feature (109)..(480): Homolog of NCBI NO: 15238237 NR Description: GTPase activator protein of Rab-like small
  misc_feature (1)..(203): Homolog of NCBI NO: 15238518 NR Description: GTPase activator-like protein of Rab-like small protein id: At5g24390.1 [Arabidopsis thaliana]
  misc_feature (1)..(201): Homolog of NCBI NO: 9759196 NR Description: GTPase activator protein of Rab-like small
MKALRRIQTKSTFPNPSSPSSPWTHLRSAFVLVTSSSPASCSSSSDPHRLKSPWSRRKGKKPLTLRRWRRCFTPEGRIRNGGVDLLKKVRTRGIDPSIRSEVWPFLLGVCDFNSSEEERGATRTWRRKVYERLRRQCKSVHESLISDKDNTEDIGYMSDVSCTLDRDYNGSRHLNSESSDSDSSDENDYVQVAPSCEGKDENSTSPSSIYISRTKEDFVTWQRIIRLDALRADTEWTPYSQSQALVSENRARRAAEAVGLKDYSYLEPSKIFHAARLVAVLEAYALHDPEIGYCQGMSDLLSPILSVIPDDYEAFWCFVGFMKKARQNFRVDEVGITRQLNIVSKIIKSKDSQLYKHLEKVKAEDCFFVYRMVLVMFRRELTLEQTLHLWEVIWADQAAIRAGMGKSSWSRRIKQRAPPTEDLLLYVVAASVLQRRKVIIEKYSSMEEILRECHNMVGKLDVWKLLDDAHDLIVTLHAKIEHSIPQ

SEQ ID NO: 79077 - protein, 330 aa, Arabidopsis thaliana; identical to SEQ ID NO: 70081
  peptide (1)..(330): Ceres Seq. ID no. 12648734
  misc_feature (1)..(327): Homolog of NCBI NO: 15229125 NR Description: GTPase activating -like protein; protein id:
  misc_feature (1)..(26): Homolog of NCBI NO: 15229125 NR Description: GTPase activating -like protein; protein id:
  misc_feature (1)..(330): Homolog of NCBI NO: 15238518 NR Description: GTPase activator-like protein of Rab-like small protein id: At5g24390.1 [Arabidopsis thaliana]
  misc_feature (33)..(325): Homolog of NCBI NO: 37536102 NR Description: putative GTPase activating protein [Oryza sativa
  misc_feature (1)..(34): Homolog of NCBI NO: 37536102 NR Description: putative GTPase activating protein [Oryza sativa
  misc_feature (1)..(325): Homolog of NCBI NO: 9759196 NR Description: GTPase activator protein of Rab-like small
  misc_feature (1)..(325): Homolog of NCBI NO: 15238777 NR Description: GTPase activator protein of Rab-like small protein; protein id: At5g53570.1, supported by cDNA: gi_14517421, by cDNA: gi_20908079 [Arabidopsis thaliana]
  misc_feature (1)..(324): Homolog of NCBI NO: 15238237 NR Description: GTPase activator protein of Rab-like small
  misc_feature (1)..(47): Homolog of NCBI NO: 15238518 NR Description: GTPase activator-like protein of Rab-like small protein id: At5g24390.1 [Arabidopsis thaliana]
  misc_feature (1)..(45): Homolog of NCBI NO: 9759196 NR Description: GTPase activator protein of Rab-like small

SEQ ID NO: 79078 - DNA, 1154 bp, Arabidopsis thaliana
  misc_feature (1)..(1154): Ceres Seq. ID no. 12648759
  misc_feature: MA Experiment ID: 108434 Result: Up-regulated in Transcription
  misc_feature: MA Experiment 108434 PARAMETER Experiment Name: At_Root_Tips_cDNA_P Parameter: Tissue Value: Root Tips
  misc_feature: MA Experiment ID: 108435 Result: Up-regulated in Transcription
  misc_feature: MA Experiment 108435 PARAMETER Experiment Name: At_stm_Mutants_cDNA_P Parameter: Plant Line Value: wt Landsburg vs stm
  misc_feature: MA Experiment 108435 PARAMETER Experiment Name: At_stm_Mutants_cDNA_P Parameter: Tissue Value: Shoot Apical Meristem Region
  misc_feature: MA Experiment ID: 108501 Result: Down-regulated in Transcription
  misc_feature: MA Experiment 108501 PARAMETER Experiment Name: At_ap2_floral_buds_cDNA_P Parameter: Plant Line Value: ap2 (Ler.)
  misc_feature: MA Experiment 108501 PARAMETER Experiment Name: At_ap2_floral_buds_cDNA_P Parameter: Tissue Value: Closed Flower
  misc_feature: MA Experiment ID: 108609 Result: Down-regulated in Transcription
  misc_feature: MA Experiment 108609 PARAMETER Experiment Name: At_100uM_ABA_cDNA_P Parameter: Timepoint (hr) Value: 24
  misc_feature: MA Experiment 108609 PARAMETER Experiment Name: At_100uM_ABA_cDNA_P Parameter: Tissue Value: Aerial
  misc_feature: MA Experiment 108609 PARAMETER Experiment Name: At_100uM_ABA_cDNA_P Parameter: Treatment Value: 100uM ABA vs. No Treatment
  misc_feature: MA Experiment ID: 20000069 Result: Down-regulated in Transcription
  misc_feature: MA Experiment 20000069 PARAMETER Experiment Name: At_100uM_ABA_Mutants_cDNA_P Parameter: Plant Line Value: CS23
  misc_feature: MA Experiment 20000069 PARAMETER Experiment Name: At_100uM_ABA_Mutants_cDNA_P Parameter: Timepoint (hr) Value: 6
  misc_feature: MA Experiment 20000069 PARAMETER Experiment Name: At_100uM_ABA_Mutants_cDNA_P Parameter: Tissue Value: Aerial
  misc_feature: MA Experiment 20000069 PARAMETER Experiment Name: At_100uM_ABA_Mutants_cDNA_P Parameter: Treatment Value: 100uM ABA vs. No Treatment
  misc_feature: MA Experiment ID: 20000071 Result: Down-regulated in Transcription
  misc_feature: MA Experiment 20000071 PARAMETER Experiment Name: At_100uM_ABA_Mutants_cDNA_P Parameter: Plant Line Value: CS8104
  misc_feature: MA Experiment 20000071 PARAMETER Experiment Name: At_100uM_ABA_Mutants_cDNA_P Parameter: Timepoint (hr) Value: 6
  misc_feature: MA Experiment 20000071 PARAMETER Experiment Name: At_100uM_ABA_Mutants_cDNA_P Parameter: Tissue Value: Aerial
  misc_feature: MA Experiment 20000071 PARAMETER Experiment Name: At_100uM_ABA_Mutants_cDNA_P Parameter: Treatment Value: 100uM ABA vs. No Treatment
  misc_feature: MA Experiment ID: 20000072 Result: Down-regulated in Transcription
  misc_feature: MA Experiment 20000072 PARAMETER Experiment Name: At_100uM_ABA_Mutants_cDNA_P Parameter: Plant Line Value: CS8105
  misc_feature: MA Experiment 20000072 PARAMETER Experiment Name: At_100uM_ABA_Mutants_cDNA_P Parameter: Timepoint (hr) Value: 6
  misc_feature: MA Experiment 20000072 PARAMETER Experiment Name: At_100uM_ABA_Mutants_cDNA_P Parameter: Tissue Value: Aerial
  misc_feature: MA Experiment 20000072 PARAMETER Experiment Name: At_100uM_ABA_Mutants_cDNA_P Parameter: Treatment Value: 100uM ABA vs. No Treatment
  misc_feature: MA Experiment ID: 20000112 Result: Up-regulated in Transcription
  misc_feature: MA Experiment 20000112 PARAMETER Experiment Name: At_42deg_Heat_cDNA_P Parameter: Temperature (deg C) Value: 42 vs. 22
  misc_feature: MA Experiment 20000112 PARAMETER Experiment Name: At_42deg_Heat_cDNA_P Parameter: Timepoint (hr) Value: 2
  misc_feature: MA Experiment 20000112 PARAMETER Experiment Name: At_42deg_Heat_cDNA_P Parameter: Tissue Value: Aerial
  misc_feature: MA Experiment ID: 20000117 Result: Down-regulated in Transcription
  misc_feature: MA Experiment 20000117 PARAMETER Experiment Name: At_100uM_ABA_Mutants_cDNA_P Parameter: Plant Line Value: Columbia
  misc_feature: MA Experiment 20000117 PARAMETER Experiment Name: At_100uM_ABA_Mutants_cDNA_P Parameter: Timepoint (hr) Value: 6
  misc_feature: MA Experiment 20000117 PARAMETER Experiment Name: At_100uM_ABA_Mutants_cDNA_P Parameter: Tissue Value: Aerial
  misc_feature: MA Experiment 20000117 PARAMETER Experiment Name: At_100uM_ABA_Mutants_cDNA_P Parameter: Treatment Value: 100uM ABA vs. No Treatment
  misc_feature: MA Experiment ID: 20000227 Result: Up-regulated in Transcription
  misc_feature: MA Experiment 20000227 PARAMETER Experiment Name: At_Root-Tips-vs-Tops_P Parameter: Tissue Value: Root Tips vs. Root Tops
  misc_feature: MA Experiment ID: 20000234 Result: Up-regulated in Transcription
  misc_feature: MA Experiment 20000234 PARAMETER Experiment Name: At_Siliques_P Parameter: Age (day) Value: 21
  misc_feature: MA Experiment 20000234 PARAMETER Experiment Name: At_Siliques_P Parameter: Organism Value: A. thaliana
  misc_feature: MA Experiment 20000234 PARAMETER Experiment Name: At_Siliques_P Parameter: Plant Line Value: WS
  misc_feature: MA Experiment 20000234 PARAMETER Experiment Name: At_Siliques_P Parameter: Tissue Value: Less Than 5mm Siliques vs. Whole Plant
  misc_feature: MA Experiment ID: 20000235 Result: Up-regulated in Transcription
  misc_feature: MA Experiment 20000235 PARAMETER Experiment Name: At_Siliques_P Parameter: Age (day) Value: 21
  misc_feature: MA Experiment 20000235 PARAMETER Experiment Name: At_Siliques_P Parameter: Organism Value: A. thaliana
  misc_feature: MA Experiment 20000235 PARAMETER Experiment Name: At_Siliques_P Parameter: Plant Line Value: WS
  misc_feature: MA Experiment 20000235 PARAMETER Experiment Name: At_Siliques_P Parameter: Tissue Value: 5-10mm Siliques vs. Whole Plant
  misc_feature: MA Experiment ID: 20000264 Result: Up-regulated in Transcription
  misc_feature: MA Experiment 20000264 PARAMETER Experiment Name: At_Open_Flower_P Parameter: Age (day) Value: 21
  misc_feature: MA Experiment 20000264 PARAMETER Experiment Name: At_Open_Flower_P Parameter: Plant Line Value: WS
  misc_feature: MA Experiment 20000264 PARAMETER Experiment Name: At_Open_Flower_P Parameter: Tissue Value: Open Flower vs. Whole Plant
  misc_feature: MA Experiment ID: 20000265 Result: Up-regulated in Transcription
  misc_feature: MA Experiment 20000265 PARAMETER Experiment Name: At_Open_Flower_P Parameter: Age (day) Value: 21
  misc_feature: MA Experiment 20000265 PARAMETER Experiment Name: At_Open_Flower_P Parameter: Plant Line Value: WS
  misc_feature: MA Experiment 20000265 PARAMETER Experiment Name: At_Open_Flower_P Parameter: Tissue Value: Closed Flower vs. Whole Plant
  misc_feature: MA Experiment ID: 20000286 Result: Up-regulated in Transcription
  misc_feature: MA Experiment 20000286 PARAMETER Experiment Name: At_Open_Flower_P Parameter: Age (day) Value: 21
  misc_feature: MA Experiment 20000286 PARAMETER Experiment Name: At_Open_Flower_P Parameter: Plant Line Value: WS
  misc_feature: MA Experiment 20000286 PARAMETER Experiment Name: At_Open_Flower_P Parameter: Tissue Value: Half Open vs. Whole Plant
  misc_feature: MA Experiment ID: 20001450 Result: Up-regulated in Transcription
  misc_feature: MA Experiment 20001450 PARAMETER Experiment Name: At_Far-red-induction_P Parameter: Age (day) Value: 7
  misc_feature: MA Experiment 20001450 PARAMETER Experiment Name: At_Far-red-induction_P Parameter: Light Value: Far-red vs. White
  misc_feature: MA Experiment 20001450 PARAMETER Experiment Name: At_Far-red-induction_P Parameter: Organism Value: A. thaliana
  misc_feature: MA Experiment 20001450 PARAMETER Experiment Name: At_Far-red-induction_P Parameter: Plant Line Value: Columbia
  misc_feature: MA Experiment 20001450 PARAMETER Experiment Name: At_Far-red-induction_P Parameter: Timepoint (hr) Value: 8
  misc_feature: MA Experiment 20001450 PARAMETER Experiment Name: At_Far-red-induction_P Parameter: Tissue Value: Whole Plant
  misc_feature: MA Experiment ID: 20001451 Result: Up-regulated in Transcription
  misc_feature: MA Experiment 20001451 PARAMETER Experiment Name: At_Far-red-induction_P Parameter: Age (day) Value: 7
  misc_feature: MA Experiment 20001451 PARAMETER Experiment Name: At_Far-red-induction_P Parameter: Light Value: Far-red vs. White
  misc_feature: MA Experiment 20001451 PARAMETER Experiment Name: At_Far-red-induction_P Parameter: Organism Value: A. thaliana
  misc_feature: MA Experiment 20001451 PARAMETER Experiment Name: At_Far-red-induction_P Parameter: Plant Line Value: Columbia
  misc_feature: MA Experiment 20001451 PARAMETER Experiment Name: At_Far-red-induction_P Parameter: Timepoint (hr) Value: 24
  misc_feature: MA Experiment 20001451 PARAMETER Experiment Name: At_Far-red-induction_P Parameter: Tissue Value: Whole Plant
  misc_feature: MA Experiment ID: 20001559 Result: Up-regulated in Transcription
  misc_feature: MA Experiment 20001559 PARAMETER Experiment Name: At_Drought_Soil_Dry_P Parameter: Age (day) Value: 28
  misc_feature: MA Experiment 20001559 PARAMETER Experiment Name: At_Drought_Soil_Dry_P Parameter: Organism Value: A. thaliana
  misc_feature: MA Experiment 20001559 PARAMETER Experiment Name: At_Drought_Soil_Dry_P Parameter: Plant Line Value: WS
  misc_feature: MA Experiment 20001559 PARAMETER Experiment Name: At_Drought_Soil_Dry_P Parameter: Post Timepoint (hr) Value: 29
  misc_feature: MA Experiment 20001559 PARAMETER Experiment Name: At_Drought_Soil_Dry_P Parameter: Post-Treatment Value: Re-Water vs. No Drought
  misc_feature: MA Experiment 20001559 PARAMETER Experiment Name: At_Drought_Soil_Dry_P Parameter: Timepoint (day) Value: 14
  misc_feature: MA Experiment 20001559 PARAMETER Experiment Name: At_Drought_Soil_Dry_P Parameter: Treatment Value: Drought vs. No Drought
  misc_feature: MA Experiment ID: 20001904 Result: Up-regulated in Transcription
  misc_feature: MA Experiment 20001904 PARAMETER Experiment Name: At_Drought_Reproduction_P Parameter: Age (day) Value: 37
  misc_feature: MA Experiment 20001904 PARAMETER Experiment Name: At_Drought_Reproduction_P Parameter: Organism Value: A. thaliana
  misc_feature: MA Experiment 20001904 PARAMETER Experiment Name: At_Drought_Reproduction_P Parameter: Plant Line Value: WS
  misc_feature: MA Experiment 20001904 PARAMETER Experiment Name: At_Drought_Reproduction_P Parameter: Timepoint (day) Value: 7
  misc_feature: MA Experiment 20001904 PARAMETER Experiment Name: At_Drought_Reproduction_P Parameter: Tissue Value: Rosettes
  misc_feature: MA Experiment 20001904 PARAMETER Experiment Name: At_Drought_Reproduction_P Parameter: Treatment Value: Drought vs. No Drought
  misc_feature: MA Experiment ID: 20001905 Result: Up-regulated in Transcription
  misc_feature: MA Experiment 20001905 PARAMETER Experiment Name: At_Drought_Reproduction_P Parameter: Age (day) Value: 40
  misc_feature: MA Experiment 20001905 PARAMETER Experiment Name: At_Drought_Reproduction_P Parameter: Organism Value: A. thaliana
  misc_feature: MA Experiment 20001905 PARAMETER Experiment Name: At_Drought_Reproduction_P Parameter: Plant Line Value: WS
  misc_feature: MA Experiment 20001905 PARAMETER Experiment Name: At_Drought_Reproduction_P Parameter: Timepoint (day) Value: 10
  misc_feature: MA Experiment 20001905 PARAMETER Experiment Name: At_Drought_Reproduction_P Parameter: Tissue Value: Rosettes
  misc_feature: MA Experiment 20001905 PARAMETER Experiment Name: At_Drought_Reproduction_P Parameter: Treatment Value: Drought vs. No Drought
ataacatatatttcttcttcgtttcattcataatcgtcttataaccacagattctaaaacatgggagaagaagtaaaaccagaggcaaaggaggcagcctctgctccacaggccgtccccgctgaggaggaggagaagaagaaagatgtagcggaggagaagaaagtggcggctgaggaggagaaaccaaaggaggaagaggagccgcaaccaccaccaccgcctccacccttcatactctacgtcgacttgcattgtgttggatgcgctaagaagattgaaagatctattctaaaaattagaggtgtggaagaagtggtgatggatatgaatgagaaccaagtgacgataaagggagtgttggatccgcaagcagtgtgcaacaaaatcaagaagaagactaaaagaatggccaaagtcctctcgccgcttccggcagctgagggagagcctctgccaccaatcataacctctcaggtctccggcggcctcaccaccgtcgagctcagcgttaacatgcactgccaagcttgtgctgaccagctcaagaagaagattctcaaaatgagaggggtccaaacaactgtgacagagcacaccacgggaaaagtaatagtgactgggacaatggacgctgagaagcttgtggattacgtctaccgtcggaccaaaaagcaagcccgaatcgtaccccaacctgacccggaacctgaagcccccgcggccgcgcaggaagaaaagaaggaggagagcggtgaaggcaatgaaaaaccaccagagaccggagaggaaaaggaagaagagaagaagaaggagggagaggaaaatggagaggaaggtggtggagaagaggcggcggctacggaggaagagagacgagacaatgaaatgacggctatggcccaagaagaagggatgaagaggatgatgtattactatcaaccttcatacgtcatagagaggattcctccgccgcagctttttagcgacgagaaccctaatgcttgttgcatttcttaattaaatttggtttcgtatatgtctatggaaaatataattagaggaattaataattaggtaagaaaagaaagaaaataggtaaagaatttgtaaactatttattttttaatataatgtacgtgtgtttggtatct

SEQ ID NO: 79079 - protein, 319 aa, Arabidopsis thaliana; identical to SEQ ID NO: 27380
  peptide (1)..(319): Ceres Seq. ID no. 12648760
  misc_feature (148)..(209): Pfam Name: Heavy-metal-associated domain Pfam Description: Heavy-metal-associated domain
  misc_feature (1)..(319): Homolog of NCBI NO: 18420811 NR Description: expressed protein; protein id: At5g24580.1, by cDNA: 6393., supported by cDNA: gi_18175600 [Arabidopsis >gi|10177858|dbj|BAB11210.1| gene_id:K18P6.11~unknown protein
  misc_feature (1)..(319): Homolog of NCBI NO: 21594005 NR Description: unknown [Arabidopsis thaliana]
  misc_feature (3)..(318): Homolog of NCBI NO: 9758294 NR Description: contains similarity to ATFP3~gene_id:MLE2.16
  misc_feature (3)..(318): Homolog of NCBI NO: 18424719 NR Description: copper chaperone (CCH)-related; protein id: supported by cDNA: gi_13430829, supported by cDNA: gi_15810596 thaliana] >gi|13430830|gb|AAK26037.1|AF360327_1 unknown protein
  misc_feature (47)..(318): Homolog of NCBI NO: 4097547 NR Description: ATFP3 [Arabidopsis thaliana]
  misc_feature (3)..(274): Homolog of NCBI NO: 38344582 NR Description: OSJNBa0053B21.14 [Oryza sativa (japonica
  misc_feature (30)..(237): Homolog of NCBI NO: 37532382 NR Description: putative ATFP3 [Oryza sativa (japonica
  misc_feature (45)..(318): Homolog of NCBI NO: 15218784 NR Description: hypothetical protein; protein id: At1g29000.1 thaliana] >gi|10764865|gb|AAF24557.2|AC007508_20 F1K23.4
  misc_feature (24)..(264): Homolog of NCBI NO: 18404283 NR Description: expressed protein; protein id: At2g36950.1, by cDNA: 19570. [Arabidopsis thaliana]
  misc_feature (64)..(264): Homolog of NCBI NO: 25408515 NR Description: probable farnesylated protein [imported] -

SEQ ID NO: 79080 - protein, 232 aa, Arabidopsis thaliana; identical to SEQ ID NO: 27381
  peptide (1)..(232): Ceres Seq. ID no. 12648761
  misc_feature (61)..(122): Pfam Name: Heavy-metal-associated domain Pfam Description: Heavy-metal-associated domain
  misc_feature (1)..(232): Homolog of NCBI NO: 18420811 NR Description: expressed protein; protein id: At5g24580.1, by cDNA: 6393., supported by cDNA: gi_18175600 [Arabidopsis >gi|10177858|dbj|BAB11210.1| gene_id:K18P6.11~unknown protein
  misc_feature (1)..(232): Homolog of NCBI NO: 21594005 NR Description: unknown [Arabidopsis thaliana]
  misc_feature (1)..(231): Homolog of NCBI NO: 9758294 NR Description: contains similarity to ATFP3~gene_id:MLE2.16
  misc_feature (1)..(231): Homolog of NCBI NO: 18424719 NR Description: copper chaperone (CCH)-related; protein id: supported by cDNA: gi_13430829, supported by cDNA: gi_15810596 thaliana] >gi|13430830|gb|AAK26037.1|AF360327_1 unknown protein
  misc_feature (1)..(231): Homolog of NCBI NO: 4097547 NR Description: ATFP3 [Arabidopsis thaliana]
  misc_feature (1)..(187): Homolog of NCBI NO: 38344582 NR Description: OSJNBa0053B21.14 [Oryza sativa (japonica
  misc_feature (1)..(150): Homolog of NCBI NO: 37532382 NR Description: putative ATFP3 [Oryza sativa (japonica
  misc_feature (1)..(231): Homolog of NCBI NO: 15218784 NR Description: hypothetical protein; protein id: At1g29000.1 thaliana] >gi|10764865|gb|AAF24557.2|AC007508_20 F1K23.4
  misc_feature (1)..(177): Homolog of NCBI NO: 18404283 NR Description: expressed protein; protein id: At2g36950.1, by cDNA: 19570. [Arabidopsis thaliana]
  misc_feature (1)..(177): Homolog of NCBI NO: 25408515 NR Description: probable farnesylated protein [imported] -

SEQ ID NO: 79081 - protein, 230 aa, Arabidopsis thaliana; identical to SEQ ID NO: 27382
  peptide (1)..(230): Ceres Seq. ID no. 12648762
  misc_feature (59)..(120): Pfam Name: Heavy-metal-associated domain Pfam Description: Heavy-metal-associated domain
  misc_feature (1)..(230): Homolog of NCBI NO: 18420811 NR Description: expressed protein; protein id: At5g24580.1, by cDNA: 6393., supported by cDNA: gi_18175600 [Arabidopsis >gi|10177858|dbj|BAB11210.1| gene_id:K18P6.11~unknown protein
  misc_feature (1)..(230): Homolog of NCBI NO: 21594005 NR Description: unknown [Arabidopsis thaliana]
  misc_feature (1)..(229): Homolog of NCBI NO: 9758294 NR Description: contains similarity to ATFP3~gene_id:MLE2.16
  misc_feature (1)..(229): Homolog of NCBI NO: 18424719 NR Description: copper chaperone (CCH)-related; protein id: supported by cDNA: gi_13430829, supported by cDNA: gi_15810596 thaliana] >gi|13430830|gb|AAK26037.1|AF360327_1 unknown protein
  misc_feature (1)..(229): Homolog of NCBI NO: 4097547 NR Description: ATFP3 [Arabidopsis thaliana]
  misc_feature (1)..(185): Homolog of NCBI NO: 38344582 NR Description: OSJNBa0053B21.14 [Oryza sativa (japonica
  misc_feature (1)..(148): Homolog of NCBI NO: 37532382 NR Description: putative ATFP3 [Oryza sativa (japonica
  misc_feature (1)..(229): Homolog of NCBI NO: 15218784 NR Description: hypothetical protein; protein id: At1g29000.1 thaliana] >gi|10764865|gb|AAF24557.2|AC007508_20 F1K23.4
  misc_feature (1)..(175): Homolog of NCBI NO: 18404283 NR Description: expressed protein; protein id: At2g36950.1, by cDNA: 19570. [Arabidopsis thaliana]
  misc_feature (1)..(175): Homolog of NCBI NO: 25408515 NR Description: probable farnesylated protein [imported] -

SEQ ID NO: 79082 - DNA, 1263 bp, Arabidopsis thaliana
  misc_feature (1)..(1263): Ceres Seq. ID no. 12648778
  misc_feature: MA Experiment ID: 20000495 Result: Up-regulated in Transcription
  misc_feature: MA Experiment 20000495 PARAMETER Experiment Name: At_Guard_Cells_P Parameter: Harvest Date Value: 8/2/2002
  misc_feature: MA Experiment 20000495 PARAMETER Experiment Name: At_Guard_Cells_P Parameter: Organism Value: A. thaliana
  misc_feature: MA Experiment 20000495 PARAMETER Experiment Name: At_Guard_Cells_P Parameter: Tissue Value: Guard Cells vs. Leaves
  misc_feature: MA Experiment ID: 20001451 Result: Down-regulated in Transcription
  misc_feature: MA Experiment 20001451 PARAMETER Experiment Name: At_Far-red-induction_P Parameter: Age (day) Value: 7
  misc_feature: MA Experiment 20001451 PARAMETER Experiment Name: At_Far-red-induction_P Parameter: Light Value: Far-red vs. White
  misc_feature: MA Experiment 20001451 PARAMETER Experiment Name: At_Far-red-induction_P Parameter: Organism Value: A. thaliana
  misc_feature: MA Experiment 20001451 PARAMETER Experiment Name: At_Far-red-induction_P Parameter: Plant Line Value: Columbia
  misc_feature: MA Experiment 20001451 PARAMETER Experiment Name: At_Far-red-induction_P Parameter: Timepoint (hr) Value: 24
  misc_feature: MA Experiment 20001451 PARAMETER Experiment Name: At_Far-red-induction_P Parameter: Tissue Value: Whole Plant
atgggaagatcaccaatggttcctatggctgttcttgtttatgtttctctactgttctctgtttcttattcctccacgttcgtcatcacaaataactgtccctttactatatggcctggaactcttgcaggctctggcacccagccactacccaccacagggttcaggcttgatgtgggacagtctgttagaattcccacggctctaggctggtcaggtcgtatttgggctaggactggctgcaactttgatgctaacggcgcgggaaaatgtatgactggagactgcggcggaaagctggagtgtgctggtaatggcgctgctccgccgacatctcttttcgagatcacactcggtcacggttctgatgacaaagatttctatgatgtcagtctcgttgatgggtataaccttcccatagttgctctcccgacgggtggtggactggttggcgcttgtaatgctacaggatgtgttgctgatatcaatattagctgtccaaaggagcttcaagtgatgggagaggaagaggctgaaagaggaggggttgttgcatgcaagagcgcttgtgaggcctttgggttggaccagtactgttgcagcggtcagtttgctaacccgaccacatgccgaccgtctttatactcttccatcttcaagagagcttgtcccagagcttatagctatgccttcgatgatggaaccagtactttcacctgcaaggcttctgaatatgcaattatcttctgccctggcagggtaaaaagaccagacagtctgaactcggatcctcccagcccacctcagaatcagttagggcaacctatggctcccccaactcaaaatcagtatggtcaacctatggctcctgcacctcagtatcagtacggtcaacctatggctccaccgactcaaaatcagtatggtcaacctctggctcctccgactcaaaatcaatacgatcaacctctggctcctccgactcaaaatcaatatggtcaacctatggctccaccaactccgcccccacccggaccaaacgaggattcaatgactcccccacctcagaatcagaatggggatgggcagttcatgcctcctcccactttggaccaagatccaaacgaccagtatatgaatcccccaattcaggatcagagtcaaagagagactcaatcttcatccgatcttcttcgaccttaccctgtcttgttgcttcttggctttagtctaactgctttgaggcaatctggcacgacatga

SEQ ID NO: 79083 - protein, 420 aa, Arabidopsis thaliana
  peptide (1)..(420): Ceres Seq. ID no. 12648779
  misc_feature (31)..(251): Pfam Name: Thaumatin family Pfam Description: Thaumatin family
  misc_feature (1)..(253): Homolog of NCBI NO: 15238593 NR Description: thaumatin-like protein; protein id: At5g24620.1
  misc_feature (1)..(251): Homolog of NCBI NO: 15233437 NR Description: thaumatin-like protein; protein id: At4g36010.1, by cDNA: gi_13430505, supported by cDNA: gi_21280948 [Arabidopsis
  misc_feature (15)..(309): Homolog of NCBI NO: 18420282 NR Description: putative thaumatin-like protein; protein id: supported by cDNA: 32152., supported by cDNA: gi_17979354, by cDNA: gi_20466020 [Arabidopsis thaliana]
  misc_feature (15)..(309): Homolog of NCBI NO: 21592749 NR Description: putative thaumatin-like protein [Arabidopsis
  misc_feature (15)..(251): Homolog of NCBI NO: 15227907 NR Description: putative thaumatin-like pathogenesis-related protein id: At2g17860.1 [Arabidopsis thaliana]
  misc_feature (22)..(309): Homolog of NCBI NO: 7442168 NR Description: pathogenesis-related protein F20M13.220 -
  misc_feature (3)..(276): Homolog of NCBI NO: 37531042 NR Description: putative thaumatin-like protein [Oryza sativa
  misc_feature (7)..(279): Homolog of NCBI NO: 15222875 NR Description: thaumatin, putative; protein id: At1g75800.1, by cDNA: gi_18377859, supported by cDNA: gi_20334825 [Arabidopsis
  misc_feature (11)..(251): Homolog of NCBI NO: 30692042 NR Description: thaumatin family [Arabidopsis thaliana]
  misc_feature (1)..(251): Homolog of NCBI NO: 6273385 NR Description: SCUTL2 [Vitis vinifera]
MGRSPMVPMAVLVYVSLLFSVSYSSTFVITNNCPFTIWPGTLAGSGTQPLPTTGFRLDVGQSVRIPTALGWSGRIWARTGCNFDANGAGKCMTGDCGGKLECAGNGAAPPTSLFEITLGHGSDDKDFYDVSLVDGYNLPIVALPTGGGLVGACNATGCVADINISCPKELQVMGEEEAERGGVVACKSACEAFGLDQYCCSGQFANPTTCRPSLYSSIFKRACPRAYSYAFDDGTSTFTCKASEYAIIFCPGRVKRPDSLNSDPPSPPQNQLGQPMAPPTQNQYGQPMAPAPQYQYGQPMAPPTQNQYGQPLAPPTQNQYDQPLAPPTQNQYGQPMAPPTPPPPGPNEDSMTPPPQNQNGDGQFMPPPTLDQDPNDQYMNPPIQDQSQRETQSSSDLLRPYPVLLLLGFSLTALRQSGTT

SEQ ID NO: 79084 - protein, 415 aa, Arabidopsis thaliana
  peptide (1)..(415): Ceres Seq. ID no. 12648780
  misc_feature (26)..(246): Pfam Name: Thaumatin family Pfam Description: Thaumatin family
  misc_feature (1)..(248): Homolog of NCBI NO: 15238593 NR Description: thaumatin-like protein; protein id: At5g24620.1
  misc_feature (1)..(246): Homolog of NCBI NO: 15233437 NR Description: thaumatin-like protein; protein id: At4g36010.1, by cDNA: gi_13430505, supported by cDNA: gi_21280948 [Arabidopsis
  misc_feature (10)..(304): Homolog of NCBI NO: 18420282 NR Description: putative thaumatin-like protein; protein id: supported by cDNA: 32152., supported by cDNA: gi_17979354, by cDNA: gi_20466020 [Arabidopsis thaliana]
  misc_feature (10)..(304): Homolog of NCBI NO: 21592749 NR Description: putative thaumatin-like protein [Arabidopsis
  misc_feature (10)..(246): Homolog of NCBI NO: 15227907 NR Description: putative thaumatin-like pathogenesis-related protein id: At2g17860.1 [Arabidopsis thaliana]
  misc_feature (17)..(304): Homolog of NCBI NO: 7442168 NR Description: pathogenesis-related protein F20M13.220 -
  misc_feature (1)..(271): Homolog of NCBI NO: 37531042 NR Description: putative thaumatin-like protein [Oryza sativa
  misc_feature (2)..(274): Homolog of NCBI NO: 15222875 NR Description: thaumatin, putative; protein id: At1g75800.1, by cDNA: gi_18377859, supported by cDNA: gi_20334825 [Arabidopsis
  misc_feature (6)..(246): Homolog of NCBI NO: 30692042 NR Description: thaumatin family [Arabidopsis thaliana]
  misc_feature (1)..(246): Homolog of NCBI NO: 6273385 NR Description: SCUTL2 [Vitis vinifera]
MVPMAVLVYVSLLFSVSYSSTFVITNNCPFTIWPGTLAGSGTQPLPTTGFRLDVGQSVRIPTALGWSGRIWARTGCNFDANGAGKCMTGDCGGKLECAGNGAAPPTSLFEITLGHGSDDKDFYDVSLVDGYNLPIVALPTGGGLVGACNATGCVADINISCPKELQVMGEEEAERGGVVACKSACEAFGLDQYCCSGQFANPTTCRPSLYSSIFKRACPRAYSYAFDDGTSTFTCKASEYAIIFCPGRVKRPDSLNSDPPSPPQNQLGQPMAPPTQNQYGQPMAPAPQYQYGQPMAPPTQNQYGQPLAPPTQNQYDQPLAPPTQNQYGQPMAPPTPPPPGPNEDSMTPPPQNQNGDGQFMPPPTLDQDPNDQYMNPPIQDQSQRETQSSSDLLRPYPVLLLLGFSLTALRQSGTT

SEQ ID NO: 79085 - protein, 412 aa, Arabidopsis thaliana
  peptide (1)..(412): Ceres Seq. ID no. 12648781
  misc_feature (23)..(243): Pfam Name: Thaumatin family Pfam Description: Thaumatin family
  misc_feature (1)..(245): Homolog of NCBI NO: 15238593 NR Description: thaumatin-like protein; protein id: At5g24620.1
  misc_feature (1)..(243): Homolog of NCBI NO: 15233437 NR Description: thaumatin-like protein; protein id: At4g36010.1, by cDNA: gi_13430505, supported by cDNA: gi_21280948 [Arabidopsis
  misc_feature (7)..(301): Homolog of NCBI NO: 18420282 NR Description: putative thaumatin-like protein; protein id: supported by cDNA: 32152., supported by cDNA: gi_17979354, by cDNA: gi_20466020 [Arabidopsis thaliana]
  misc_feature (7)..(301): Homolog of NCBI NO: 21592749 NR Description: putative thaumatin-like protein [Arabidopsis
  misc_feature (7)..(243): Homolog of NCBI NO: 15227907 NR Description: putative thaumatin-like pathogenesis-related protein id: At2g17860.1 [Arabidopsis thaliana]
  misc_feature (14)..(301): Homolog of NCBI NO: 7442168 NR Description: pathogenesis-related protein F20M13.220 -
  misc_feature (1)..(268): Homolog of NCBI NO: 37531042 NR Description: putative thaumatin-like protein [Oryza sativa
  misc_feature (1)..(271): Homolog of NCBI NO: 15222875 NR Description: thaumatin, putative; protein id: At1g75800.1, by cDNA: gi_18377859, supported by cDNA: gi_20334825 [Arabidopsis
  misc_feature (3)..(243): Homolog of NCBI NO: 30692042 NR Description: thaumatin family [Arabidopsis thaliana]
  misc_feature (1)..(243): Homolog of NCBI NO: 6273385 NR Description: SCUTL2 [Vitis vinifera]
MAVLVYVSLLFSVSYSSTFVITNNCPFTIWPGTLAGSGTQPLPTTGFRLDVGQSVRIPTALGWSGRIWARTGCNFDANGAGKCMTGDCGGKLECAGNGAAPPTSLFEITLGHGSDDKDFYDVSLVDGYNLPIVALPTGGGLVGACNATGCVADINISCPKELQVMGEEEAERGGVVACKSACEAFGLDQYCCSGQFANPTTCRPSLYSSIFKRACPRAYSYAFDDGTSTFTCKASEYAIIFCPGRVKRPDSLNSDPPSPPQNQLGQPMAPPTQNQYGQPMAPAPQYQYGQPMAPPTQNQYGQPLAPPTQNQYDQPLAPPTQNQYGQPMAPPTPPPPGPNEDSMTPPPQNQNGDGQFMPPPTLDQDPNDQYMNPPIQDQSQRETQSSSDLLRPYPVLLLLGFSLTALRQSGTT

SEQ ID NO: 79086 - DNA, 1071 bp, Arabidopsis thaliana
  misc_feature (1)..(1071): Ceres Seq. ID no. 12648789
  misc_feature: MA Experiment ID: 20000173 Result: Down-regulated in Transcription
  misc_feature: MA Experiment 20000173 PARAMETER Experiment Name: At_42deg_Heat_P Parameter: Age (day) Value: 14
  misc_feature: MA Experiment 20000173 PARAMETER Experiment Name: At_42deg_Heat_P Parameter: Organism Value: A. thaliana
  misc_feature: MA Experiment 20000173 PARAMETER Experiment Name: At_42deg_Heat_P Parameter: Plant Line Value: WS
  misc_feature: MA Experiment 20000173 PARAMETER Experiment Name: At_42deg_Heat_P Parameter: Temperature (deg C) Value: 42 vs. 22
  misc_feature: MA Experiment 20000173 PARAMETER Experiment Name: At_42deg_Heat_P Parameter: Timepoint (hr) Value: 6
  misc_feature: MA Experiment 20000173 PARAMETER Experiment Name: At_42deg_Heat_P Parameter: Tissue Value: Aerial
  misc_feature: MA Experiment ID: 20000184 Result: Down-regulated in Transcription
  misc_feature: MA Experiment 20000184 PARAMETER Experiment Name: At_Shoots__P Parameter: Age (day) Value: 7
  misc_feature: MA Experiment 20000184 PARAMETER Experiment Name: At_Shoots__P Parameter: Tissue Value: Shoots vs. Whole Plant
  misc_feature: MA Experiment ID: 20000227 Result: Down-regulated in Transcription
  misc_feature: MA Experiment 20000227 PARAMETER Experiment Name: At_Root-Tips-vs-Tops_P Parameter: Tissue Value: Root Tips vs. Root Tops
  misc_feature: MA Experiment ID: 20000234 Result: Up-regulated in Transcription
  misc_feature: MA Experiment 20000234 PARAMETER Experiment Name: At_Siliques_P Parameter: Age (day) Value: 21
  misc_feature: MA Experiment 20000234 PARAMETER Experiment Name: At_Siliques_P Parameter: Organism Value: A. thaliana
  misc_feature: MA Experiment 20000234 PARAMETER Experiment Name: At_Siliques_P Parameter: Plant Line Value: WS
  misc_feature: MA Experiment 20000234 PARAMETER Experiment Name: At_Siliques_P Parameter: Tissue Value: Less Than 5mm Siliques vs. Whole Plant
  misc_feature: MA Experiment ID: 20000235 Result: Up-regulated in Transcription
  misc_feature: MA Experiment 20000235 PARAMETER Experiment Name: At_Siliques_P Parameter: Age (day) Value: 21
  misc_feature: MA Experiment 20000235 PARAMETER Experiment Name: At_Siliques_P Parameter: Organism Value: A. thaliana
  misc_feature: MA Experiment 20000235 PARAMETER Experiment Name: At_Siliques_P Parameter: Plant Line Value: WS
  misc_feature: MA Experiment 20000235 PARAMETER Experiment Name: At_Siliques_P Parameter: Tissue Value: 5-10mm Siliques vs. Whole Plant
  misc_feature: MA Experiment ID: 20000264 Result: Up-regulated in Transcription
  misc_feature: MA Experiment 20000264 PARAMETER Experiment Name: At_Open_Flower_P Parameter: Age (day) Value: 21
  misc_feature: MA Experiment 20000264 PARAMETER Experiment Name: At_Open_Flower_P Parameter: Plant Line Value: WS
  misc_feature: MA Experiment 20000264 PARAMETER Experiment Name: At_Open_Flower_P Parameter: Tissue Value: Open Flower vs. Whole Plant
  misc_feature: MA Experiment ID: 20000265 Result: Up-regulated in Transcription
  misc_feature: MA Experiment 20000265 PARAMETER Experiment Name: At_Open_Flower_P Parameter: Age (day) Value: 21
  misc_feature: MA Experiment 20000265 PARAMETER Experiment Name: At_Open_Flower_P Parameter: Plant Line Value: WS
  misc_feature: MA Experiment 20000265 PARAMETER Experiment Name: At_Open_Flower_P Parameter: Tissue Value: Closed Flower vs. Whole Plant
  misc_feature: MA Experiment ID: 20000286 Result: Up-regulated in Transcription
  misc_feature: MA Experiment 20000286 PARAMETER Experiment Name: At_Open_Flower_P Parameter: Age (day) Value: 21
  misc_feature: MA Experiment 20000286 PARAMETER Experiment Name: At_Open_Flower_P Parameter: Plant Line Value: WS
  misc_feature: MA Experiment 20000286 PARAMETER Experiment Name: At_Open_Flower_P Parameter: Tissue Value: Half Open vs. Whole Plant
  misc_feature: MA Experiment ID: 20000495 Result: Up-regulated in Transcription
  misc_feature: MA Experiment 20000495 PARAMETER Experiment Name: At_Guard_Cells_P Parameter: Harvest Date Value: 8/2/2002
  misc_feature: MA Experiment 20000495 PARAMETER Experiment Name: At_Guard_Cells_P Parameter: Organism Value: A. thaliana
  misc_feature: MA Experiment 20000495 PARAMETER Experiment Name: At_Guard_Cells_P Parameter: Tissue Value: Guard Cells vs. Leaves
  misc_feature: MA Experiment ID: 20000573 Result: Down-regulated in Transcription
  misc_feature: MA Experiment 20000573 PARAMETER Experiment Name: At_100uM_ABA_Mutants__P Parameter: Organism Value: A. thaliana
  misc_feature: MA Experiment 20000573 PARAMETER Experiment Name: At_100uM_ABA_Mutants__P Parameter: Plant Line Value: CS22 vs. Ler wt
  misc_feature: MA Experiment 20000573 PARAMETER Experiment Name: At_100uM_ABA_Mutants__P Parameter: Timepoint (hr) Value: N/A
  misc_feature: MA Experiment 20000573 PARAMETER Experiment Name: At_100uM_ABA_Mutants__P Parameter: Tissue Value: Whole Plant
  misc_feature: MA Experiment 20000573 PARAMETER Experiment Name: At_100uM_ABA_Mutants__P Parameter: Treatment Value: None
  misc_feature: MA Experiment ID: 20000794 Result: Up-regulated in Transcription
  misc_feature: MA Experiment 20000794 PARAMETER Experiment Name: At_Petals_P Parameter: Age (day) Value: 23-25 days
  misc_feature: MA Experiment 20000794 PARAMETER Experiment Name: At_Petals_P Parameter: Plant Line Value: WS
  misc_feature: MA Experiment 20000794 PARAMETER Experiment Name: At_Petals_P Parameter: Tissue Value: Petals vs. Whole plant
  misc_feature: MA Experiment ID: 20001557 Result: Down-regulated in Transcription
  misc_feature: MA Experiment 20001557 PARAMETER Experiment Name: At_Drought_Soil_Dry_P Parameter: Age (day) Value: 27
  misc_feature: MA Experiment 20001557 PARAMETER Experiment Name: At_Drought_Soil_Dry_P Parameter: Organism Value: A. thaliana
  misc_feature: MA Experiment 20001557 PARAMETER Experiment Name: At_Drought_Soil_Dry_P Parameter: Plant Line Value: WS
  misc_feature: MA Experiment 20001557 PARAMETER Experiment Name: At_Drought_Soil_Dry_P Parameter: Post Timepoint (hr) Value: 3
  misc_feature: MA Experiment 20001557 PARAMETER Experiment Name: At_Drought_Soil_Dry_P Parameter: Post-Treatment Value: Re-Water vs. No Drought
  misc_feature: MA Experiment 20001557 PARAMETER Experiment Name: At_Drought_Soil_Dry_P Parameter: Timepoint (day) Value: 13
  misc_feature: MA Experiment 20001557 PARAMETER Experiment Name: At_Drought_Soil_Dry_P Parameter: Treatment Value: Drought vs. No Drought
  misc_feature: MA Experiment ID: 20001558 Result: Down-regulated in Transcription
  misc_feature: MA Experiment 20001558 PARAMETER Experiment Name: At_Drought_Soil_Dry_P Parameter: Age (day) Value: 27
  misc_feature: MA Experiment 20001558 PARAMETER Experiment Name: At_Drought_Soil_Dry_P Parameter: Organism Value: A. thaliana
  misc_feature: MA Experiment 20001558 PARAMETER Experiment Name: At_Drought_Soil_Dry_P Parameter: Plant Line Value: WS
  misc_feature: MA Experiment 20001558 PARAMETER Experiment Name: At_Drought_Soil_Dry_P Parameter: Post Timepoint (hr) Value: 6
  misc_feature: MA Experiment 20001558 PARAMETER Experiment Name: At_Drought_Soil_Dry_P Parameter: Post-Treatment Value: Re-Water vs. No Drought
  misc_feature: MA Experiment 20001558 PARAMETER Experiment Name: At_Drought_Soil_Dry_P Parameter: Timepoint (day) Value: 13
  misc_feature: MA Experiment 20001558 PARAMETER Experiment Name: At_Drought_Soil_Dry_P Parameter: Treatment Value: Drought vs. No Drought
  misc_feature: MA Experiment ID: 20001911 Result: Up-regulated in Transcription
  misc_feature: MA Experiment 20001911 PARAMETER Experiment Name: At_Drought_Reproduction_P Parameter: Age (day) Value: 40
  misc_feature: MA Experiment 20001911 PARAMETER Experiment Name: At_Drought_Reproduction_P Parameter: Organism Value: A. thaliana
  misc_feature: MA Experiment 20001911 PARAMETER Experiment Name: At_Drought_Reproduction_P Parameter: Plant Line Value: WS
  misc_feature: MA Experiment 20001911 PARAMETER Experiment Name: At_Drought_Reproduction_P Parameter: Timepoint (day) Value: 10
  misc_feature: MA Experiment 20001911 PARAMETER Experiment Name: At_Drought_Reproduction_P Parameter: Tissue Value: Flowers
  misc_feature: MA Experiment 20001911 PARAMETER Experiment Name: At_Drought_Reproduction_P Parameter: Treatment Value: Drought vs. No Drought
atggattcagatgcatgggaaattatccatatacctgaaaagccttcattgtcacctgaccatcagcccactgtgaaggtatatgctagcctaatcaaacccagatttgccaatacgatagtgaggcatttatgtaagattgctcctctagaagatcttcgtcatgttaaaagggtgaagaagaagattctgccagattgcggtgaaactcagttgactgtcatcttatgtctagcacctgagcacaacgatcagttgagtgacatgccacctgatgtgcagagactcgttgatccctatgagttgagtccttttattacacaagtatgcaaatatgctgcggtatccaaagaagagtgggaagaacaaagtaagatatggcctacttcatttcatccaccaacctatgcaacagtcaatgattttttactttttgcatttggcaatgatagcaatatagatggcatcggtgggttcagcgaggaggaaacacaatcaatctgcaagttcatgagagttgttattgatatggcagtatctggtcatacaccacttgtgaatgctgcagtgatagttgatccttcagttaggcgaataatagctagtgaaactgatcaagtatatgcatcatctgctcctcgtgacatgactagcgcagagaccaggcccttcgaggaaacaggggaaatatgtttaaatgacacacttgaaaaacagaatggttcattgtctgctctttcttgtctgaatccctggcaatggagtttgcagccgcatgacactgaaaattgtagccagtggcatcctcttaggcatgcttccatggttgccattgaatcctcttctgccagagatagaaatctgtttcccaatccatccaagatttttgatcaggatcatgttccgccctcaaatacagattctccggctaaaaagcagaaaacaagcagtcagagtccagacgtccaaaatgacagcagagaagagactgttagagatccttcaatggaaaggccgtacctctgcactggttatgacattttcctcctgttggagccttgtacaatgtga

SEQ ID NO: 79087 - protein, 356 aa, Arabidopsis thaliana
  peptide (1)..(356): Ceres Seq. ID no. 12648790
  misc_feature (105)..(356): Homolog of NCBI NO: 30689567 NR Description: expressed protein [Arabidopsis thaliana]
  misc_feature (1)..(116): Homolog of NCBI NO: 30689567 NR Description: expressed protein [Arabidopsis thaliana]
  misc_feature (105)..(356): Homolog of NCBI NO: 9759207 NR Description: gene_id:MXC17.5~unknown protein [Arabidopsis
  misc_feature (1)..(116): Homolog of NCBI NO: 9759207 NR Description: gene_id:MXC17.5~unknown protein [Arabidopsis
  misc_feature (4)..(205): Homolog of NCBI NO: 22204218 NR Description: SI:dZ211O13.3 (novel protein) [Danio rerio]
  misc_feature (339)..(356): Homolog of NCBI NO: 22204218 NR Description: SI:dZ211O13.3 (novel protein) [Danio rerio]
  misc_feature (4)..(205): Homolog of NCBI NO: 22204386 NR Description: SI:dZ72B14.5 (novel protein) [Danio rerio]
  misc_feature (339)..(356): Homolog of NCBI NO: 22204386 NR Description: SI:dZ72B14.5 (novel protein) [Danio rerio]
MDSDAWEIIHIPEKPSLSPDHQPTVKVYASLIKPRFANTIVRHLCKIAPLEDLRHVKRVKKKILPDCGETQLTVILCLAPEHNDQLSDMPPDVQRLVDPYELSPFITQVCKYAAVSKEEWEEQSKIWPTSFHPPTYATVNDFLLFAFGNDSNIDGIGGFSEEETQSICKFMRVVIDMAVSGHTPLVNAAVIVDPSVRRIIASETDQVYASSAPRDMTSAETRPFEETGEICLNDTLEKQNGSLSALSCLNPWQWSLQPHDTENCSQWHPLRHASMVAIESSSARDRNLFPNPSKIFDQDHVPPSNTDSPAKKQKTSSQSPDVQNDSREETVRDPSMERPYLCTGYDIFLLLEPCTM

SEQ ID NO: 79088 - protein, 268 aa, Arabidopsis thaliana
  peptide (1)..(268): Ceres Seq. ID no. 12648791
  misc_feature (17)..(268): Homolog of NCBI NO: 30689567 NR Description: expressed protein [Arabidopsis thaliana]
  misc_feature (1)..(28): Homolog of NCBI NO: 30689567 NR Description: expressed protein [Arabidopsis thaliana]
  misc_feature (17)..(268): Homolog of NCBI NO: 9759207 NR Description: gene_id:MXC17.5~unknown protein [Arabidopsis
  misc_feature (1)..(28): Homolog of NCBI NO: 9759207 NR Description: gene_id:MXC17.5~unknown protein [Arabidopsis
  misc_feature (1)..(117): Homolog of NCBI NO: 22204218 NR Description: SI:dZ211O13.3 (novel protein) [Danio rerio]
  misc_feature (251)..(268): Homolog of NCBI NO: 22204218 NR Description: SI:dZ211O13.3 (novel protein) [Danio rerio]
  misc_feature (1)..(117): Homolog of NCBI NO: 22204386 NR Description: SI:dZ72B14.5 (novel protein) [Danio rerio]
  misc_feature (251)..(268): Homolog of NCBI NO: 22204386 NR Description: SI:dZ72B14.5 (novel protein) [Danio rerio]
MPPDVQRLVDPYELSPFITQVCKYAAVSKEEWEEQSKIWPTSFHPPTYATVNDFLLFAFGNDSNIDGIGGFSEEETQSICKFMRVVIDMAVSGHTPLVNAAVIVDPSVRRIIASETDQVYASSAPRDMTSAETRPFEETGEICLNDTLEKQNGSLSALSCLNPWQWSLQPHDTENCSQWHPLRHASMVAIESSSARDRNLFPNPSKIFDQDHVPPSNTDSPAKKQKTSSQSPDVQNDSREETVRDPSMERPYLCTGYDIFLLLEPCTM

SEQ ID NO: 79089 - protein, 186 aa, Arabidopsis thaliana
  peptide (1)..(186): Ceres Seq. ID no. 12648792
  misc_feature (1)..(186): Homolog of NCBI NO: 30689567 NR Description: expressed protein [Arabidopsis thaliana]
  misc_feature (1)..(186): Homolog of NCBI NO: 9759207 NR Description: gene_id:MXC17.5~unknown protein [Arabidopsis
  misc_feature (1)..(35): Homolog of NCBI NO: 22204218 NR Description: SI:dZ211O13.3 (novel protein) [Danio rerio]
  misc_feature (169)..(186): Homolog of NCBI NO: 22204218 NR Description: SI:dZ211O13.3 (novel protein) [Danio rerio]
  misc_feature (1)..(35): Homolog of NCBI NO: 22204386 NR Description: SI:dZ72B14.5 (novel protein) [Danio rerio]
  misc_feature (169)..(186): Homolog of NCBI NO: 22204386 NR Description: SI:dZ72B14.5 (novel protein) [Danio rerio]
MRVVIDMAVSGHTPLVNAAVIVDPSVRRIIASETDQVYASSAPRDMTSAETRPFEETGEICLNDTLEKQNGSLSALSCLNPWQWSLQPHDTENCSQWHPLRHASMVAIESSSARDRNLFPNPSKIFDQDHVPPSNTDSPAKKQKTSSQSPDVQNDSREETVRDPSMERPYLCTGYDIFLLLEPCTM

SEQ ID NO: 79090 - DNA, 1563 bp, Arabidopsis thaliana
  misc_feature (1)..(1563): Ceres Seq. ID no. 12648822
  misc_feature: MA Experiment ID: 108488 Result: Down-regulated in Transcription
  misc_feature: MA Experiment ID: 108489 Result: Up-regulated in Transcription
  misc_feature: MA Experiment ID: 108572 Result: Up-regulated in Transcription
  misc_feature: MA Experiment 108572 PARAMETER Experiment Name: At_Drought_cDNA_P Parameter: Timepoint (hr) Value: 1
  misc_feature: MA Experiment 108572 PARAMETER Experiment Name: At_Drought_cDNA_P Parameter: Tissue Value: Aerial
  misc_feature: MA Experiment 108572 PARAMETER Experiment Name: At_Drought_cDNA_P Parameter: Treatment Value: Drought vs. No Drought
  misc_feature: MA Experiment ID: 108573 Result: Up-regulated in Transcription
  misc_feature: MA Experiment 108573 PARAMETER Experiment Name: At_Drought_cDNA_P Parameter: Timepoint (hr) Value: 6
  misc_feature: MA Experiment 108573 PARAMETER Experiment Name: At_Drought_cDNA_P Parameter: Tissue Value: Aerial
  misc_feature: MA Experiment 108573 PARAMETER Experiment Name: At_Drought_cDNA_P Parameter: Treatment Value: Drought vs. No Drought
  misc_feature: MA Experiment ID: 108594 Result: Down-regulated in Transcription
  misc_feature: MA Experiment 108594 PARAMETER Experiment Name: At_Ler-rhl_Root_cDNA_P Parameter: Plant Line Value: null
  misc_feature: MA Experiment ID: 20000069 Result: Down-regulated in Transcription
  misc_feature: MA Experiment 20000069 PARAMETER Experiment Name: At_100uM_ABA_Mutants_cDNA_P Parameter: Plant Line Value: CS23
  misc_feature: MA Experiment 20000069 PARAMETER Experiment Name: At_100uM_ABA_Mutants_cDNA_P Parameter: Timepoint (hr) Value: 6
  misc_feature: MA Experiment 20000069 PARAMETER Experiment Name: At_100uM_ABA_Mutants_cDNA_P Parameter: Tissue Value: Aerial
  misc_feature: MA Experiment 20000069 PARAMETER Experiment Name: At_100uM_ABA_Mutants_cDNA_P Parameter: Treatment Value: 100uM ABA vs. No Treatment
  misc_feature: MA Experiment ID: 20000089 Result: Down-regulated in Transcription
  misc_feature: MA Experiment ID: 20000111 Result: Up-regulated in Transcription
  misc_feature: MA Experiment 20000111 PARAMETER Experiment Name: At_42deg_Heat_cDNA_P Parameter: Temperature (deg C) Value: 42 vs. 22
  misc_feature: MA Experiment 20000111 PARAMETER Experiment Name: At_42deg_Heat_cDNA_P Parameter: Timepoint (hr) Value: 6
  misc_feature: MA Experiment 20000111 PARAMETER Experiment Name: At_42deg_Heat_cDNA_P Parameter: Tissue Value: Aerial
  misc_feature: MA Experiment ID: 20000113 Result: Up-regulated in Transcription
  misc_feature: MA Experiment 20000113 PARAMETER Experiment Name: At_42deg_Heat_cDNA_P Parameter: Temperature (deg C) Value: 42 vs. 22
  misc_feature: MA Experiment 20000113 PARAMETER Experiment Name: At_42deg_Heat_cDNA_P Parameter: Timepoint (hr) Value: 8
  misc_feature: MA Experiment 20000113 PARAMETER Experiment Name: At_42deg_Heat_cDNA_P Parameter: Tissue Value: Aerial
atggatggatttaagggtaaaagaacatctagaccgattatgccacggaaagcaagtggtcttgtgttacatgagaatatgaagaagaaagatgataagagtgttgtccctatctgcagtagaattggttgcagttccagggttagttccactaagggagatttgattgatcataaagcaaaagctactgtgtcttcgtttcgatctcctttgagtggaaaggaaaccgttggtagttcatctcgaagtatgagtggatttggtggtacaaaaaaggcttccaaggttattggtaggagacaactctcttctcttttggacatggattcttcagagagcagcagtgttaatgaagactcacccacaagtgagcgttcccttcctcgtggaaagacaaaagaaagcactattagtgttcattctgaaagtagtgtctctggagaagttgtgacagaggcaggaagctcgagtagaggaactggtagaagcattcatcagagacctgatttggtctcccgagatgctcgtgtgagtaatagtgagcaaaatgcaagagctagtgtgaacaagaatggattaagagacttgaggaacaaatctggttctgatgttcttccatctaattcaactccgacaagaaaaagtaacatctttagaaagaaaacctctgatggtgagagcagctcttcgagtagagggaataagacggaaggatcagtggttgggggaaagaatattagttcccctcaggggaatggcatcaccatgtctgaacctaggaggaacagaaacttaccaagtgttagggacaacagtgttgtttcaagtagtactaggagatcaactggttattatggtagaacaggacgtgctggagcggttgcaacactacaagcacctcggcctccaacaagagctgatctcaatccttctagatcggcagaagcttcgcgtagtcctttaaatagttacagtaggccaatcagtagtaatggcaggttacgtagcctgatgatgcctggtagcccctcagaagccggcctttctcgctctttgatgaaccgtgatactttcagacggtataacatgaatggagttgcagaggtattgttggccctggaaaggattgagcaagacgaagagcttacatacgagcaattggctgttttagagaccaatctgttcttaaatggtatgagcagcttccacgatcagcatagagatatgaggcttgacattgacaacatgtcgtatgaggaactgttagcattagaggagaaaatgggtacagtgagcactgctctaagcgaagaagcgcttctgaaaagcctcaagtcaagtatttaccgtccaaacgatgaatccgacgacatttgcctgaacaaagatgatgatgtcaagtgcagcatttgccaggaagagtatgttgatggagatgaagtagggactttgccttgccaacataaataccacgtgagctgcgcgcaacaatggctacggatgaagaattggtgtcctatatgtaaaacctctgcagaatctcagccacatccattttcatga

SEQ ID NO: 79091 - protein, 520 aa, Arabidopsis thaliana; identical to SEQ ID NO: 77854
  peptide (1)..(520): Ceres Seq. ID no. 12648823
  misc_feature (468)..(508): Pfam Name: Zinc finger, C3HC4 type (RING finger) Pfam Description: Zinc finger, C3HC4 type (RING finger)
  misc_feature (1)..(520): Homolog of NCBI NO: 30689641 NR Description: RING finger-related protein [Arabidopsis thaliana]
  misc_feature (1)..(515): Homolog of NCBI NO: 22326712 NR Description: Pspzf zinc finger protein - like; protein id:
  misc_feature (1)..(515): Homolog of NCBI NO: 20466428 NR Description: Pspzf zinc finger protein-like [Arabidopsis
  misc_feature (27)..(515): Homolog of NCBI NO: 10129643 NR Description: Pspzf zinc finger protein-like [Arabidopsis
  misc_feature (98)..(514): Homolog of NCBI NO: 7486381 NR Description: hypothetical protein F3L17.20 - Arabidopsis >gi|5262756|emb|CAB45904.1| putative protein [Arabidopsis >gi|7270048|emb|CAB79863.1| putative protein [Arabidopsis
  misc_feature (98)..(514): Homolog of NCBI NO: 18417809 NR Description: putative protein; protein id: At4g31450.1, by cDNA: gi_15983461 [Arabidopsis thaliana] AT4g31450/F3L17_20 [Arabidopsis thaliana]
  misc_feature (145)..(514): Homolog of NCBI NO: 15235211 NR Description: putative protein; protein id: At4g34040.1
  misc_feature (310)..(516): Homolog of NCBI NO: 15226553 NR Description: putative RING zinc finger protein; protein id: [Arabidopsis thaliana] >gi|25411642|pir||B84530 probable RING
  misc_feature (183)..(511): Homolog of NCBI NO: 15239131 NR Description: putative protein; protein id: At5g42940.1, by cDNA: gi_18087615 [Arabidopsis thaliana] contains similarity to RING zinc finger protein~gene_id:MBD2.14
  misc_feature (207)..(512): Homolog of NCBI NO: 38344153 NR Description: OSJNBa0041A02.20 [Oryza sativa (japonica

SEQ ID NO: 79092 - protein, 507 aa, Arabidopsis thaliana; identical to SEQ ID NO: 77855
  peptide (1)..(507): Ceres Seq. ID no. 12648824
  misc_feature (455)..(495): Pfam Name: Zinc finger, C3HC4 type (RING finger) Pfam Description: Zinc finger, C3HC4 type (RING finger)
  misc_feature (1)..(507): Homolog of NCBI NO: 30689641 NR Description: RING finger-related protein [Arabidopsis thaliana]
  misc_feature (1)..(502): Homolog of NCBI NO: 22326712 NR Description: Pspzf zinc finger protein - like; protein id:
  misc_feature (1)..(502): Homolog of NCBI NO: 20466428 NR Description: Pspzf zinc finger protein-like [Arabidopsis
  misc_feature (14)..(502): Homolog of NCBI NO: 10129643 NR Description: Pspzf zinc finger protein-like [Arabidopsis
  misc_feature (85)..(501): Homolog of NCBI NO: 7486381 NR Description: hypothetical protein F3L17.20 - Arabidopsis >gi|5262756|emb|CAB45904.1| putative protein [Arabidopsis >gi|7270048|emb|CAB79863.1| putative protein [Arabidopsis
  misc_feature (85)..(501): Homolog of NCBI NO: 18417809 NR Description: putative protein; protein id: At4g31450.1, by cDNA: gi_15983461 [Arabidopsis thaliana] AT4g31450/F3L17_20 [Arabidopsis thaliana]
  misc_feature (132)..(501): Homolog of NCBI NO: 15235211 NR Description: putative protein; protein id: At4g34040.1
  misc_feature (297)..(503): Homolog of NCBI NO: 15226553 NR Description: putative RING zinc finger protein; protein id: [Arabidopsis thaliana] >gi|25411642|pir||B84530 probable RING
  misc_feature (170)..(498): Homolog of NCBI NO: 15239131 NR Description: putative protein; protein id: At5g42940.1, by cDNA: gi_18087615 [Arabidopsis thaliana] contains similarity to RING zinc finger protein~gene_id:MBD2.14
  misc_feature (194)..(499): Homolog of NCBI NO: 38344153 NR Description: OSJNBa0041A02.20 [Oryza sativa (japonica

SEQ ID NO: 79093 - protein, 494 aa, Arabidopsis thaliana; identical to SEQ ID NO: 77856
  peptide (1)..(494): Ceres Seq. ID no. 12648825
  misc_feature (442)..(482): Pfam Name: Zinc finger, C3HC4 type (RING finger) Pfam Description: Zinc finger, C3HC4 type (RING finger)
  misc_feature (1)..(494): Homolog of NCBI NO: 30689641 NR Description: RING finger-related protein [Arabidopsis thaliana]
  misc_feature (1)..(489): Homolog of NCBI NO: 22326712 NR Description: Pspzf zinc finger protein - like; protein id:
  misc_feature (1)..(489): Homolog of NCBI NO: 20466428 NR Description: Pspzf zinc finger protein-like [Arabidopsis
  misc_feature (1)..(489): Homolog of NCBI NO: 10129643 NR Description: Pspzf zinc finger protein-like [Arabidopsis
  misc_feature (72)..(488): Homolog of NCBI NO: 7486381 NR Description: hypothetical protein F3L17.20 - Arabidopsis >gi|5262756|emb|CAB45904.1| putative protein [Arabidopsis >gi|7270048|emb|CAB79863.1| putative protein [Arabidopsis
  misc_feature (72)..(488): Homolog of NCBI NO: 18417809 NR Description: putative protein; protein id: At4g31450.1, by cDNA: gi_15983461 [Arabidopsis thaliana] AT4g31450/F3L17_20 [Arabidopsis thaliana]
  misc_feature (119)..(488): Homolog of NCBI NO: 15235211 NR Description: putative protein; protein id: At4g34040.1
  misc_feature (284)..(490): Homolog of NCBI NO: 15226553 NR Description: putative RING zinc finger protein; protein id: [Arabidopsis thaliana] >gi|25411642|pir||B84530 probable RING
  misc_feature (157)..(485): Homolog of NCBI NO: 15239131 NR Description: putative protein; protein id: At5g42940.1, by cDNA: gi_18087615 [Arabidopsis thaliana] contains similarity to RING zinc finger protein~gene_id:MBD2.14
  misc_feature (181)..(486): Homolog of NCBI NO: 38344153 NR Description: OSJNBa0041A02.20 [Oryza sativa (japonica

SEQ ID NO: 79094 - DNA, 2157 bp, Arabidopsis thaliana
  misc_feature (1)..(2157): Ceres Seq. ID no. 12648838
  misc_feature: MA Experiment ID: 20000234 Result: Up-regulated in Transcription
  misc_feature: MA Experiment 20000234 PARAMETER Experiment Name: At_Siliques_P Parameter: Age (day) Value: 21
  misc_feature: MA Experiment 20000234 PARAMETER Experiment Name: At_Siliques_P Parameter: Organism Value: A. thaliana
  misc_feature: MA Experiment 20000234 PARAMETER Experiment Name: At_Siliques_P Parameter: Plant Line Value: WS
  misc_feature: MA Experiment 20000234 PARAMETER Experiment Name: At_Siliques_P Parameter: Tissue Value: Less Than 5mm Siliques vs. Whole Plant
  misc_feature: MA Experiment ID: 20000265 Result: Up-regulated in Transcription
  misc_feature: MA Experiment 20000265 PARAMETER Experiment Name: At_Open_Flower_P Parameter: Age (day) Value: 21
  misc_feature: MA Experiment 20000265 PARAMETER Experiment Name: At_Open_Flower_P Parameter: Plant Line Value: WS
  misc_feature: MA Experiment 20000265 PARAMETER Experiment Name: At_Open_Flower_P Parameter: Tissue Value: Closed Flower vs. Whole Plant
  misc_feature: MA Experiment ID: 20000286 Result: Up-regulated in Transcription
  misc_feature: MA Experiment 20000286 PARAMETER Experiment Name: At_Open_Flower_P Parameter: Age (day) Value: 21
  misc_feature: MA Experiment 20000286 PARAMETER Experiment Name: At_Open_Flower_P Parameter: Plant Line Value: WS
  misc_feature: MA Experiment 20000286 PARAMETER Experiment Name: At_Open_Flower_P Parameter: Tissue Value: Half Open vs. Whole Plant
  misc_feature: MA Experiment ID: 20000437 Result: Up-regulated in Transcription
  misc_feature: MA Experiment 20000437 PARAMETER Experiment Name: At_Drought_P Parameter: Age (day) Value: 8
  misc_feature: MA Experiment 20000437 PARAMETER Experiment Name: At_Drought_P Parameter: Organism Value: A. thaliana
  misc_feature: MA Experiment 20000437 PARAMETER Experiment Name: At_Drought_P Parameter: Plant Line Value: WS
  misc_feature: MA Experiment 20000437 PARAMETER Experiment Name: At_Drought_P Parameter: Timepoint (hr) Value: 24
  misc_feature: MA Experiment 20000437 PARAMETER Experiment Name: At_Drought_P Parameter: Tissue Value: Whole Plant
  misc_feature: MA Experiment 20000437 PARAMETER Experiment Name: At_Drought_P Parameter: Treatment Value: Drought vs. No Drought
atgccgttgttgcgctccgccatcaccgtcgtgtttcgctgctccggagaaattgaactttatgttgatgaggttgttgttgctatagttgtagcgttccgtgatgacaatactatttgtctgtctccaagcttgaagaataatgaactctcaagacagacaaattcatgggtttcaccattttgcttgcaacgcagagcgtattcgacgggtttcaccagcgtacatggtggaatacctacggcagagtatgcaaagttgcggagagaatcccttgaaactgaatttggacatgctctaggagcatatagctcgaaaagtttttctgcagtgtatcgttttggaccctttttggctttgtatagagctgcaatcatttcgtatcatgtggtgaagcttgccttttggcagctgtttgttcaggatatgaggaaacgggctgtcaagctgggacaggcactgagcacgagaccagacatattaccatctatatactgtcaggaactttcaaaattgcaggaccagattcctccatttccaactactgttgccatgcgatgtattgaagagcaactgggtgctccagtgtcaaaactttttgcagatattagtcttaaacctgttgctgctgcatccctgggtcaggtatacaaagctcatctgcattctggacaattggtagccgttaaggttcagagacctggaatgtcactcattctaacacgtgatgccctcttattcaaaatgattgggggacaactgaaacgatttgctaaagcccgtaaggatcttttggtagcggtgaatgagatggtcaggcatatgtttgacgaaatagattacgttctcgaggcaaaaaatgcagaacgatttgcctctctatacagttttgactcagggaatgagcagattgatgataacgctggacctaggaatatgtccaggaatcacagagcagagaacatcaaagtccctaaaatttactggaattttacacgcacagcagtgctcacaatggaatggatcgatggcataaaattaacagatgaaattaagctgaaaagggcttcccttgatagaagggacttgatcgatcagggcttatcctgttcattaaagcagcttcttgaggttggattctttcatgctgatccgcacccaggaaatcttgtggctactaaagaagggtctcttgtttactttgacttcggaatgatggggaatattccacgccattaccgtgtgggacttattcaaattctggtgcattttgtcaaccgtgattctctaagtttggcaaatgatttcctgtccttgggatttttgcctgaaggggttgatatacaagcagtttcaaatgctttgcgtacttcatttggttctactacgagaatatcacaagatttccagggggtgatggaacaattatatgatgttatgtacgagttcaacttttcgctgcctccagactatgctcttgttataagatctcttggttcactggaaggcacggctaagattcttgatccagagtttaaagtgattgagagtgcatatccatttgttatcgggaggctattagcagatccaagcccagatatgaggaaaatactaagggagcttgtcatttgtaatgatggatcaataaggtggaatcgtcttgaacgcctggtagcagcaatatcagaacaggcttctgcgacttcaggagactctccagaagataaaacgttgaagaaatcatcggaactgaaatcattcgacatgcattcagtagtttccgcaacagaagatctgctactgttcatattatccgagaaagggcagagagttcgggtcttccttcttcaagacataatcagagtggttgatattttcctggaagtagaggctcttgagctcaacaagaccatcaatcttaagacggaagaagggacaatgaaaagagtgagcaatggattcaaaggtctgagtgaggcggtgaagcttgcaccgggaatgtggatatcaatgcttcttcggatgtcaaggaagtctgaggttcatagttatgctttagatattgtttctgcattgtctacacattttggccacaaagtgcctcacacttgttggatccttctctccaaattgctccatcacaataagagccaataa

SEQ ID NO: 79095 - protein, 718 aa, Arabidopsis thaliana
  peptide (1)..(718): Ceres Seq. ID no. 12648839
  misc_feature (190)..(295): Pfam Name: ABC1 family Pfam Description: ABC1 family
  misc_feature (66)..(714): Homolog of NCBI NO: 34901462 NR Description: OSJNBa0040K22.7 [Oryza sativa (japonica
  misc_feature (66)..(714): Homolog of NCBI NO: 34394127 NR Description: putative ubiquinone biosynthesis protein ubiB
  misc_feature (302)..(565): Homolog of NCBI NO: 33867054 NR Description: possible protein kinase: ABC1 family sp. WH 8102] >gi|33639655|emb|CAE09039.1| possible protein
  misc_feature (137)..(295): Homolog of NCBI NO: 33867054 NR Description: possible protein kinase: ABC1 family sp. WH 8102] >gi|33639655|emb|CAE09039.1| possible protein
  misc_feature (316)..(681): Homolog of NCBI NO: 33241332 NR Description: Predicted protein kinase [Prochlorococcus marinus marinus str. CCMP1375] >gi|33238862|gb|AAQ00927.1| Predicted
  misc_feature (135)..(295): Homolog of NCBI NO: 33241332 NR Description: Predicted protein kinase [Prochlorococcus marinus marinus str. CCMP1375] >gi|33238862|gb|AAQ00927.1| Predicted
  misc_feature (320)..(565): Homolog of NCBI NO: 33864536 NR Description: possible protein kinase:ABC1 family marinus str. MIT 9313] >gi|33641316|emb|CAE22446.1| possible
  misc_feature (135)..(296): Homolog of NCBI NO: 33864536 NR Description: possible protein kinase:ABC1 family marinus str. MIT 9313] >gi|33641316|emb|CAE22446.1| possible
  misc_feature (320)..(558): Homolog of NCBI NO: 23042448 NR Description: hypothetical protein [Trichodesmium erythraeum
  misc_feature (132)..(295): Homolog of NCBI NO: 23042448 NR Description: hypothetical protein [Trichodesmium erythraeum
MPLLRSAITVVFRCSGEIELYVDEVVVAIVVAFRDDNTICLSPSLKNNELSRQTNSWVSPFCLQRRAYSTGFTSVHGGIPTAEYAKLRRESLETEFGHALGAYSSKSFSAVYRFGPFLALYRAAIISYHVVKLAFWQLFVQDMRKRAVKLGQALSTRPDILPSIYCQELSKLQDQIPPFPTTVAMRCIEEQLGAPVSKLFADISLKPVAAASLGQVYKAHLHSGQLVAVKVQRPGMSLILTRDALLFKMIGGQLKRFAKARKDLLVAVNEMVRHMFDEIDYVLEAKNAERFASLYSFDSGNEQIDDNAGPRNMSRNHRAENIKVPKIYWNFTRTAVLTMEWIDGIKLTDEIKLKRASLDRRDLIDQGLSCSLKQLLEVGFFHADPHPGNLVATKEGSLVYFDFGMMGNIPRHYRVGLIQILVHFVNRDSLSLANDFLSLGFLPEGVDIQAVSNALRTSFGSTTRISQDFQGVMEQLYDVMYEFNFSLPPDYALVIRSLGSLEGTAKILDPEFKVIESAYPFVIGRLLADPSPDMRKILRELVICNDGSIRWNRLERLVAAISEQASATSGDSPEDKTLKKSSELKSFDMHSVVSATEDLLLFILSEKGQRVRVFLLQDIIRVVDIFLEVEALELNKTINLKTEEGTMKRVSNGFKGLSEAVKLAPGMWISMLLRMSRKSEVHSYALDIVSALSTHFGHKVPHTCWILLSKLLHHNKSQ

SEQ ID NO: 79096 - protein, 576 aa, Arabidopsis thaliana
  peptide (1)..(576): Ceres Seq. ID no. 12648840
  misc_feature (48)..(153): Pfam Name: ABC1 family Pfam Description: ABC1 family
  misc_feature (1)..(572): Homolog of NCBI NO: 34901462 NR Description: OSJNBa0040K22.7 [Oryza sativa (japonica
  misc_feature (1)..(572): Homolog of NCBI NO: 34394127 NR Description: putative ubiquinone biosynthesis protein ubiB
  misc_feature (160)..(423): Homolog of NCBI NO: 33867054 NR Description: possible protein kinase: ABC1 family sp. WH 8102] >gi|33639655|emb|CAE09039.1| possible protein
  misc_feature (1)..(153): Homolog of NCBI NO: 33867054 NR Description: possible protein kinase: ABC1 family sp. WH 8102] >gi|33639655|emb|CAE09039.1| possible protein
  misc_feature (174)..(539): Homolog of NCBI NO: 33241332 NR Description: Predicted protein kinase [Prochlorococcus marinus marinus str. CCMP1375] >gi|33238862|gb|AAQ00927.1| Predicted
  misc_feature (1)..(153): Homolog of NCBI NO: 33241332 NR Description: Predicted protein kinase [Prochlorococcus marinus marinus str. CCMP1375] >gi|33238862|gb|AAQ00927.1| Predicted
  misc_feature (178)..(423): Homolog of NCBI NO: 33864536 NR Description: possible protein kinase:ABC1 family marinus str. MIT 9313] >gi|33641316|emb|CAE22446.1| possible
  misc_feature (1)..(154): Homolog of NCBI NO: 33864536 NR Description: possible protein kinase:ABC1 family marinus str. MIT 9313] >gi|33641316|emb|CAE22446.1| possible
  misc_feature (178)..(416): Homolog of NCBI NO: 23042448 NR Description: hypothetical protein [Trichodesmium erythraeum
  misc_feature (1)..(153): Homolog of NCBI NO: 23042448 NR Description: hypothetical protein [Trichodesmium erythraeum
MRKRAVKLGQALSTRPDILPSIYCQELSKLQDQIPPFPTTVAMRCIEEQLGAPVSKLFADISLKPVAAASLGQVYKAHLHSGQLVAVKVQRPGMSLILTRDALLFKMIGGQLKRFAKARKDLLVAVNEMVRHMFDEIDYVLEAKNAERFASLYSFDSGNEQIDDNAGPRNMSRNHRAENIKVPKIYWNFTRTAVLTMEWIDGIKLTDEIKLKRASLDRRDLIDQGLSCSLKQLLEVGFFHADPHPGNLVATKEGSLVYFDFGMMGNIPRHYRVGLIQILVHFVNRDSLSLANDFLSLGFLPEGVDIQAVSNALRTSFGSTTRISQDFQGVMEQLYDVMYEFNFSLPPDYALVIRSLGSLEGTAKILDPEFKVIESAYPFVIGRLLADPSPDMRKILRELVICNDGSIRWNRLERLVAAISEQASATSGDSPEDKTLKKSSELKSFDMHSVVSATEDLLLFILSEKGQRVRVFLLQDIIRVVDIFLEVEALELNKTINLKTEEGTMKRVSNGFKGLSEAVKLAPGMWISMLLRMSRKSEVHSYALDIVSALSTHFGHKVPHTCWILLSKLLHHNKSQ

SEQ ID NO: 79097 - protein, 534 aa, Arabidopsis thaliana; identical to SEQ ID NO: 74171
  peptide (1)..(534): Ceres Seq. ID no. 12648841
  misc_feature (6)..(111): Pfam Name: ABC1 family Pfam Description: ABC1 family
  misc_feature (1)..(530): Homolog of NCBI NO: 34901462 NR Description: OSJNBa0040K22.7 [Oryza sativa (japonica
  misc_feature (1)..(530): Homolog of NCBI NO: 34394127 NR Description: putative ubiquinone biosynthesis protein ubiB
  misc_feature (118)..(381): Homolog of NCBI NO: 33867054 NR Description: possible protein kinase: ABC1 family sp. WH 8102] >gi|33639655|emb|CAE09039.1| possible protein
  misc_feature (1)..(111): Homolog of NCBI NO: 33867054 NR Description: possible protein kinase: ABC1 family sp. WH 8102] >gi|33639655|emb|CAE09039.1| possible protein
  misc_feature (132)..(497): Homolog of NCBI NO: 33241332 NR Description: Predicted protein kinase [Prochlorococcus marinus marinus str. CCMP1375] >gi|33238862|gb|AAQ00927.1| Predicted
  misc_feature (1)..(111): Homolog of NCBI NO: 33241332 NR Description: Predicted protein kinase [Prochlorococcus marinus marinus str. CCMP1375] >gi|33238862|gb|AAQ00927.1| Predicted
  misc_feature (136)..(381): Homolog of NCBI NO: 33864536 NR Description: possible protein kinase:ABC1 family marinus str. MIT 9313] >gi|33641316|emb|CAE22446.1| possible
  misc_feature (1)..(112): Homolog of NCBI NO: 33864536 NR Description: possible protein kinase:ABC1 family marinus str. MIT 9313] >gi|33641316|emb|CAE22446.1| possible
  misc_feature (136)..(374): Homolog of NCBI NO: 23042448 NR Description: hypothetical protein [Trichodesmium erythraeum
  misc_feature (1)..(111): Homolog of NCBI NO: 23042448 NR Description: hypothetical protein [Trichodesmium erythraeum

SEQ ID NO: 79098 - DNA, 1380 bp, Arabidopsis thaliana
  misc_feature (1)..(1380): Ceres Seq. ID no. 12648871
  misc_feature: MA Experiment ID: 20000173 Result: Down-regulated in Transcription
  misc_feature: MA Experiment 20000173 PARAMETER Experiment Name: At_42deg_Heat_P Parameter: Age (day) Value: 14
  misc_feature: MA Experiment 20000173 PARAMETER Experiment Name: At_42deg_Heat_P Parameter: Organism Value: A. thaliana
  misc_feature: MA Experiment 20000173 PARAMETER Experiment Name: At_42deg_Heat_P Parameter: Plant Line Value: WS
  misc_feature: MA Experiment 20000173 PARAMETER Experiment Name: At_42deg_Heat_P Parameter: Temperature (deg C) Value: 42 vs. 22
  misc_feature: MA Experiment 20000173 PARAMETER Experiment Name: At_42deg_Heat_P Parameter: Timepoint (hr) Value: 6
  misc_feature: MA Experiment 20000173 PARAMETER Experiment Name: At_42deg_Heat_P Parameter: Tissue Value: Aerial
  misc_feature: MA Experiment ID: 20000182 Result: Down-regulated in Transcription
  misc_feature: MA Experiment 20000182 PARAMETER Experiment Name: At_2mM_SA_P Parameter: Age (day) Value: 14
  misc_feature: MA Experiment 20000182 PARAMETER Experiment Name: At_2mM_SA_P Parameter: Organism Value: A. thaliana
  misc_feature: MA Experiment 20000182 PARAMETER Experiment Name: At_2mM_SA_P Parameter: Plant Line Value: WS
  misc_feature: MA Experiment 20000182 PARAMETER Experiment Name: At_2mM_SA_P Parameter: Timepoint (hr) Value: 6
  misc_feature: MA Experiment 20000182 PARAMETER Experiment Name: At_2mM_SA_P Parameter: Tissue Value: Aerial
  misc_feature: MA Experiment 20000182 PARAMETER Experiment Name: At_2mM_SA_P Parameter: Treatment Value: 2mM SA vs. No Treatment
  misc_feature: MA Experiment ID: 20000184 Result: Down-regulated in Transcription
  misc_feature: MA Experiment 20000184 PARAMETER Experiment Name: At_Shoots__P Parameter: Age (day) Value: 7
  misc_feature: MA Experiment 20000184 PARAMETER Experiment Name: At_Shoots__P Parameter: Tissue Value: Shoots vs. Whole Plant
  misc_feature: MA Experiment ID: 20000185 Result: Down-regulated in Transcription
  misc_feature: MA Experiment 20000185 PARAMETER Experiment Name: At_Roots__P Parameter: Age (day) Value: 7 vs. 21
  misc_feature: MA Experiment 20000185 PARAMETER Experiment Name: At_Roots__P Parameter: Organism Value: A. thaliana
  misc_feature: MA Experiment 20000185 PARAMETER Experiment Name: At_Roots__P Parameter: Tissue Value: Roots vs. Whole Plant
  misc_feature: MA Experiment ID: 20000439 Result: Down-regulated in Transcription
  misc_feature: MA Experiment 20000439 PARAMETER Experiment Name: At_Roots__P Parameter: Age (day) Value: 14 vs. 21
  misc_feature: MA Experiment 20000439 PARAMETER Experiment Name: At_Roots__P Parameter: Organism Value: A. thaliana
  misc_feature: MA Experiment 20000439 PARAMETER Experiment Name: At_Roots__P Parameter: Tissue Value: Roots vs. Whole Plant
  misc_feature: MA Experiment ID: 20000527 Result: Up-regulated in Transcription
  misc_feature: MA Experiment 20000527 PARAMETER Experiment Name: At_10percent_PEG_P Parameter: Age (day) Value: 20
  misc_feature: MA Experiment 20000527 PARAMETER Experiment Name: At_10percent_PEG_P Parameter: Organism Value: A. thaliana
  misc_feature: MA Experiment 20000527 PARAMETER Experiment Name: At_10percent_PEG_P Parameter: Plant Line Value: WS
  misc_feature: MA Experiment 20000527 PARAMETER Experiment Name: At_10percent_PEG_P Parameter: Timepoint (day) Value: 20
  misc_feature: MA Experiment 20000527 PARAMETER Experiment Name: At_10percent_PEG_P Parameter: Tissue Value: Whole Plant
  misc_feature: MA Experiment 20000527 PARAMETER Experiment Name: At_10percent_PEG_P Parameter: Treatment Value: 10percent PEG vs. No Treatment
  misc_feature: MA Experiment ID: 20001248 Result: Up-regulated in Transcription
  misc_feature: MA Experiment 20001248 PARAMETER Experiment Name: At_Far-red-induction_P Parameter: Age (day) Value: 7
  misc_feature: MA Experiment 20001248 PARAMETER Experiment Name: At_Far-red-induction_P Parameter: Light Value: Far-red vs. White
  misc_feature: MA Experiment 20001248 PARAMETER Experiment Name: At_Far-red-induction_P Parameter: Organism Value: A. thaliana
  misc_feature: MA Experiment 20001248 PARAMETER Experiment Name: At_Far-red-induction_P Parameter: Plant Line Value: Columbia
  misc_feature: MA Experiment 20001248 PARAMETER Experiment Name: At_Far-red-induction_P Parameter: Timepoint (hr) Value: 4
  misc_feature: MA Experiment 20001248 PARAMETER Experiment Name: At_Far-red-induction_P Parameter: Tissue Value: Whole Plant
  misc_feature: MA Experiment ID: 20001450 Result: Up-regulated in Transcription
  misc_feature: MA Experiment 20001450 PARAMETER Experiment Name: At_Far-red-induction_P Parameter: Age (day) Value: 7
  misc_feature: MA Experiment 20001450 PARAMETER Experiment Name: At_Far-red-induction_P Parameter: Light Value: Far-red vs. White
  misc_feature: MA Experiment 20001450 PARAMETER Experiment Name: At_Far-red-induction_P Parameter: Organism Value: A. thaliana
  misc_feature: MA Experiment 20001450 PARAMETER Experiment Name: At_Far-red-induction_P Parameter: Plant Line Value: Columbia
  misc_feature: MA Experiment 20001450 PARAMETER Experiment Name: At_Far-red-induction_P Parameter: Timepoint (hr) Value: 8
  misc_feature: MA Experiment 20001450 PARAMETER Experiment Name: At_Far-red-induction_P Parameter: Tissue Value: Whole Plant
  misc_feature: MA Experiment ID: 20001451 Result: Up-regulated in Transcription
  misc_feature: MA Experiment 20001451 PARAMETER Experiment Name: At_Far-red-induction_P Parameter: Age (day) Value: 7
  misc_feature: MA Experiment 20001451 PARAMETER Experiment Name: At_Far-red-induction_P Parameter: Light Value: Far-red vs. White
  misc_feature: MA Experiment 20001451 PARAMETER Experiment Name: At_Far-red-induction_P Parameter: Organism Value: A. thaliana
  misc_feature: MA Experiment 20001451 PARAMETER Experiment Name: At_Far-red-induction_P Parameter: Plant Line Value: Columbia
  misc_feature: MA Experiment 20001451 PARAMETER Experiment Name: At_Far-red-induction_P Parameter: Timepoint (hr) Value: 24
  misc_feature: MA Experiment 20001451 PARAMETER Experiment Name: At_Far-red-induction_P Parameter: Tissue Value: Whole Plant
  misc_feature: MA Experiment ID: 20001557 Result: Down-regulated in Transcription
  misc_feature: MA Experiment 20001557 PARAMETER Experiment Name: At_Drought_Soil_Dry_P Parameter: Age (day) Value: 27
  misc_feature: MA Experiment 20001557 PARAMETER Experiment Name: At_Drought_Soil_Dry_P Parameter: Organism Value: A. thaliana
  misc_feature: MA Experiment 20001557 PARAMETER Experiment Name: At_Drought_Soil_Dry_P Parameter: Plant Line Value: WS
  misc_feature: MA Experiment 20001557 PARAMETER Experiment Name: At_Drought_Soil_Dry_P Parameter: Post Timepoint (hr) Value: 3
  misc_feature: MA Experiment 20001557 PARAMETER Experiment Name: At_Drought_Soil_Dry_P Parameter: Post-Treatment Value: Re-Water vs. No Drought
  misc_feature: MA Experiment 20001557 PARAMETER Experiment Name: At_Drought_Soil_Dry_P Parameter: Timepoint (day) Value: 13
  misc_feature: MA Experiment 20001557 PARAMETER Experiment Name: At_Drought_Soil_Dry_P Parameter: Treatment Value: Drought vs. No Drought
  misc_feature: MA Experiment ID: 20001558 Result: Down-regulated in Transcription
  misc_feature: MA Experiment 20001558 PARAMETER Experiment Name: At_Drought_Soil_Dry_P Parameter: Age (day) Value: 27
  misc_feature: MA Experiment 20001558 PARAMETER Experiment Name: At_Drought_Soil_Dry_P Parameter: Organism Value: A. thaliana
  misc_feature: MA Experiment 20001558 PARAMETER Experiment Name: At_Drought_Soil_Dry_P Parameter: Plant Line Value: WS
  misc_feature: MA Experiment 20001558 PARAMETER Experiment Name: At_Drought_Soil_Dry_P Parameter: Post Timepoint (hr) Value: 6
  misc_feature: MA Experiment 20001558 PARAMETER Experiment Name: At_Drought_Soil_Dry_P Parameter: Post-Treatment Value: Re-Water vs. No Drought
  misc_feature: MA Experiment 20001558 PARAMETER Experiment Name: At_Drought_Soil_Dry_P Parameter: Timepoint (day) Value: 13
  misc_feature: MA Experiment 20001558 PARAMETER Experiment Name: At_Drought_Soil_Dry_P Parameter: Treatment Value: Drought vs. No Drought
  misc_feature: MA Experiment ID: 20001560 Result: Down-regulated in Transcription
  misc_feature: MA Experiment 20001560 PARAMETER Experiment Name: At_Drought_Soil_Dry_P Parameter: Age (day) Value: 28
  misc_feature: MA Experiment 20001560 PARAMETER Experiment Name: At_Drought_Soil_Dry_P Parameter: Organism Value: A. thaliana
  misc_feature: MA Experiment 20001560 PARAMETER Experiment Name: At_Drought_Soil_Dry_P Parameter: Plant Line Value: WS
  misc_feature: MA Experiment 20001560 PARAMETER Experiment Name: At_Drought_Soil_Dry_P Parameter: Post Timepoint (hr) Value: None
  misc_feature: MA Experiment 20001560 PARAMETER Experiment Name: At_Drought_Soil_Dry_P Parameter: Post-Treatment Value: None
  misc_feature: MA Experiment 20001560 PARAMETER Experiment Name: At_Drought_Soil_Dry_P Parameter: Timepoint (day) Value: 14
  misc_feature: MA Experiment 20001560 PARAMETER Experiment Name: At_Drought_Soil_Dry_P Parameter: Treatment Value: Drought vs. No Drought
  misc_feature: MA Experiment ID: 20001905 Result: Down-regulated in Transcription
  misc_feature: MA Experiment 20001905 PARAMETER Experiment Name: At_Drought_Reproduction_P Parameter: Age (day) Value: 40
  misc_feature: MA Experiment 20001905 PARAMETER Experiment Name: At_Drought_Reproduction_P Parameter: Organism Value: A. thaliana
  misc_feature: MA Experiment 20001905 PARAMETER Experiment Name: At_Drought_Reproduction_P Parameter: Plant Line Value: WS
  misc_feature: MA Experiment 20001905 PARAMETER Experiment Name: At_Drought_Reproduction_P Parameter: Timepoint (day) Value: 10
  misc_feature: MA Experiment 20001905 PARAMETER Experiment Name: At_Drought_Reproduction_P Parameter: Tissue Value: Rosettes
  misc_feature: MA Experiment 20001905 PARAMETER Experiment Name: At_Drought_Reproduction_P Parameter: Treatment Value: Drought vs. No Drought
  misc_feature: MA Experiment ID: 20001906 Result: Down-regulated in Transcription
  misc_feature: MA Experiment 20001906 PARAMETER Experiment Name: At_Drought_Reproduction_P Parameter: Age (day) Value: 35
  misc_feature: MA Experiment 20001906 PARAMETER Experiment Name: At_Drought_Reproduction_P Parameter: Organism Value: A. thaliana
  misc_feature: MA Experiment 20001906 PARAMETER Experiment Name: At_Drought_Reproduction_P Parameter: Plant Line Value: WS
  misc_feature: MA Experiment 20001906 PARAMETER Experiment Name: At_Drought_Reproduction_P Parameter: Timepoint (day) Value: 5
  misc_feature: MA Experiment 20001906 PARAMETER Experiment Name: At_Drought_Reproduction_P Parameter: Tissue Value: Siliques
  misc_feature: MA Experiment 20001906 PARAMETER Experiment Name: At_Drought_Reproduction_P Parameter: Treatment Value: Drought vs. No Drought
  misc_feature: MA Experiment ID: 20001908 Result: Down-regulated in Transcription
  misc_feature: MA Experiment 20001908 PARAMETER Experiment Name: At_Drought_Reproduction_P Parameter: Age (day) Value: 40
  misc_feature: MA Experiment 20001908 PARAMETER Experiment Name: At_Drought_Reproduction_P Parameter: Organism Value: A. thaliana
  misc_feature: MA Experiment 20001908 PARAMETER Experiment Name: At_Drought_Reproduction_P Parameter: Plant Line Value: WS
  misc_feature: MA Experiment 20001908 PARAMETER Experiment Name: At_Drought_Reproduction_P Parameter: Timepoint (day) Value: 10
  misc_feature: MA Experiment 20001908 PARAMETER Experiment Name: At_Drought_Reproduction_P Parameter: Tissue Value: Siliques
  misc_feature: MA Experiment 20001908 PARAMETER Experiment Name: At_Drought_Reproduction_P Parameter: Treatment Value: Drought vs. No Drought
atgagcttgacactagagtttctgcttcttctgattgtacttatcttgagtcaccatgctcattctggctctattgtcaaattccttcctggttttgaaggcccccttccttttgaactcgaaaccgggtacattggtattggtgaggaagaggaagtgcaattattctactatttcatcaaatctgagaagaatccagaagaagaccctcttcttctatggttaagtggaggacctggatgttcctctcttactggccttctttttgagaatggaccggtggctttgaagttcgaggtttacaatggaagtgttccatctttggtctctactacatattcatggacaaagatggcgaacataatattcttggatcagccagttggatctggcttctcctattcaagaactccacttgttgataaaattagtgacactggtgaagttaagaggatttatgagtttcttcaaaagtggttaagcaaacatcaacaatttttttccaaccctttttacgttggtggagattcttattcaggtatgattgttccacccctagttcaagaaatcggaaaaggaaattatcaaataaatctacagggttatatcctcggaaacccgataacagatactgaatctgaacaaaactatcagattccatatgctcatggaatggcattaatctctgatgaactatacaagtcaatggagagaatctgcaaaggaaattatgtgaaagtggattcacttaacacaaaatgctataaactaatcaaagattatcaaaagtgtattcataaactgaataagtatcatatattattacctgactgcgatataacatctcctgattgctttttatataggtatactctcataaccttttgggccaacaacaagagcgttcgcgaagctctgcaagtcaataagggaagtataggaaaatgggtacaatgtaactataaaaatatttcctacaattacgatatcaagagcagcgtcgcataccatatgaagaatagtattgatggctaccgatctcttatctacaatggtgaccatgatatgatggtgcctttccttgcaactcaagcctggataagatctctcaattattccatcactgatgattggaagccttggatgataaacgatcaaattgctggatacacgagaagttattccaataagatgacatttgctactatcaaaggaagtggacacacagcagagtataaaccaaaagagacctctatcatgttcaaaagatggatcagtgcccagcctttgtaaaagaggatgatggtctttgcgtatgtagaataaaactatgtaacataaaaaatgtttgtatacaatataatcatctacttggtaatt

SEQ ID NO: 79099 - protein, 430 aa, Arabidopsis thaliana
  peptide (1)..(430): Ceres Seq. ID no. 12648872
  misc_feature (30)..(427): Pfam Name: Serine carboxypeptidase Pfam Description: Serine carboxypeptidase
  misc_feature (1)..(430): Homolog of NCBI NO: 25289782 NR Description: probable serine carboxypeptidase I [imported] - thaliana >gi|3169172|gb|AAC17815.1| putative serine I [Arabidopsis thaliana] >gi|20197276|gb|AAM15008.1| putative
  misc_feature (1)..(406): Homolog of NCBI NO: 24417488 NR Description: unknown [Arabidopsis thaliana]
  misc_feature (1)..(430): Homolog of NCBI NO: 15227769 NR Description: putative serine carboxypeptidase II; protein id:
  misc_feature (8)..(430): Homolog of NCBI NO: 15227765 NR Description: putative serine carboxypeptidase I; protein id: [Arabidopsis thaliana] >gi|25289780|pir||E84618 probable serine
  misc_feature (8)..(430): Homolog of NCBI NO: 15228300 NR Description: putative glucose acyltransferase; protein id: [Arabidopsis thaliana] >gi|8567775|gb|AAF76347.1| glucose putative [Arabidopsis thaliana]
  misc_feature (1)..(430): Homolog of NCBI NO: 15227773 NR Description: putative serine carboxypeptidase I; protein id: [Arabidopsis thaliana] >gi|25289775|pir||E84619 probable serine
  misc_feature (1)..(430): Homolog of NCBI NO: 15227772 NR Description: putative serine carboxypeptidase I; protein id: supported by cDNA: 33165. [Arabidopsis thaliana]
  misc_feature (1)..(430): Homolog of NCBI NO: 30681900 NR Description: serine carboxypeptidase -related [Arabidopsis
  misc_feature (1)..(430): Homolog of NCBI NO: 18400137 NR Description: putative serine carboxypeptidase I; protein id: [Arabidopsis thaliana] >gi|20197128|gb|AAC17816.2| putative carboxypeptidase I [Arabidopsis thaliana]
  misc_feature (5)..(430): Homolog of NCBI NO: 15219429 NR Description: putative serine carboxypeptidase; protein id: [Arabidopsis thaliana] >gi|25289788|pir||A96759 protein serine
MSLTLEFLLLLIVLILSHHAHSGSIVKFLPGFEGPLPFELETGYIGIGEEEEVQLFYYFIKSEKNPEEDPLLLWLSGGPGCSSLTGLLFENGPVALKFEVYNGSVPSLVSTTYSWTKMANIIFLDQPVGSGFSYSRTPLVDKISDTGEVKRIYEFLQKWLSKHQQFFSNPFYVGGDSYSGMIVPPLVQEIGKGNYQINLQGYILGNPITDTESEQNYQIPYAHGMALISDELYKSMERICKGNYVKVDSLNTKCYKLIKDYQKCIHKLNKYHILLPDCDITSPDCFLYRYTLITFWANNKSVREALQVNKGSIGKWVQCNYKNISYNYDIKSSVAYHMKNSIDGYRSLIYNGDHDMMVPFLATQAWIRSLNYSITDDWKPWMINDQIAGYTRSYSNKMTFATIKGSGHTAEYKPKETSIMFKRWISAQPL

SEQ ID NO: 79100 - protein, 313 aa, Arabidopsis thaliana; identical to SEQ ID NO: 72663
  peptide (1)..(313): Ceres Seq. ID no. 12648873
  misc_feature (1)..(310): Pfam Name: Serine carboxypeptidase Pfam Description: Serine carboxypeptidase
  misc_feature (1)..(313): Homolog of NCBI NO: 25289782 NR Description: probable serine carboxypeptidase I [imported] - thaliana >gi|3169172|gb|AAC17815.1| putative serine I [Arabidopsis thaliana] >gi|20197276|gb|AAM15008.1| putative
  misc_feature (1)..(289): Homolog of NCBI NO: 24417488 NR Description: unknown [Arabidopsis thaliana]
  misc_feature (1)..(313): Homolog of NCBI NO: 15227769 NR Description: putative serine carboxypeptidase II; protein id:
  misc_feature (1)..(313): Homolog of NCBI NO: 15227765 NR Description: putative serine carboxypeptidase I; protein id: [Arabidopsis thaliana] >gi|25289780|pir||E84618 probable serine
  misc_feature (1)..(313): Homolog of NCBI NO: 15228300 NR Description: putative glucose acyltransferase; protein id: [Arabidopsis thaliana] >gi|8567775|gb|AAF76347.1| glucose putative [Arabidopsis thaliana]
  misc_feature (1)..(313): Homolog of NCBI NO: 15227773 NR Description: putative serine carboxypeptidase I; protein id: [Arabidopsis thaliana] >gi|25289775|pir||E84619 probable serine
  misc_feature (1)..(313): Homolog of NCBI NO: 15227772 NR Description: putative serine carboxypeptidase I; protein id: supported by cDNA: 33165. [Arabidopsis thaliana]
  misc_feature (1)..(313): Homolog of NCBI NO: 30681900 NR Description: serine carboxypeptidase -related [Arabidopsis
  misc_feature (1)..(313): Homolog of NCBI NO: 18400137 NR Description: putative serine carboxypeptidase I; protein id: [Arabidopsis thaliana] >gi|20197128|gb|AAC17816.2| putative carboxypeptidase I [Arabidopsis thaliana]
  misc_feature (1)..(313): Homolog of NCBI NO: 15219429 NR Description: putative serine carboxypeptidase; protein id: [Arabidopsis thaliana] >gi|25289788|pir||A96759 protein serine

SEQ ID NO: 79101 - protein, 250 aa, Arabidopsis thaliana; identical to SEQ ID NO: 29009
  peptide (1)..(250): Ceres Seq. ID no. 12648874
  misc_feature (1)..(247): Pfam Name: Serine carboxypeptidase Pfam Description: Serine carboxypeptidase
  misc_feature (1)..(250): Homolog of NCBI NO: 25289782 NR Description: probable serine carboxypeptidase I [imported] - thaliana >gi|3169172|gb|AAC17815.1| putative serine I [Arabidopsis thaliana] >gi|20197276|gb|AAM15008.1| putative
  misc_feature (1)..(226): Homolog of NCBI NO: 24417488 NR Description: unknown [Arabidopsis thaliana]
  misc_feature (1)..(250): Homolog of NCBI NO: 15227769 NR Description: putative serine carboxypeptidase II; protein id:
  misc_feature (1)..(250): Homolog of NCBI NO: 15227765 NR Description: putative serine carboxypeptidase I; protein id: [Arabidopsis thaliana] >gi|25289780|pir||E84618 probable serine
  misc_feature (1)..(250): Homolog of NCBI NO: 15228300 NR Description: putative glucose acyltransferase; protein id: [Arabidopsis thaliana] >gi|8567775|gb|AAF76347.1| glucose putative [Arabidopsis thaliana]
  misc_feature (1)..(250): Homolog of NCBI NO: 15227773 NR Description: putative serine carboxypeptidase I; protein id: [Arabidopsis thaliana] >gi|25289775|pir||E84619 probable serine
  misc_feature (1)..(250): Homolog of NCBI NO: 15227772 NR Description: putative serine carboxypeptidase I; protein id: supported by cDNA: 33165. [Arabidopsis thaliana]
  misc_feature (1)..(250): Homolog of NCBI NO: 30681900 NR Description: serine carboxypeptidase -related [Arabidopsis
  misc_feature (1)..(250): Homolog of NCBI NO: 18400137 NR Description: putative serine carboxypeptidase I; protein id: [Arabidopsis thaliana] >gi|20197128|gb|AAC17816.2| putative carboxypeptidase I [Arabidopsis thaliana]
  misc_feature (1)..(250): Homolog of NCBI NO: 15219429 NR Description: putative serine carboxypeptidase; protein id: [Arabidopsis thaliana] >gi|25289788|pir||A96759 protein serine

SEQ ID NO: 79102 - DNA, 1303 bp, Arabidopsis thaliana
  misc_feature (1)..(1303): Ceres Seq. ID no. 12648902
  misc_feature: MA Experiment ID: 108577 Result: Down-regulated in Transcription
  misc_feature: MA Experiment 108577 PARAMETER Experiment Name: At_42deg_Heat_cDNA_P Parameter: Temperature (deg C) Value: 42 vs. 22
  misc_feature: MA Experiment 108577 PARAMETER Experiment Name: At_42deg_Heat_cDNA_P Parameter: Timepoint (hr) Value: 6
  misc_feature: MA Experiment 108577 PARAMETER Experiment Name: At_42deg_Heat_cDNA_P Parameter: Tissue Value: Aerial
  misc_feature: MA Experiment ID: 20000173 Result: Down-regulated in Transcription
  misc_feature: MA Experiment 20000173 PARAMETER Experiment Name: At_42deg_Heat_P Parameter: Age (day) Value: 14
  misc_feature: MA Experiment 20000173 PARAMETER Experiment Name: At_42deg_Heat_P Parameter: Organism Value: A. thaliana
  misc_feature: MA Experiment 20000173 PARAMETER Experiment Name: At_42deg_Heat_P Parameter: Plant Line Value: WS
  misc_feature: MA Experiment 20000173 PARAMETER Experiment Name: At_42deg_Heat_P Parameter: Temperature (deg C) Value: 42 vs. 22
  misc_feature: MA Experiment 20000173 PARAMETER Experiment Name: At_42deg_Heat_P Parameter: Timepoint (hr) Value: 6
  misc_feature: MA Experiment 20000173 PARAMETER Experiment Name: At_42deg_Heat_P Parameter: Tissue Value: Aerial
  misc_feature: MA Experiment ID: 20000184 Result: Down-regulated in Transcription
  misc_feature: MA Experiment 20000184 PARAMETER Experiment Name: At_Shoots__P Parameter: Age (day) Value: 7
  misc_feature: MA Experiment 20000184 PARAMETER Experiment Name: At_Shoots__P Parameter: Tissue Value: Shoots vs. Whole Plant
acaacgcacttcttctgttgtcatcatcatcgtccacttgaaacaaacctgacgatcaaagagaagattgcgatcgcaaatttctccattttttcagatcgaaattgatgtcgaaagctagggtttatacagatgttaacgttgttcgtcctaaagagtattgggactacgagtctctcgttgttcaatggggtcatcaagatgattatgaggttgtgagaaaagttggtagaggaaaatacagtgaagttttcgaaggcaaaaacgtcaatacgaatgagcgttgcgttatcaagatcctcaaacccgtaaaaaagaagaagataaagagagagatcaaaatacttcagaacctatgtggtggaccaaatattgttaagctgtatgatattgttagagatgagcactccaaaacacctagcttggtatttgagtttgtcaacagtgtggactttaaagtattgtatccaacattgactgattacgatatccggtactatatttatgagcttctgaaggcattggatttctgtcactctcaaggaataatgcatagggatgttaagcctcataatgtcatgatagatcatcagctgcgtaaacttcgtctgatagattggggccttgctgagttttaccatcccggaaaagagtataatgttcgcgtggcctcgagatacttcaagggtcccgagcttttagttgatctacaggattatgactattctttagacatgtggagtcttggttgcatgtttgctggcatgatattccgtaaggaaccgttcttttatggccatgataatcatgatcaacttgtcaaaattgccaaggtgttgggaaccaatgagttagatcattacctaaacaaatatcagctagatcttgaccctcaactggaagcacttgttggaagacatgtccccaaaccatggtccaagtttatcaacgcggacaaccaacatttggtctcacctgaggcaattgattttctcgataagcttcttcagtatgatcatcaagacagattaaccgcaagagaagccatggatcatccatacttcgctcaagttaaagccgcagagagcagcagactacgaactcagtaaaaccgaagcttgattgatgatgcttactactatttttcaaccaaaaactttgtaatgattttgttgtatcaaaattgtggtaatctttactttcatagaaacataatcaacagcgaaaagaagccaacttatattaaaaaaaaaggttccacacaaagcttcattatataatcatagcaagagacttattgttg

SEQ ID NO: 79103 - protein, 333 aa, Arabidopsis thaliana; identical to SEQ ID NO: 24313
  peptide (1)..(333): Ceres Seq. ID no. 12648903
  misc_feature (34)..(319): Pfam Name: Protein kinase domain Pfam Description: Protein kinase domain
  misc_feature (1)..(333): Homolog of NCBI NO: 15227779 NR Description: putative casein kinase II catalytic (alpha) protein id: At2g23080.1, supported by cDNA: 38084., supported by
  misc_feature (1)..(333): Homolog of NCBI NO: 21593324 NR Description: putative casein kinase II catalytic (alpha)
  misc_feature (1)..(333): Homolog of NCBI NO: 23397331 NR Description: putative casein kinase II, alpha chain 2 CK II
  misc_feature (1)..(333): Homolog of NCBI NO: 17977973 NR Description: protein kinase 2 [Beta vulgaris]
  misc_feature (1)..(333): Homolog of NCBI NO: 34915304 NR Description: casein kinase II alpha subunit [Oryza sativa
  misc_feature (1)..(333): Homolog of NCBI NO: 14150749 NR Description: CK2 alpha subunit [Nicotiana tabacum]
  misc_feature (1)..(333): Homolog of NCBI NO: 419753 NR Description: casein kinase II (EC 2.7.1.-) alpha-type chain
  misc_feature (1)..(333): Homolog of NCBI NO: 15227778 NR Description: putative casein kinase II catalytic (alpha) protein id: At2g23070.1, supported by cDNA: gi_17065109, by cDNA: gi_20148298 [Arabidopsis thaliana]
  misc_feature (1)..(329): Homolog of NCBI NO: 17977868 NR Description: casein kinase II alpha subunit [Sinapis alba]
  misc_feature (2)..(322): Homolog of NCBI NO: 4503095 NR Description: casein kinase 2, alpha 1 polypeptide [Homo >gi|27807151|ref|NP_777060.1| casein kinase II alpha 1 subunit taurus] >gi|125257|sp|P19138|KC21_HUMAN Casein kinase II, alpha

SEQ ID NO: 79104 - protein, 186 aa, Arabidopsis thaliana; identical to SEQ ID NO: 24314
  peptide (1)..(186): Ceres Seq. ID no. 12648904
  misc_feature (1)..(172): Pfam Name: Protein kinase domain Pfam Description: Protein kinase domain
  misc_feature (1)..(186): Homolog of NCBI NO: 15227779 NR Description: putative casein kinase II catalytic (alpha) protein id: At2g23080.1, supported by cDNA: 38084., supported by
  misc_feature (1)..(186): Homolog of NCBI NO: 21593324 NR Description: putative casein kinase II catalytic (alpha)
  misc_feature (1)..(186): Homolog of NCBI NO: 23397331 NR Description: putative casein kinase II, alpha chain 2 CK II
  misc_feature (1)..(186): Homolog of NCBI NO: 17977973 NR Description: protein kinase 2 [Beta vulgaris]
  misc_feature (1)..(186): Homolog of NCBI NO: 34915304 NR Description: casein kinase II alpha subunit [Oryza sativa
  misc_feature (1)..(186): Homolog of NCBI NO: 14150749 NR Description: CK2 alpha subunit [Nicotiana tabacum]
  misc_feature (1)..(186): Homolog of NCBI NO: 419753 NR Description: casein kinase II (EC 2.7.1.-) alpha-type chain
  misc_feature (1)..(186): Homolog of NCBI NO: 15227778 NR Description: putative casein kinase II catalytic (alpha) protein id: At2g23070.1, supported by cDNA: gi_17065109, by cDNA: gi_20148298 [Arabidopsis thaliana]
  misc_feature (1)..(182): Homolog of NCBI NO: 17977868 NR Description: casein kinase II alpha subunit [Sinapis alba]
  misc_feature (1)..(175): Homolog of NCBI NO: 4503095 NR Description: casein kinase 2, alpha 1 polypeptide [Homo >gi|27807151|ref|NP_777060.1| casein kinase II alpha 1 subunit taurus] >gi|125257|sp|P19138|KC21_HUMAN Casein kinase II, alpha

SEQ ID NO: 79105 - protein, 176 aa, Arabidopsis thaliana; identical to SEQ ID NO: 24315
  peptide (1)..(176): Ceres Seq. ID no. 12648905
  misc_feature (1)..(162): Pfam Name: Protein kinase domain Pfam Description: Protein kinase domain
  misc_feature (1)..(176): Homolog of NCBI NO: 15227779 NR Description: putative casein kinase II catalytic (alpha) protein id: At2g23080.1, supported by cDNA: 38084., supported by
  misc_feature (1)..(176): Homolog of NCBI NO: 21593324 NR Description: putative casein kinase II catalytic (alpha)
  misc_feature (1)..(176): Homolog of NCBI NO: 23397331 NR Description: putative casein kinase II, alpha chain 2 CK II
  misc_feature (1)..(176): Homolog of NCBI NO: 17977973 NR Description: protein kinase 2 [Beta vulgaris]
  misc_feature (1)..(176): Homolog of NCBI NO: 34915304 NR Description: casein kinase II alpha subunit [Oryza sativa
  misc_feature (1)..(176): Homolog of NCBI NO: 14150749 NR Description: CK2 alpha subunit [Nicotiana tabacum]
  misc_feature (1)..(176): Homolog of NCBI NO: 419753 NR Description: casein kinase II (EC 2.7.1.-) alpha-type chain
  misc_feature (1)..(176): Homolog of NCBI NO: 15227778 NR Description: putative casein kinase II catalytic (alpha) protein id: At2g23070.1, supported by cDNA: gi_17065109, by cDNA: gi_20148298 [Arabidopsis thaliana]
  misc_feature (1)..(172): Homolog of NCBI NO: 17977868 NR Description: casein kinase II alpha subunit [Sinapis alba]
  misc_feature (1)..(165): Homolog of NCBI NO: 4503095 NR Description: casein kinase 2, alpha 1 polypeptide [Homo >gi|27807151|ref|NP_777060.1| casein kinase II alpha 1 subunit taurus] >gi|125257|sp|P19138|KC21_HUMAN Casein kinase II, alpha

SEQ ID NO: 79106 - DNA, 984 bp, Arabidopsis thaliana
  misc_feature (1)..(984): Ceres Seq. ID no. 12648934
  misc_feature: MA Experiment ID: 108569 Result: Down-regulated in Transcription
  misc_feature: MA Experiment 108569 PARAMETER Experiment Name: At_0.001%_MeJA__cDNA_P Parameter: Timepoint (hr) Value: 6
  misc_feature: MA Experiment 108569 PARAMETER Experiment Name: At_0.001%_MeJA__cDNA_P Parameter: Tissue Value: Aerial
  misc_feature: MA Experiment 108569 PARAMETER Experiment Name: At_0.001%_MeJA__cDNA_P Parameter: Treatment Value: 0.001% MeJA vs. No Treatment
  misc_feature: MA Experiment ID: 108595 Result: Up-regulated in Transcription
  misc_feature: MA Experiment 108595 PARAMETER Experiment Name: At_Ler-pi_Ovule_cDNA_P Parameter: Plant Line Value: null
  misc_feature: MA Experiment ID: 20000184 Result: Down-regulated in Transcription
  misc_feature: MA Experiment 20000184 PARAMETER Experiment Name: At_Shoots__P Parameter: Age (day) Value: 7
  misc_feature: MA Experiment 20000184 PARAMETER Experiment Name: At_Shoots__P Parameter: Tissue Value: Shoots vs. Whole Plant
  misc_feature: MA Experiment ID: 20000227 Result: Down-regulated in Transcription
  misc_feature: MA Experiment 20000227 PARAMETER Experiment Name: At_Root-Tips-vs-Tops_P Parameter: Tissue Value: Root Tips vs. Root Tops
  misc_feature: MA Experiment ID: 20000234 Result: Down-regulated in Transcription
  misc_feature: MA Experiment 20000234 PARAMETER Experiment Name: At_Siliques_P Parameter: Age (day) Value: 21
  misc_feature: MA Experiment 20000234 PARAMETER Experiment Name: At_Siliques_P Parameter: Organism Value: A. thaliana
  misc_feature: MA Experiment 20000234 PARAMETER Experiment Name: At_Siliques_P Parameter: Plant Line Value: WS
  misc_feature: MA Experiment 20000234 PARAMETER Experiment Name: At_Siliques_P Parameter: Tissue Value: Less Than 5mm Siliques vs. Whole Plant
  misc_feature: MA Experiment ID: 20000235 Result: Down-regulated in Transcription
  misc_feature: MA Experiment 20000235 PARAMETER Experiment Name: At_Siliques_P Parameter: Age (day) Value: 21
  misc_feature: MA Experiment 20000235 PARAMETER Experiment Name: At_Siliques_P Parameter: Organism Value: A. thaliana
  misc_feature: MA Experiment 20000235 PARAMETER Experiment Name: At_Siliques_P Parameter: Plant Line Value: WS
  misc_feature: MA Experiment 20000235 PARAMETER Experiment Name: At_Siliques_P Parameter: Tissue Value: 5-10mm Siliques vs. Whole Plant
  misc_feature: MA Experiment ID: 20000264 Result: Down-regulated in Transcription
  misc_feature: MA Experiment 20000264 PARAMETER Experiment Name: At_Open_Flower_P Parameter: Age (day) Value: 21
  misc_feature: MA Experiment 20000264 PARAMETER Experiment Name: At_Open_Flower_P Parameter: Plant Line Value: WS
  misc_feature: MA Experiment 20000264 PARAMETER Experiment Name: At_Open_Flower_P Parameter: Tissue Value: Open Flower vs. Whole Plant
  misc_feature: MA Experiment ID: 20000265 Result: Down-regulated in Transcription
  misc_feature: MA Experiment 20000265 PARAMETER Experiment Name: At_Open_Flower_P Parameter: Age (day) Value: 21
  misc_feature: MA Experiment 20000265 PARAMETER Experiment Name: At_Open_Flower_P Parameter: Plant Line Value: WS
  misc_feature: MA Experiment 20000265 PARAMETER Experiment Name: At_Open_Flower_P Parameter: Tissue Value: Closed Flower vs. Whole Plant
  misc_feature: MA Experiment ID: 20000286 Result: Down-regulated in Transcription
  misc_feature: MA Experiment 20000286 PARAMETER Experiment Name: At_Open_Flower_P Parameter: Age (day) Value: 21
  misc_feature: MA Experiment 20000286 PARAMETER Experiment Name: At_Open_Flower_P Parameter: Plant Line Value: WS
  misc_feature: MA Experiment 20000286 PARAMETER Experiment Name: At_Open_Flower_P Parameter: Tissue Value: Half Open vs. Whole Plant
  misc_feature: MA Experiment ID: 20000437 Result: Up-regulated in Transcription
  misc_feature: MA Experiment 20000437 PARAMETER Experiment Name: At_Drought_P Parameter: Age (day) Value: 8
  misc_feature: MA Experiment 20000437 PARAMETER Experiment Name: At_Drought_P Parameter: Organism Value: A. thaliana
  misc_feature: MA Experiment 20000437 PARAMETER Experiment Name: At_Drought_P Parameter: Plant Line Value: WS
  misc_feature: MA Experiment 20000437 PARAMETER Experiment Name: At_Drought_P Parameter: Timepoint (hr) Value: 24
  misc_feature: MA Experiment 20000437 PARAMETER Experiment Name: At_Drought_P Parameter: Tissue Value: Whole Plant
  misc_feature: MA Experiment 20000437 PARAMETER Experiment Name: At_Drought_P Parameter: Treatment Value: Drought vs. No Drought
  misc_feature: MA Experiment ID: 20000438 Result: Down-regulated in Transcription
  misc_feature: MA Experiment 20000438 PARAMETER Experiment Name: At_Shoots__P Parameter: Age (day) Value: 14
  misc_feature: MA Experiment 20000438 PARAMETER Experiment Name: At_Shoots__P Parameter: Tissue Value: Shoots vs. Whole Plant
  misc_feature: MA Experiment ID: 20001248 Result: Up-regulated in Transcription
  misc_feature: MA Experiment 20001248 PARAMETER Experiment Name: At_Far-red-induction_P Parameter: Age (day) Value: 7
  misc_feature: MA Experiment 20001248 PARAMETER Experiment Name: At_Far-red-induction_P Parameter: Light Value: Far-red vs. White
  misc_feature: MA Experiment 20001248 PARAMETER Experiment Name: At_Far-red-induction_P Parameter: Organism Value: A. thaliana
  misc_feature: MA Experiment 20001248 PARAMETER Experiment Name: At_Far-red-induction_P Parameter: Plant Line Value: Columbia
  misc_feature: MA Experiment 20001248 PARAMETER Experiment Name: At_Far-red-induction_P Parameter: Timepoint (hr) Value: 4
  misc_feature: MA Experiment 20001248 PARAMETER Experiment Name: At_Far-red-induction_P Parameter: Tissue Value: Whole Plant
atggcggtggagctcatgactcggaattacatctccggcgtcggagctgatagcttcgccgttcaagaagcagctgcttcaggactcaaaagtatcgaaaatttcatcggtttaatgtctcgtgatagctttaactctgatcagccatcttcttcttccgcctccgcctccgcctccgccgccgcagatcttgaatcagctcgtaacacaacggcggacgcggctgtttcaaagtttaaaagagtcatatctctcttagatcgaactcgaaccggacacgcccggtttagacgtgctccggttcatgttatttctccggttcttttacaagaagaaccaaaaacgacgccgtttcagtctcctcttcctcctccgccgcaaatgatccgaaaaggttcgttttcttcatcgatgaaaacgattgatttctcatctctctcctctgtaacaacggaatcagacaaccagaagaagattcatcatcatcaacgtccctctgaaacggcgccgtttgcgtctcaaactcaaagcctctccacgacggtctcgtctttctcaaaatcaacaaagagaaaatgtaactctgagaatcttctcaccggaaaatgcgcttccgcttcttcctccggtcgttgtcattgctcgaagaaaagaaagataaaacagaggagaataattagggttccggcgataagtgcaaaaatgtccgatgtaccaccggacgattattcatggaggaaatacggacaaaaaccaattaaaggatctccacatccaagaggatattataagtgtagtagcgtaagaggttgtccagcacgtaaacatgttgagagagcagctgatgattcgtccatgttgattgttacttatgaaggagatcataatcattctctctccgccgctgatctcgccggagccgccgttgctgatcttattttggaatcgtcttgaaaagaacaaatctttatttaaggcttttat

SEQ ID NO: 79107 - protein, 317 aa, Arabidopsis thaliana; identical to SEQ ID NO: 24612
  peptide (1)..(317): Ceres Seq. ID no. 12648935
  misc_feature (239)..(299): Pfam Name: WRKY DNA -binding domain Pfam Description: WRKY DNA -binding domain
  misc_feature (1)..(317): Homolog of NCBI NO: 15227812 NR Description: WRKY family transcription factor; protein id: supported by cDNA: gi_13877862, supported by cDNA: gi_17065603 thaliana] >gi|20978770|sp|O22176|WR15_ARATH Probable [Arabidopsis
  misc_feature (126)..(299): Homolog of NCBI NO: 15233752 NR Description: WRKY family transcription factor; protein id: supported by cDNA: 112528., supported by cDNA: gi_13507096, by cDNA: gi_20465410 [Arabidopsis thaliana]
  misc_feature (1)..(106): Homolog of NCBI NO: 15233752 NR Description: WRKY family transcription factor; protein id: supported by cDNA: 112528., supported by cDNA: gi_13507096, by cDNA: gi_20465410 [Arabidopsis thaliana]
  misc_feature (1)..(307): Homolog of NCBI NO: 4894963 NR Description: DNA-binding protein WRKY3 [Avena sativa]
  misc_feature (37)..(310): Homolog of NCBI NO: 38346908 NR Description: OSJNBb0015N08.8 [Oryza sativa (japonica
  misc_feature (1)..(298): Homolog of NCBI NO: 38175580 NR Description: putative DNA-binding protein NtWRKY3 [Oryza
  misc_feature (116)..(317): Homolog of NCBI NO: 10798760 NR Description: WRKY transcription factor Nt-SubD48 [Nicotiana
  misc_feature (100)..(301): Homolog of NCBI NO: 7488950 NR Description: DNA-binding protein WRKY3 - parsley
  misc_feature (17)..(302): Homolog of NCBI NO: 38568048 NR Description: OSJNBa0065J03.18 [Oryza sativa (japonica
  misc_feature (1)..(317): Homolog of NCBI NO: 22329054 NR Description: WRKY family transcription factor; protein id: supported by cDNA: gi_15384214 [Arabidopsis thaliana]

SEQ ID NO: 79108 - protein, 312 aa, Arabidopsis thaliana; identical to SEQ ID NO: 24613
  peptide (1)..(312): Ceres Seq. ID no. 12648936
  misc_feature (234)..(294): Pfam Name: WRKY DNA -binding domain Pfam Description: WRKY DNA -binding domain
  misc_feature (1)..(312): Homolog of NCBI NO: 15227812 NR Description: WRKY family transcription factor; protein id: supported by cDNA: gi_13877862, supported by cDNA: gi_17065603 thaliana] >gi|20978770|sp|O22176|WR15_ARATH Probable [Arabidopsis
  misc_feature (121)..(294): Homolog of NCBI NO: 15233752 NR Description: WRKY family transcription factor; protein id: supported by cDNA: 112528., supported by cDNA: gi_13507096, by cDNA: gi_20465410 [Arabidopsis thaliana]
  misc_feature (1)..(101): Homolog of NCBI NO: 15233752 NR Description: WRKY family transcription factor; protein id: supported by cDNA: 112528., supported by cDNA: gi_13507096, by cDNA: gi_20465410 [Arabidopsis thaliana]
  misc_feature (1)..(302): Homolog of NCBI NO: 4894963 NR Description: DNA-binding protein WRKY3 [Avena sativa]
  misc_feature (32)..(305): Homolog of NCBI NO: 38346908 NR Description: OSJNBb0015N08.8 [Oryza sativa (japonica
  misc_feature (1)..(293): Homolog of NCBI NO: 38175580 NR Description: putative DNA-binding protein NtWRKY3 [Oryza
  misc_feature (111)..(312): Homolog of NCBI NO: 10798760 NR Description: WRKY transcription factor Nt-SubD48 [Nicotiana
  misc_feature (95)..(296): Homolog of NCBI NO: 7488950 NR Description: DNA-binding protein WRKY3 - parsley
  misc_feature (12)..(297): Homolog of NCBI NO: 38568048 NR Description: OSJNBa0065J03.18 [Oryza sativa (japonica
  misc_feature (1)..(312): Homolog of NCBI NO: 22329054 NR Description: WRKY family transcription factor; protein id: supported by cDNA: gi_15384214 [Arabidopsis thaliana]

SEQ ID NO: 79109 - protein, 279 aa, Arabidopsis thaliana; identical to SEQ ID NO: 24614
  peptide (1)..(279): Ceres Seq. ID no. 12648937
  misc_feature (201)..(261): Pfam Name: WRKY DNA -binding domain Pfam Description: WRKY DNA -binding domain
  misc_feature (1)..(279): Homolog of NCBI NO: 15227812 NR Description: WRKY family transcription factor; protein id: supported by cDNA: gi_13877862, supported by cDNA: gi_17065603 thaliana] >gi|20978770|sp|O22176|WR15_ARATH Probable [Arabidopsis
  misc_feature (88)..(261): Homolog of NCBI NO: 15233752 NR Description: WRKY family transcription factor; protein id: supported by cDNA: 112528., supported by cDNA: gi_13507096, by cDNA: gi_20465410 [Arabidopsis thaliana]
  misc_feature (1)..(68): Homolog of NCBI NO: 15233752 NR Description: WRKY family transcription factor; protein id: supported by cDNA: 112528., supported by cDNA: gi_13507096, by cDNA: gi_20465410 [Arabidopsis thaliana]
  misc_feature (1)..(269): Homolog of NCBI NO: 4894963 NR Description: DNA-binding protein WRKY3 [Avena sativa]
  misc_feature (1)..(272): Homolog of NCBI NO: 38346908 NR Description: OSJNBb0015N08.8 [Oryza sativa (japonica
  misc_feature (1)..(260): Homolog of NCBI NO: 38175580 NR Description: putative DNA-binding protein NtWRKY3 [Oryza
  misc_feature (78)..(279): Homolog of NCBI NO: 10798760 NR Description: WRKY transcription factor Nt-SubD48 [Nicotiana
  misc_feature (62)..(263): Homolog of NCBI NO: 7488950 NR Description: DNA-binding protein WRKY3 - parsley
  misc_feature (1)..(264): Homolog of NCBI NO: 38568048 NR Description: OSJNBa0065J03.18 [Oryza sativa (japonica
  misc_feature (1)..(279): Homolog of NCBI NO: 22329054 NR Description: WRKY family transcription factor; protein id: supported by cDNA: gi_15384214 [Arabidopsis thaliana]

SEQ ID NO: 79110 - DNA, 891 bp, Arabidopsis thaliana
  misc_feature (1)..(891): Ceres Seq. ID no. 12648946
  misc_feature: MA Experiment ID: 20000307 Result: Up-regulated in Transcription
  misc_feature: MA Experiment 20000307 PARAMETER Experiment Name: At_Germinating_Seeds_Sub_P Parameter: Age (hr) Value: 24 vs. 0
  misc_feature: MA Experiment 20000307 PARAMETER Experiment Name: At_Germinating_Seeds_Sub_P Parameter: Organism Value: A. thaliana
  misc_feature: MA Experiment 20000307 PARAMETER Experiment Name: At_Germinating_Seeds_Sub_P Parameter: Plant Line Value: WS
  misc_feature: MA Experiment 20000307 PARAMETER Experiment Name: At_Germinating_Seeds_Sub_P Parameter: Tissue Value: Germinating Seeds
  misc_feature: MA Experiment ID: 20000314 Result: Up-regulated in Transcription
  misc_feature: MA Experiment 20000314 PARAMETER Experiment Name: At_14day_Shoots-Roots_Sub_P Parameter: Age (day) Value: 14
  misc_feature: MA Experiment 20000314 PARAMETER Experiment Name: At_14day_Shoots-Roots_Sub_P Parameter: Organism Value: A. thaliana
  misc_feature: MA Experiment 20000314 PARAMETER Experiment Name: At_14day_Shoots-Roots_Sub_P Parameter: Plant Line Value: WS
  misc_feature: MA Experiment 20000314 PARAMETER Experiment Name: At_14day_Shoots-Roots_Sub_P Parameter: Tissue Value: Roots vs. Whole Plant
atgttgtctcttctctctactctagtagccctcccctttctgtttctcatcccttgtctctttatcacaagctatatatgtttccctgtgttcttgacaaaactccttggactcatcaaattcaaagccgctcgagacgatgatgacaacgagaaacgtgatgaggcaacttgtgttgtccgagaggaggagctacaaagagagctgatgccgagacacgtgtcattcatactagatgggaaccggagatgggccaaacgagacggattgacgacggcacaaggccacgaggctggaactaaacgaattatagagatagccgaggtctgcttcgagttgggtattcatacagtctcagcttttgctttctccacagagaattggggaagagacaagtttgaggttaagtgcttaatgtctttgttcaaccactacctcaagtccaacattcaatactttcaaagaaaggaagttcgcgtttctgttatcgggaataaaacgaagatccctgaatctctcctcaaagaaatccatgagatagaggaagctaccaaggctacaagaataatagattacagcgggaaatttgatatcatgcatgcttgcaagagtcttgtgaagaaatcagaaaaagggttgatccgagaggaagatgtagacgaggcattgatcgagagagagcttctaacgaattgtagtgacttcccaagtcctgatttaatgattaggacaagtggagaacaaaggattagtaacttcttcttgtggcaacttgcttataccgagcttttctactcgccggtattgtggcctgatttcgataaggataagcttctagaggccctcgcttcgtatcagggcagggaaagacgatttggttgtcgcgtgtga

SEQ ID NO: 79111 - protein, 296 aa, Arabidopsis thaliana
  peptide (1)..(296): Ceres Seq. ID no. 12648947
  misc_feature (77)..(294): Pfam Name: Putative undecaprenyl diphosphate synthase Pfam Description: Putative undecaprenyl diphosphate synthase
  misc_feature (1)..(296): Homolog of NCBI NO: 18400264 NR Description: dehydrodolichyl diphosphate synthase (DEDOL-PP protein id: At2g23410.1, supported by cDNA: gi_6651293
  misc_feature (1)..(296): Homolog of NCBI NO: 18424144 NR Description: dehydrodolichyl diphosphate synthase (DEDOL-PP putative; protein id: At5g58780.1, supported by cDNA: gi_19699276 thaliana] >gi|19699277|gb|AAL91250.1| AT5g58780/mzn1_230
  misc_feature (25)..(296): Homolog of NCBI NO: 7447521 NR Description: hypothetical protein At2g23410 [imported] -
  misc_feature (1)..(296): Homolog of NCBI NO: 18424146 NR Description: dehydrodolichyl diphosphate synthase (DEDOL-PP putative; protein id: At5g58782.1, supported by cDNA: 11295.
  misc_feature (1)..(296): Homolog of NCBI NO: 21618322 NR Description: undecaprenyl pyrophosphate synthetase-like
  misc_feature (78)..(296): Homolog of NCBI NO: 8843798 NR Description: undecaprenyl pyrophosphate synthetase-like
  misc_feature (1)..(296): Homolog of NCBI NO: 8843800 NR Description: cis-prenyltransferase homolog-like; undecaprenyl
  misc_feature (70)..(296): Homolog of NCBI NO: 8843799 NR Description: undecaprenyl pyrophosphate synthetase-like
  misc_feature (67)..(296): Homolog of NCBI NO: 18424148 NR Description: dehydrodolichyl diphosphate synthase (DEDOL-PP
  misc_feature (63)..(295): Homolog of NCBI NO: 15237748 NR Description: dehydrodolichyl diphosphate synthase (DEDOL-PP putative; protein id: At5g58770.1 [Arabidopsis thaliana] contains similarity to unknown
MLSLLSTLVALPFLFLIPCLFITSYICFPVFLTKLLGLIKFKAARDDDDNEKRDEATCVVREEELQRELMPRHVSFILDGNRRWAKRDGLTTAQGHEAGTKRIIEIAEVCFELGIHTVSAFAFSTENWGRDKFEVKCLMSLFNHYLKSNIQYFQRKEVRVSVIGNKTKIPESLLKEIHEIEEATKATRIIDYSGKFDIMHACKSLVKKSEKGLIREEDVDEALIERELLTNCSDFPSPDLMIRTSGEQRISNFFLWQLAYTELFYSPVLWPDFDKDKLLEALASYQGRERRFGCRV

SEQ ID NO: 79112 - protein, 227 aa, Arabidopsis thaliana
  peptide (1)..(227): Ceres Seq. ID no. 12648948
  misc_feature (8)..(225): Pfam Name: Putative undecaprenyl diphosphate synthase Pfam Description: Putative undecaprenyl diphosphate synthase
  misc_feature (1)..(227): Homolog of NCBI NO: 18400264 NR Description: dehydrodolichyl diphosphate synthase (DEDOL-PP protein id: At2g23410.1, supported by cDNA: gi_6651293
  misc_feature (1)..(227): Homolog of NCBI NO: 18424144 NR Description: dehydrodolichyl diphosphate synthase (DEDOL-PP putative; protein id: At5g58780.1, supported by cDNA: gi_19699276 thaliana] >gi|19699277|gb|AAL91250.1| AT5g58780/mzn1_230
  misc_feature (1)..(227): Homolog of NCBI NO: 7447521 NR Description: hypothetical protein At2g23410 [imported] -
  misc_feature (1)..(227): Homolog of NCBI NO: 18424146 NR Description: dehydrodolichyl diphosphate synthase (DEDOL-PP putative; protein id: At5g58782.1, supported by cDNA: 11295.
  misc_feature (1)..(227): Homolog of NCBI NO: 21618322 NR Description: undecaprenyl pyrophosphate synthetase-like
  misc_feature (9)..(227): Homolog of NCBI NO: 8843798 NR Description: undecaprenyl pyrophosphate synthetase-like
  misc_feature (1)..(227): Homolog of NCBI NO: 8843800 NR Description: cis-prenyltransferase homolog-like; undecaprenyl
  misc_feature (1)..(227): Homolog of NCBI NO: 8843799 NR Description: undecaprenyl pyrophosphate synthetase-like
  misc_feature (1)..(227): Homolog of NCBI NO: 18424148 NR Description: dehydrodolichyl diphosphate synthase (DEDOL-PP
  misc_feature (1)..(226): Homolog of NCBI NO: 15237748 NR Description: dehydrodolichyl diphosphate synthase (DEDOL-PP putative; protein id: At5g58770.1 [Arabidopsis thaliana] contains similarity to unknown
MPRHVSFILDGNRRWAKRDGLTTAQGHEAGTKRIIEIAEVCFELGIHTVSAFAFSTENWGRDKFEVKCLMSLFNHYLKSNIQYFQRKEVRVSVIGNKTKIPESLLKEIHEIEEATKATRIIDYSGKFDIMHACKSLVKKSEKGLIREEDVDEALIERELLTNCSDFPSPDLMIRTSGEQRISNFFLWQLAYTELFYSPVLWPDFDKDKLLEALASYQGRERRFGCRV

SEQ ID NO: 79113 - protein, 158 aa, Arabidopsis thaliana
  peptide (1)..(158): Ceres Seq. ID no. 12648949
  misc_feature (1)..(156): Pfam Name: Putative undecaprenyl diphosphate synthase Pfam Description: Putative undecaprenyl diphosphate synthase
  misc_feature (1)..(158): Homolog of NCBI NO: 18400264 NR Description: dehydrodolichyl diphosphate synthase (DEDOL-PP protein id: At2g23410.1, supported by cDNA: gi_6651293
  misc_feature (1)..(158): Homolog of NCBI NO: 18424144 NR Description: dehydrodolichyl diphosphate synthase (DEDOL-PP putative; protein id: At5g58780.1, supported by cDNA: gi_19699276 thaliana] >gi|19699277|gb|AAL91250.1| AT5g58780/mzn1_230
  misc_feature (1)..(158): Homolog of NCBI NO: 7447521 NR Description: hypothetical protein At2g23410 [imported] -
  misc_feature (1)..(158): Homolog of NCBI NO: 18424146 NR Description: dehydrodolichyl diphosphate synthase (DEDOL-PP putative; protein id: At5g58782.1, supported by cDNA: 11295.
  misc_feature (1)..(158): Homolog of NCBI NO: 21618322 NR Description: undecaprenyl pyrophosphate synthetase-like
  misc_feature (1)..(158): Homolog of NCBI NO: 8843798 NR Description: undecaprenyl pyrophosphate synthetase-like
  misc_feature (1)..(158): Homolog of NCBI NO: 8843800 NR Description: cis-prenyltransferase homolog-like; undecaprenyl
  misc_feature (1)..(158): Homolog of NCBI NO: 8843799 NR Description: undecaprenyl pyrophosphate synthetase-like
  misc_feature (1)..(158): Homolog of NCBI NO: 18424148 NR Description: dehydrodolichyl diphosphate synthase (DEDOL-PP
  misc_feature (1)..(157): Homolog of NCBI NO: 15237748 NR Description: dehydrodolichyl diphosphate synthase (DEDOL-PP putative; protein id: At5g58770.1 [Arabidopsis thaliana] contains similarity to unknown
MSLFNHYLKSNIQYFQRKEVRVSVIGNKTKIPESLLKEIHEIEEATKATRIIDYSGKFDIMHACKSLVKKSEKGLIREEDVDEALIERELLTNCSDFPSPDLMIRTSGEQRISNFFLWQLAYTELFYSPVLWPDFDKDKLLEALASYQGRERRFGCRV

SEQ ID NO: 79114 - DNA, 1281 bp, Arabidopsis thaliana
  misc_feature (1)..(1281): Ceres Seq. ID no. 12648960
  misc_feature: MA Experiment ID: 20000439 Result: Up-regulated in Transcription
  misc_feature: MA Experiment 20000439 PARAMETER Experiment Name: At_Roots__P Parameter: Age (day) Value: 14 vs. 21
  misc_feature: MA Experiment 20000439 PARAMETER Experiment Name: At_Roots__P Parameter: Organism Value: A. thaliana
  misc_feature: MA Experiment 20000439 PARAMETER Experiment Name: At_Roots__P Parameter: Tissue Value: Roots vs. Whole Plant
atgagaactgaagcacaagattcagtacctaaatcaaaccctaatccggaactaatcaaagaaaccccaaaggtctctctttacgaacaatgcagggaagagaggatcaaagagaatcttcagaggatgaacaatctgggtctcttaaatctctctcgcaaactcaaacccaagacccgacccgttaaaagatcttacggtaaccgtaattctgttcagaatccgactcctcctcttcagccttctcgccgatcttctcgattggagaacacaactccagttatctacactgatgggatcaatgagaagggcaagaaagcatctaaacgagagagtgttgtgattggtgaagggataagagctgagatttacacagaggaacatgagaagcttcttgggaatacagaaagaagctggacttgttttgttgatggctatgataagaatgggaaacggatttatgatccgtttaacggtaagacttgtcaccaatgcaggcagaagacgatggggcatcgtacacagtgcagtgaatgcaatttggttcaaggacagttctgtggtgattgtttgttcatgagatatggtgaacatgtgcttgaagctcttgagaatccagactggatttgtcccgcttgtcgcgggatctgcaattgcagtttgtgccggaataataaaggatgggttccaactggcccgatttacagaagggtcttaagttgtcttgtgccaccaaagcaagaacattcatgtgcacacaatggtgatgatcttccagatattcaggaaaggataggacaacactcaaatttggagacgaaaccagatagctacttgcttcatgtggatgagcagattccattggttgatgttcaggtcttgagttatcttgagacgccgaagcaagaacattcatgtgcccacattggtgatggtcttccaaaaattcaagaatggataggacaagacccgacttctgagacaaaaccagttagctacttgattcctatagatgatgatcaaacttcattggtggatgcgcaggtcatgtatcttgagacaccaaagcaagataaacaagaacattcatgtgcccacatcggtgatgatcttccagaaattcaacaagggacaggacaagactcgaatttggagacaagacttggggaaagtcagacccttgtggtcaaagctcgagtaacgagaagtaagaggaaagcggctctagaaccaaatccagatagcattggtggaagactaaggcagcgaagaaggacctaa

SEQ ID NO: 79115 - protein, 426 aa, Arabidopsis thaliana
  peptide (1)..(426): Ceres Seq. ID no. 12648961
  misc_feature (237)..(426): Homolog of NCBI NO: 15227848 NR Description: hypothetical protein; protein id: At2g23530.1
  misc_feature (1)..(187): Homolog of NCBI NO: 15227848 NR Description: hypothetical protein; protein id: At2g23530.1
  misc_feature (283)..(400): Homolog of NCBI NO: 15227848 NR Description: hypothetical protein; protein id: At2g23530.1
  misc_feature (58)..(387): Homolog of NCBI NO: 30690864 NR Description: expressed protein [Arabidopsis thaliana]
  misc_feature (370)..(425): Homolog of NCBI NO: 30690864 NR Description: expressed protein [Arabidopsis thaliana]
  misc_feature (86)..(387): Homolog of NCBI NO: 25407788 NR Description: hypothetical protein AT4g37110 [imported] - thaliana >gi|4006866|emb|CAB16784.1| putative protein thaliana] >gi|7270660|emb|CAB80377.1| putative protein
  misc_feature (1)..(190): Homolog of NCBI NO: 30690864 NR Description: expressed protein [Arabidopsis thaliana]
  misc_feature (1)..(137): Homolog of NCBI NO: 25407788 NR Description: hypothetical protein AT4g37110 [imported] - thaliana >gi|4006866|emb|CAB16784.1| putative protein thaliana] >gi|7270660|emb|CAB80377.1| putative protein
  misc_feature (370)..(425): Homolog of NCBI NO: 25407788 NR Description: hypothetical protein AT4g37110 [imported] - thaliana >gi|4006866|emb|CAB16784.1| putative protein thaliana] >gi|7270660|emb|CAB80377.1| putative protein
  misc_feature (50)..(232): Homolog of NCBI NO: 15929382 NR Description: Unknown (protein for IMAGE:3829029) [Homo sapiens]
MRTEAQDSVPKSNPNPELIKETPKVSLYEQCREERIKENLQRMNNLGLLNLSRKLKPKTRPVKRSYGNRNSVQNPTPPLQPSRRSSRLENTTPVIYTDGINEKGKKASKRESVVIGEGIRAEIYTEEHEKLLGNTERSWTCFVDGYDKNGKRIYDPFNGKTCHQCRQKTMGHRTQCSECNLVQGQFCGDCLFMRYGEHVLEALENPDWICPACRGICNCSLCRNNKGWVPTGPIYRRVLSCLVPPKQEHSCAHNGDDLPDIQERIGQHSNLETKPDSYLLHVDEQIPLVDVQVLSYLETPKQEHSCAHIGDGLPKIQEWIGQDPTSETKPVSYLIPIDDDQTSLVDAQVMYLETPKQDKQEHSCAHIGDDLPEIQQGTGQDSNLETRLGESQTLVVKARVTRSKRKAALEPNPDSIGGRLRQRRRT

SEQ ID NO: 79116 - protein, 384 aa, Arabidopsis thaliana
  peptide (1)..(384): Ceres Seq. ID no. 12648962
  misc_feature (195)..(384): Homolog of NCBI NO: 15227848 NR Description: hypothetical protein; protein id: At2g23530.1
  misc_feature (1)..(145): Homolog of NCBI NO: 15227848 NR Description: hypothetical protein; protein id: At2g23530.1
  misc_feature (241)..(358): Homolog of NCBI NO: 15227848 NR Description: hypothetical protein; protein id: At2g23530.1
  misc_feature (16)..(345): Homolog of NCBI NO: 30690864 NR Description: expressed protein [Arabidopsis thaliana]
  misc_feature (328)..(383): Homolog of NCBI NO: 30690864 NR Description: expressed protein [Arabidopsis thaliana]
  misc_feature (44)..(345): Homolog of NCBI NO: 25407788 NR Description: hypothetical protein AT4g37110 [imported] - thaliana >gi|4006866|emb|CAB16784.1| putative protein thaliana] >gi|7270660|emb|CAB80377.1| putative protein
  misc_feature (1)..(148): Homolog of NCBI NO: 30690864 NR Description: expressed protein [Arabidopsis thaliana]
  misc_feature (1)..(95): Homolog of NCBI NO: 25407788 NR Description: hypothetical protein AT4g37110 [imported] - thaliana >gi|4006866|emb|CAB16784.1| putative protein thaliana] >gi|7270660|emb|CAB80377.1| putative protein
  misc_feature (328)..(383): Homolog of NCBI NO: 25407788 NR Description: hypothetical protein AT4g37110 [imported] - thaliana >gi|4006866|emb|CAB16784.1| putative protein thaliana] >gi|7270660|emb|CAB80377.1| putative protein
  misc_feature (8)..(190): Homolog of NCBI NO: 15929382 NR Description: Unknown (protein for IMAGE:3829029) [Homo sapiens]
MNNLGLLNLSRKLKPKTRPVKRSYGNRNSVQNPTPPLQPSRRSSRLENTTPVIYTDGINEKGKKASKRESVVIGEGIRAEIYTEEHEKLLGNTERSWTCFVDGYDKNGKRIYDPFNGKTCHQCRQKTMGHRTQCSECNLVQGQFCGDCLFMRYGEHVLEALENPDWICPACRGICNCSLCRNNKGWVPTGPIYRRVLSCLVPPKQEHSCAHNGDDLPDIQERIGQHSNLETKPDSYLLHVDEQIPLVDVQVLSYLETPKQEHSCAHIGDGLPKIQEWIGQDPTSETKPVSYLIPIDDDQTSLVDAQVMYLETPKQDKQEHSCAHIGDDLPEIQQGTGQDSNLETRLGESQTLVVKARVTRSKRKAALEPNPDSIGGRLRQRRRT

SEQ ID NO: 79117 - protein, 257 aa, Arabidopsis thaliana
  peptide (1)..(257): Ceres Seq. ID no. 12648963
  misc_feature (68)..(257): Homolog of NCBI NO: 15227848 NR Description: hypothetical protein; protein id: At2g23530.1
  misc_feature (1)..(18): Homolog of NCBI NO: 15227848 NR Description: hypothetical protein; protein id: At2g23530.1
  misc_feature (114)..(231): Homolog of NCBI NO: 15227848 NR Description: hypothetical protein; protein id: At2g23530.1
  misc_feature (1)..(218): Homolog of NCBI NO: 30690864 NR Description: expressed protein [Arabidopsis thaliana]
  misc_feature (201)..(256): Homolog of NCBI NO: 30690864 NR Description: expressed protein [Arabidopsis thaliana]
  misc_feature (1)..(218): Homolog of NCBI NO: 25407788 NR Description: hypothetical protein AT4g37110 [imported] - thaliana >gi|4006866|emb|CAB16784.1| putative protein thaliana] >gi|7270660|emb|CAB80377.1| putative protein
  misc_feature (1)..(21): Homolog of NCBI NO: 30690864 NR Description: expressed protein [Arabidopsis thaliana]
  misc_feature (201)..(256): Homolog of NCBI NO: 25407788 NR Description: hypothetical protein AT4g37110 [imported] - thaliana >gi|4006866|emb|CAB16784.1| putative protein thaliana] >gi|7270660|emb|CAB80377.1| putative protein
  misc_feature (1)..(63): Homolog of NCBI NO: 15929382 NR Description: Unknown (protein for IMAGE:3829029) [Homo sapiens]
  misc_feature (1)..(63): Homolog of NCBI NO: 11360288 NR Description: hypothetical protein DKFZp762L0311.1 - human
MGHRTQCSECNLVQGQFCGDCLFMRYGEHVLEALENPDWICPACRGICNCSLCRNNKGWVPTGPIYRRVLSCLVPPKQEHSCAHNGDDLPDIQERIGQHSNLETKPDSYLLHVDEQIPLVDVQVLSYLETPKQEHSCAHIGDGLPKIQEWIGQDPTSETKPVSYLIPIDDDQTSLVDAQVMYLETPKQDKQEHSCAHIGDDLPEIQQGTGQDSNLETRLGESQTLVVKARVTRSKRKAALEPNPDSIGGRLRQRRRT

SEQ ID NO: 79118 - DNA, 735 bp, Arabidopsis thaliana
  misc_feature (1)..(735): Ceres Seq. ID no. 12648971
  misc_feature: MA Experiment ID: 20000264 Result: Down-regulated in Transcription
  misc_feature: MA Experiment 20000264 PARAMETER Experiment Name: At_Open_Flower_P Parameter: Age (day) Value: 21
  misc_feature: MA Experiment 20000264 PARAMETER Experiment Name: At_Open_Flower_P Parameter: Plant Line Value: WS
  misc_feature: MA Experiment 20000264 PARAMETER Experiment Name: At_Open_Flower_P Parameter: Tissue Value: Open Flower vs. Whole Plant
  misc_feature: MA Experiment ID: 20000437 Result: Up-regulated in Transcription
  misc_feature: MA Experiment 20000437 PARAMETER Experiment Name: At_Drought_P Parameter: Age (day) Value: 8
  misc_feature: MA Experiment 20000437 PARAMETER Experiment Name: At_Drought_P Parameter: Organism Value: A. thaliana
  misc_feature: MA Experiment 20000437 PARAMETER Experiment Name: At_Drought_P Parameter: Plant Line Value: WS
  misc_feature: MA Experiment 20000437 PARAMETER Experiment Name: At_Drought_P Parameter: Timepoint (hr) Value: 24
  misc_feature: MA Experiment 20000437 PARAMETER Experiment Name: At_Drought_P Parameter: Tissue Value: Whole Plant
  misc_feature: MA Experiment 20000437 PARAMETER Experiment Name: At_Drought_P Parameter: Treatment Value: Drought vs. No Drought
  misc_feature: MA Experiment ID: 20000495 Result: Down-regulated in Transcription
  misc_feature: MA Experiment 20000495 PARAMETER Experiment Name: At_Guard_Cells_P Parameter: Harvest Date Value: 8/2/2002
  misc_feature: MA Experiment 20000495 PARAMETER Experiment Name: At_Guard_Cells_P Parameter: Organism Value: A. thaliana
  misc_feature: MA Experiment 20000495 PARAMETER Experiment Name: At_Guard_Cells_P Parameter: Tissue Value: Guard Cells vs. Leaves
  misc_feature: MA Experiment ID: 20001451 Result: Down-regulated in Transcription
  misc_feature: MA Experiment 20001451 PARAMETER Experiment Name: At_Far-red-induction_P Parameter: Age (day) Value: 7
  misc_feature: MA Experiment 20001451 PARAMETER Experiment Name: At_Far-red-induction_P Parameter: Light Value: Far-red vs. White
  misc_feature: MA Experiment 20001451 PARAMETER Experiment Name: At_Far-red-induction_P Parameter: Organism Value: A. thaliana
  misc_feature: MA Experiment 20001451 PARAMETER Experiment Name: At_Far-red-induction_P Parameter: Plant Line Value: Columbia
  misc_feature: MA Experiment 20001451 PARAMETER Experiment Name: At_Far-red-induction_P Parameter: Timepoint (hr) Value: 24
  misc_feature: MA Experiment 20001451 PARAMETER Experiment Name: At_Far-red-induction_P Parameter: Tissue Value: Whole Plant
  misc_feature: MA Experiment ID: 20001757 Result: Up-regulated in Transcription
  misc_feature: MA Experiment 20001757 PARAMETER Experiment Name: At_50mM_NH4NO3_L-to-H_P Parameter: Timepoint (hr) Value: 6
  misc_feature: MA Experiment 20001757 PARAMETER Experiment Name: At_50mM_NH4NO3_L-to-H_P Parameter: Tissue Value: Leaf
  misc_feature: MA Experiment 20001757 PARAMETER Experiment Name: At_50mM_NH4NO3_L-to-H_P Parameter: Treatment Value: 50mM NH4NO3 vs 100mM Mannitol
atgggctgtgccacggtgaaaacgcatctggaggctgtaggtcactgtgtgaccgcggtggatctagctgcatccggtataaatatgactagattggaagagattcagactttgaaggattactgcaaacctttgcttgagttactgaactcacttggctcggatgacgataaggtgattcttgttgcgcatagtatgggaggaatacctgctgctctcgcttctgacatattccctagtaagattgctactattgttttcttgacagcttttatgcccgacacaagaaacctacctgcttatgtttaccaaaagctaatcagaagcgttccacaagaaggatggttggacaccgtgtttggaacgtatgggaaacatgaatgtcctctagagtttgctctttttggaccaaagttcatggccaagaatttgtatcaactctctccggtccaagatcttgaattggcgaaaatgttggtgagagtaaaccccatcattacaaataatctggcagggacaagaagctttagtgaggaagggtacggtaccgttacacgtatatatattgtatgtggagaggacatggcggtacccgaggattaccagtggtggatgatcaagaactttccgccaaaagaagtaatggagatcaaatgtgcagatcatatggcaatgttctccaagcctcacaaactatgtgctcttctcgtggagattgcatgtaaatatgcctaa

SEQ ID NO: 79119 - protein, 244 aa, Arabidopsis thaliana
  peptide (1)..(244): Ceres Seq. ID no. 12648972
  misc_feature (15)..(238): Pfam Name: alpha/beta hydrolase fold Pfam Description: alpha/beta hydrolase fold
  misc_feature (6)..(244): Homolog of NCBI NO: 15227859 NR Description: putative acetone-cyanohydrin lyase; protein id:
  misc_feature (6)..(243): Homolog of NCBI NO: 15227850 NR Description: putative acetone-cyanohydrin lyase; protein id:
  misc_feature (6)..(243): Homolog of NCBI NO: 28393451 NR Description: putative acetone-cyanohydrin lyase [Arabidopsis
  misc_feature (6)..(244): Homolog of NCBI NO: 15227851 NR Description: putative acetone-cyanohydrin lyase; protein id:
  misc_feature (33)..(243): Homolog of NCBI NO: 30682119 NR Description: hydrolase, alpha/beta fold family [Arabidopsis
  misc_feature (6)..(25): Homolog of NCBI NO: 30682119 NR Description: hydrolase, alpha/beta fold family [Arabidopsis
  misc_feature (6)..(244): Homolog of NCBI NO: 15227865 NR Description: putative acetone-cyanohydrin lyase; protein id:
  misc_feature (6)..(243): Homolog of NCBI NO: 15235445 NR Description: hydroxynitrile lyase like protein; protein id: [Arabidopsis thaliana] >gi|25407792|pir||H85438 hydroxynitrile
  misc_feature (66)..(244): Homolog of NCBI NO: 15227857 NR Description: putative acetone-cyanohydrin lyase; protein id:
  misc_feature (6)..(244): Homolog of NCBI NO: 14279437 NR Description: ethylene-induced esterase [Citrus sinensis]
MGCATVKTHLEAVGHCVTAVDLAASGINMTRLEEIQTLKDYCKPLLELLNSLGSDDDKVILVAHSMGGIPAALASDIFPSKIATIVFLTAFMPDTRNLPAYVYQKLIRSVPQEGWLDTVFGTYGKHECPLEFALFGPKFMAKNLYQLSPVQDLELAKMLVRVNPIITNNLAGTRSFSEEGYGTVTRIYIVCGEDMAVPEDYQWWMIKNFPPKEVMEIKCADHMAMFSKPHKLCALLVEIACKYA

SEQ ID NO: 79120 - protein, 216 aa, Arabidopsis thaliana; identical to SEQ ID NO: 70428
  peptide (1)..(216): Ceres Seq. ID no. 12648973
  misc_feature (1)..(210): Pfam Name: alpha/beta hydrolase fold Pfam Description: alpha/beta hydrolase fold
  misc_feature (1)..(216): Homolog of NCBI NO: 15227859 NR Description: putative acetone-cyanohydrin lyase; protein id:
  misc_feature (1)..(215): Homolog of NCBI NO: 15227850 NR Description: putative acetone-cyanohydrin lyase; protein id:
  misc_feature (1)..(215): Homolog of NCBI NO: 28393451 NR Description: putative acetone-cyanohydrin lyase [Arabidopsis
  misc_feature (1)..(216): Homolog of NCBI NO: 15227851 NR Description: putative acetone-cyanohydrin lyase; protein id:
  misc_feature (5)..(215): Homolog of NCBI NO: 30682119 NR Description: hydrolase, alpha/beta fold family [Arabidopsis
  misc_feature (1)..(216): Homolog of NCBI NO: 15227865 NR Description: putative acetone-cyanohydrin lyase; protein id:
  misc_feature (1)..(215): Homolog of NCBI NO: 15235445 NR Description: hydroxynitrile lyase like protein; protein id: [Arabidopsis thaliana] >gi|25407792|pir||H85438 hydroxynitrile
  misc_feature (38)..(216): Homolog of NCBI NO: 15227857 NR Description: putative acetone-cyanohydrin lyase; protein id:
  misc_feature (1)..(216): Homolog of NCBI NO: 14279437 NR Description: ethylene-induced esterase [Citrus sinensis]
  misc_feature (1)..(215): Homolog of NCBI NO: 15227867 NR Description: putative acetone-cyanohydrin lyase; protein id:

SEQ ID NO: 79121 - protein, 179 aa, Arabidopsis thaliana; identical to SEQ ID NO: 70429
  peptide (1)..(179): Ceres Seq. ID no. 12648974
  misc_feature (1)..(173): Pfam Name: alpha/beta hydrolase fold Pfam Description: alpha/beta hydrolase fold
  misc_feature (1)..(179): Homolog of NCBI NO: 15227859 NR Description: putative acetone-cyanohydrin lyase; protein id:
  misc_feature (1)..(178): Homolog of NCBI NO: 15227850 NR Description: putative acetone-cyanohydrin lyase; protein id:
  misc_feature (1)..(178): Homolog of NCBI NO: 28393451 NR Description: putative acetone-cyanohydrin lyase [Arabidopsis
  misc_feature (1)..(179): Homolog of NCBI NO: 15227851 NR Description: putative acetone-cyanohydrin lyase; protein id:
  misc_feature (1)..(178): Homolog of NCBI NO: 30682119 NR Description: hydrolase, alpha/beta fold family [Arabidopsis
  misc_feature (1)..(179): Homolog of NCBI NO: 15227865 NR Description: putative acetone-cyanohydrin lyase; protein id:
  misc_feature (1)..(178): Homolog of NCBI NO: 15235445 NR Description: hydroxynitrile lyase like protein; protein id: [Arabidopsis thaliana] >gi|25407792|pir||H85438 hydroxynitrile
  misc_feature (1)..(179): Homolog of NCBI NO: 15227857 NR Description: putative acetone-cyanohydrin lyase; protein id:
  misc_feature (1)..(179): Homolog of NCBI NO: 14279437 NR Description: ethylene-induced esterase [Citrus sinensis]
  misc_feature (1)..(178): Homolog of NCBI NO: 15227867 NR Description: putative acetone-cyanohydrin lyase; protein id:

SEQ ID NO: 79122 - DNA, 1623 bp, Arabidopsis thaliana
  misc_feature (1)..(1623): Ceres Seq. ID no. 12649001
  misc_feature: MA Experiment ID: 20000185 Result: Up-regulated in Transcription
  misc_feature: MA Experiment 20000185 PARAMETER Experiment Name: At_Roots__P Parameter: Age (day) Value: 7 vs. 21
  misc_feature: MA Experiment 20000185 PARAMETER Experiment Name: At_Roots__P Parameter: Organism Value: A. thaliana
  misc_feature: MA Experiment 20000185 PARAMETER Experiment Name: At_Roots__P Parameter: Tissue Value: Roots vs. Whole Plant
  misc_feature: MA Experiment ID: 20000234 Result: Up-regulated in Transcription
  misc_feature: MA Experiment 20000234 PARAMETER Experiment Name: At_Siliques_P Parameter: Age (day) Value: 21
  misc_feature: MA Experiment 20000234 PARAMETER Experiment Name: At_Siliques_P Parameter: Organism Value: A. thaliana
  misc_feature: MA Experiment 20000234 PARAMETER Experiment Name: At_Siliques_P Parameter: Plant Line Value: WS
  misc_feature: MA Experiment 20000234 PARAMETER Experiment Name: At_Siliques_P Parameter: Tissue Value: Less Than 5mm Siliques vs. Whole Plant
  misc_feature: MA Experiment ID: 20000235 Result: Up-regulated in Transcription
  misc_feature: MA Experiment 20000235 PARAMETER Experiment Name: At_Siliques_P Parameter: Age (day) Value: 21
  misc_feature: MA Experiment 20000235 PARAMETER Experiment Name: At_Siliques_P Parameter: Organism Value: A. thaliana
  misc_feature: MA Experiment 20000235 PARAMETER Experiment Name: At_Siliques_P Parameter: Plant Line Value: WS
  misc_feature: MA Experiment 20000235 PARAMETER Experiment Name: At_Siliques_P Parameter: Tissue Value: 5-10mm Siliques vs. Whole Plant
  misc_feature: MA Experiment ID: 20000264 Result: Up-regulated in Transcription
  misc_feature: MA Experiment 20000264 PARAMETER Experiment Name: At_Open_Flower_P Parameter: Age (day) Value: 21
  misc_feature: MA Experiment 20000264 PARAMETER Experiment Name: At_Open_Flower_P Parameter: Plant Line Value: WS
  misc_feature: MA Experiment 20000264 PARAMETER Experiment Name: At_Open_Flower_P Parameter: Tissue Value: Open Flower vs. Whole Plant
  misc_feature: MA Experiment ID: 20000265 Result: Up-regulated in Transcription
  misc_feature: MA Experiment 20000265 PARAMETER Experiment Name: At_Open_Flower_P Parameter: Age (day) Value: 21
  misc_feature: MA Experiment 20000265 PARAMETER Experiment Name: At_Open_Flower_P Parameter: Plant Line Value: WS
  misc_feature: MA Experiment 20000265 PARAMETER Experiment Name: At_Open_Flower_P Parameter: Tissue Value: Closed Flower vs. Whole Plant
  misc_feature: MA Experiment ID: 20000286 Result: Up-regulated in Transcription
  misc_feature: MA Experiment 20000286 PARAMETER Experiment Name: At_Open_Flower_P Parameter: Age (day) Value: 21
  misc_feature: MA Experiment 20000286 PARAMETER Experiment Name: At_Open_Flower_P Parameter: Plant Line Value: WS
  misc_feature: MA Experiment 20000286 PARAMETER Experiment Name: At_Open_Flower_P Parameter: Tissue Value: Half Open vs. Whole Plant
  misc_feature: MA Experiment ID: 20000437 Result: Down-regulated in Transcription
  misc_feature: MA Experiment 20000437 PARAMETER Experiment Name: At_Drought_P Parameter: Age (day) Value: 8
  misc_feature: MA Experiment 20000437 PARAMETER Experiment Name: At_Drought_P Parameter: Organism Value: A. thaliana
  misc_feature: MA Experiment 20000437 PARAMETER Experiment Name: At_Drought_P Parameter: Plant Line Value: WS
  misc_feature: MA Experiment 20000437 PARAMETER Experiment Name: At_Drought_P Parameter: Timepoint (hr) Value: 24
  misc_feature: MA Experiment 20000437 PARAMETER Experiment Name: At_Drought_P Parameter: Tissue Value: Whole Plant
  misc_feature: MA Experiment 20000437 PARAMETER Experiment Name: At_Drought_P Parameter: Treatment Value: Drought vs. No Drought
  misc_feature: MA Experiment ID: 20000495 Result: Up-regulated in Transcription
  misc_feature: MA Experiment 20000495 PARAMETER Experiment Name: At_Guard_Cells_P Parameter: Harvest Date Value: 8/2/2002
  misc_feature: MA Experiment 20000495 PARAMETER Experiment Name: At_Guard_Cells_P Parameter: Organism Value: A. thaliana
  misc_feature: MA Experiment 20000495 PARAMETER Experiment Name: At_Guard_Cells_P Parameter: Tissue Value: Guard Cells vs. Leaves
atgggatttgaagacaagaaaatgctgagacagagacataagcgttctaagagctgtactgttcctgagaagaaaaagcttgaagatgagaatagcattgattcttctctggatgcttctcaacgcctcaagctcgacttacctcgttgcggcgataaatcttttgaaatgaagaaggatctatcccctgatgtaaaattcaagagctctctgaagcaagagattcaagagcttgagaaaagattacagaaccagtttgatgtccgtggtgcgttagagaaggcattaggctataaaacaccatctcgagacatcaaaggcgactctactccaaagcctccaacagaattgatcaaggaaatcgcggtgttggagttagaagtttctcatttggaacagtaccttctatctttgtatcgtaaagcgtttgatcaacaaacatcttctgaggacatcgattcatgtgttcgtcgttgccagtcctctcttaatcaacgttccaccttcaataaccgaatatctccaccagaagactcggtattcgcgtgccactcccaaccattgtccatacatgaatacatacaaaatggatcaaatgatgcaagccttgcagaacacatgggaactcggatatctgatcacatattcatgactccaaacaagttatcagaggaaatgatcaagtgtgcatcagctatatattccaagctcgctgatccaccatcgataaaccacggtttctcatccccgagttcgtctccatcatcaacaagcgagttttcaccacaagaccagtatgatatgtggagtccaagcttcagaaaaaactcgtctttcgatgaccagtttgaattcagcggaccttatagctcaatgatcgaagtgtcacacattcatcgaaaccgtaaaagacgcgaccttgacctgatgaatcgaaacttcagcttacttcttaagcaactggaaagtgttgatccgagaaaactgactcatcaagagaaactggcgttctggattaacgtacataacgctcttgtgatgcatacatttctggcaaatgggattccacagaacaatgggaagcgatttttactactctccaagccagcttacaagataggaggtcgcatggtaagcttagaagcaatacaaagttatattcttcgtatcaagatgcctcgtcctggccagtggctgaagttattactcatacctaaaaaattcagaaccggagatgaacatcaagaatattccctcgagcattccgagcctctcttatactttgcactttgttcaggcaaccattctgaccctgcgattcgtgtttttacgcccaagggaatataccaagagctagaaaccgcaaaggaagagtacatccgcgcaacgtttggagtaaagaaagaccagaaactagtcttaccaaagatcattgagtcttttagcaaagactcaggtttaggtcaagcagcattgatggagatgattcaagaatgtctcccggaaacaatgaaaaaaaccataaagaaacttaactcagggagatcccgaaagagcattgtcgaatggacgcctcataatttcgtgtttcggtatttgatagccagagaacttgttagatga

SEQ ID NO: 79123 - protein, 540 aa, Arabidopsis thaliana
  peptide (1)..(540): Ceres Seq. ID no. 12649002
  misc_feature (315)..(460): Pfam Name: Protein of unknown function, DUF547 Pfam Description: Protein of unknown function, DUF547
  misc_feature (12)..(540): Homolog of NCBI NO: 7486263 NR Description: hypothetical protein At2g23700 [imported] -
  misc_feature (12)..(540): Homolog of NCBI NO: 15224054 NR Description: unknown protein; protein id: At2g23700.1 thaliana] >gi|20197175|gb|AAC17092.2| unknown protein thaliana] >gi|26451207|dbj|BAC42707.1| unknown protein
  misc_feature (12)..(540): Homolog of NCBI NO: 39104579 NR Description: unknown protein [Arabidopsis thaliana]
  misc_feature (57)..(540): Homolog of NCBI NO: 15240016 NR Description: putative protein; protein id: At5g66600.1 thaliana] >gi|10177541|dbj|BAB10936.1|
  misc_feature (202)..(538): Homolog of NCBI NO: 40539066 NR Description: hypothetical protein [Oryza sativa (japonica
  misc_feature (11)..(146): Homolog of NCBI NO: 40539066 NR Description: hypothetical protein [Oryza sativa (japonica
  misc_feature (144)..(539): Homolog of NCBI NO: 20330763 NR Description: Hypothetical protein [Oryza sativa (japonica
  misc_feature (59)..(167): Homolog of NCBI NO: 20330763 NR Description: Hypothetical protein [Oryza sativa (japonica
  misc_feature (24)..(540): Homolog of NCBI NO: 28916180 NR Description: putative ternary complex factor MIP1 [Antirrhinum
  misc_feature (1)..(273): Homolog of NCBI NO: 15224054 NR Description: unknown protein; protein id: At2g23700.1 thaliana] >gi|20197175|gb|AAC17092.2| unknown protein thaliana] >gi|26451207|dbj|BAC42707.1| unknown protein
MGFEDKKMLRQRHKRSKSCTVPEKKKLEDENSIDSSLDASQRLKLDLPRCGDKSFEMKKDLSPDVKFKSSLKQEIQELEKRLQNQFDVRGALEKALGYKTPSRDIKGDSTPKPPTELIKEIAVLELEVSHLEQYLLSLYRKAFDQQTSSEDIDSCVRRCQSSLNQRSTFNNRISPPEDSVFACHSQPLSIHEYIQNGSNDASLAEHMGTRISDHIFMTPNKLSEEMIKCASAIYSKLADPPSINHGFSSPSSSPSSTSEFSPQDQYDMWSPSFRKNSSFDDQFEFSGPYSSMIEVSHIHRNRKRRDLDLMNRNFSLLLKQLESVDPRKLTHQEKLAFWINVHNALVMHTFLANGIPQNNGKRFLLLSKPAYKIGGRMVSLEAIQSYILRIKMPRPGQWLKLLLIPKKFRTGDEHQEYSLEHSEPLLYFALCSGNHSDPAIRVFTPKGIYQELETAKEEYIRATFGVKKDQKLVLPKIIESFSKDSGLGQAALMEMIQECLPETMKKTIKKLNSGRSRKSIVEWTPHNFVFRYLIARELVR

SEQ ID NO: 79124 - protein, 533 aa, Arabidopsis thaliana
  peptide (1)..(533): Ceres Seq. ID no. 12649003
  misc_feature (308)..(453): Pfam Name: Protein of unknown function, DUF547 Pfam Description: Protein of unknown function, DUF547
  misc_feature (5)..(533): Homolog of NCBI NO: 7486263 NR Description: hypothetical protein At2g23700 [imported] -
  misc_feature (5)..(533): Homolog of NCBI NO: 15224054 NR Description: unknown protein; protein id: At2g23700.1 thaliana] >gi|20197175|gb|AAC17092.2| unknown protein thaliana] >gi|26451207|dbj|BAC42707.1| unknown protein
  misc_feature (5)..(533): Homolog of NCBI NO: 39104579 NR Description: unknown protein [Arabidopsis thaliana]
  misc_feature (50)..(533): Homolog of NCBI NO: 15240016 NR Description: putative protein; protein id: At5g66600.1 thaliana] >gi|10177541|dbj|BAB10936.1|
  misc_feature (195)..(531): Homolog of NCBI NO: 40539066 NR Description: hypothetical protein [Oryza sativa (japonica
  misc_feature (4)..(139): Homolog of NCBI NO: 40539066 NR Description: hypothetical protein [Oryza sativa (japonica
  misc_feature (137)..(532): Homolog of NCBI NO: 20330763 NR Description: Hypothetical protein [Oryza sativa (japonica
  misc_feature (52)..(160): Homolog of NCBI NO: 20330763 NR Description: Hypothetical protein [Oryza sativa (japonica
  misc_feature (17)..(533): Homolog of NCBI NO: 28916180 NR Description: putative ternary complex factor MIP1 [Antirrhinum
  misc_feature (1)..(266): Homolog of NCBI NO: 15224054 NR Description: unknown protein; protein id: At2g23700.1 thaliana] >gi|20197175|gb|AAC17092.2| unknown protein thaliana] >gi|26451207|dbj|BAC42707.1| unknown protein
MLRQRHKRSKSCTVPEKKKLEDENSIDSSLDASQRLKLDLPRCGDKSFEMKKDLSPDVKFKSSLKQEIQELEKRLQNQFDVRGALEKALGYKTPSRDIKGDSTPKPPTELIKEIAVLELEVSHLEQYLLSLYRKAFDQQTSSEDIDSCVRRCQSSLNQRSTFNNRISPPEDSVFACHSQPLSIHEYIQNGSNDASLAEHMGTRISDHIFMTPNKLSEEMIKCASAIYSKLADPPSINHGFSSPSSSPSSTSEFSPQDQYDMWSPSFRKNSSFDDQFEFSGPYSSMIEVSHIHRNRKRRDLDLMNRNFSLLLKQLESVDPRKLTHQEKLAFWINVHNALVMHTFLANGIPQNNGKRFLLLSKPAYKIGGRMVSLEAIQSYILRIKMPRPGQWLKLLLIPKKFRTGDEHQEYSLEHSEPLLYFALCSGNHSDPAIRVFTPKGIYQELETAKEEYIRATFGVKKDQKLVLPKIIESFSKDSGLGQAALMEMIQECLPETMKKTIKKLNSGRSRKSIVEWTPHNFVFRYLIARELVR

SEQ ID NO: 79125 - protein, 484 aa, Arabidopsis thaliana
  peptide (1)..(484): Ceres Seq. ID no. 12649004
  misc_feature (259)..(404): Pfam Name: Protein of unknown function, DUF547 Pfam Description: Protein of unknown function, DUF547
  misc_feature (1)..(484): Homolog of NCBI NO: 7486263 NR Description: hypothetical protein At2g23700 [imported] -
  misc_feature (1)..(484): Homolog of NCBI NO: 15224054 NR Description: unknown protein; protein id: At2g23700.1 thaliana] >gi|20197175|gb|AAC17092.2| unknown protein thaliana] >gi|26451207|dbj|BAC42707.1| unknown protein
  misc_feature (1)..(484): Homolog of NCBI NO: 39104579 NR Description: unknown protein [Arabidopsis thaliana]
  misc_feature (1)..(484): Homolog of NCBI NO: 15240016 NR Description: putative protein; protein id: At5g66600.1 thaliana] >gi|10177541|dbj|BAB10936.1|
  misc_feature (146)..(482): Homolog of NCBI NO: 40539066 NR Description: hypothetical protein [Oryza sativa (japonica
  misc_feature (1)..(90): Homolog of NCBI NO: 40539066 NR Description: hypothetical protein [Oryza sativa (japonica
  misc_feature (88)..(483): Homolog of NCBI NO: 20330763 NR Description: Hypothetical protein [Oryza sativa (japonica
  misc_feature (3)..(111): Homolog of NCBI NO: 20330763 NR Description: Hypothetical protein [Oryza sativa (japonica
  misc_feature (1)..(484): Homolog of NCBI NO: 28916180 NR Description: putative ternary complex factor MIP1 [Antirrhinum
  misc_feature (1)..(217): Homolog of NCBI NO: 15224054 NR Description: unknown protein; protein id: At2g23700.1 thaliana] >gi|20197175|gb|AAC17092.2| unknown protein thaliana] >gi|26451207|dbj|BAC42707.1| unknown protein
MKKDLSPDVKFKSSLKQEIQELEKRLQNQFDVRGALEKALGYKTPSRDIKGDSTPKPPTELIKEIAVLELEVSHLEQYLLSLYRKAFDQQTSSEDIDSCVRRCQSSLNQRSTFNNRISPPEDSVFACHSQPLSIHEYIQNGSNDASLAEHMGTRISDHIFMTPNKLSEEMIKCASAIYSKLADPPSINHGFSSPSSSPSSTSEFSPQDQYDMWSPSFRKNSSFDDQFEFSGPYSSMIEVSHIHRNRKRRDLDLMNRNFSLLLKQLESVDPRKLTHQEKLAFWINVHNALVMHTFLANGIPQNNGKRFLLLSKPAYKIGGRMVSLEAIQSYILRIKMPRPGQWLKLLLIPKKFRTGDEHQEYSLEHSEPLLYFALCSGNHSDPAIRVFTPKGIYQELETAKEEYIRATFGVKKDQKLVLPKIIESFSKDSGLGQAALMEMIQECLPETMKKTIKKLNSGRSRKSIVEWTPHNFVFRYLIARELVR

SEQ ID NO: 79126 - DNA, 1044 bp, Arabidopsis thaliana
  misc_feature (1)..(1044): Ceres Seq. ID no. 12649019
  misc_feature: MA Experiment ID: 20000173 Result: Down-regulated in Transcription
  misc_feature: MA Experiment 20000173 PARAMETER Experiment Name: At_42deg_Heat_P Parameter: Age (day) Value: 14
  misc_feature: MA Experiment 20000173 PARAMETER Experiment Name: At_42deg_Heat_P Parameter: Organism Value: A. thaliana
  misc_feature: MA Experiment 20000173 PARAMETER Experiment Name: At_42deg_Heat_P Parameter: Plant Line Value: WS
  misc_feature: MA Experiment 20000173 PARAMETER Experiment Name: At_42deg_Heat_P Parameter: Temperature (deg C) Value: 42 vs. 22
  misc_feature: MA Experiment 20000173 PARAMETER Experiment Name: At_42deg_Heat_P Parameter: Timepoint (hr) Value: 6
  misc_feature: MA Experiment 20000173 PARAMETER Experiment Name: At_42deg_Heat_P Parameter: Tissue Value: Aerial
  misc_feature: MA Experiment ID: 20000179 Result: Up-regulated in Transcription
  misc_feature: MA Experiment 20000179 PARAMETER Experiment Name: At_Germinating_Seeds_P Parameter: Age (hr) Value: 6 vs. 0
  misc_feature: MA Experiment 20000179 PARAMETER Experiment Name: At_Germinating_Seeds_P Parameter: Tissue Value: Germinating Seeds
  misc_feature: MA Experiment ID: 20000184 Result: Down-regulated in Transcription
  misc_feature: MA Experiment 20000184 PARAMETER Experiment Name: At_Shoots__P Parameter: Age (day) Value: 7
  misc_feature: MA Experiment 20000184 PARAMETER Experiment Name: At_Shoots__P Parameter: Tissue Value: Shoots vs. Whole Plant
  misc_feature: MA Experiment ID: 20000214 Result: Down-regulated in Transcription
  misc_feature: MA Experiment 20000214 PARAMETER Experiment Name: At_4deg_Cold_P Parameter: Timepoint (hr) Value: 6
  misc_feature: MA Experiment ID: 20000264 Result: Up-regulated in Transcription
  misc_feature: MA Experiment 20000264 PARAMETER Experiment Name: At_Open_Flower_P Parameter: Age (day) Value: 21
  misc_feature: MA Experiment 20000264 PARAMETER Experiment Name: At_Open_Flower_P Parameter: Plant Line Value: WS
  misc_feature: MA Experiment 20000264 PARAMETER Experiment Name: At_Open_Flower_P Parameter: Tissue Value: Open Flower vs. Whole Plant
  misc_feature: MA Experiment ID: 20000265 Result: Up-regulated in Transcription
  misc_feature: MA Experiment 20000265 PARAMETER Experiment Name: At_Open_Flower_P Parameter: Age (day) Value: 21
  misc_feature: MA Experiment 20000265 PARAMETER Experiment Name: At_Open_Flower_P Parameter: Plant Line Value: WS
  misc_feature: MA Experiment 20000265 PARAMETER Experiment Name: At_Open_Flower_P Parameter: Tissue Value: Closed Flower vs. Whole Plant
  misc_feature: MA Experiment ID: 20000286 Result: Up-regulated in Transcription
  misc_feature: MA Experiment 20000286 PARAMETER Experiment Name: At_Open_Flower_P Parameter: Age (day) Value: 21
  misc_feature: MA Experiment 20000286 PARAMETER Experiment Name: At_Open_Flower_P Parameter: Plant Line Value: WS
  misc_feature: MA Experiment 20000286 PARAMETER Experiment Name: At_Open_Flower_P Parameter: Tissue Value: Half Open vs. Whole Plant
  misc_feature: MA Experiment ID: 20000437 Result: Up-regulated in Transcription
  misc_feature: MA Experiment 20000437 PARAMETER Experiment Name: At_Drought_P Parameter: Age (day) Value: 8
  misc_feature: MA Experiment 20000437 PARAMETER Experiment Name: At_Drought_P Parameter: Organism Value: A. thaliana
  misc_feature: MA Experiment 20000437 PARAMETER Experiment Name: At_Drought_P Parameter: Plant Line Value: WS
  misc_feature: MA Experiment 20000437 PARAMETER Experiment Name: At_Drought_P Parameter: Timepoint (hr) Value: 24
  misc_feature: MA Experiment 20000437 PARAMETER Experiment Name: At_Drought_P Parameter: Tissue Value: Whole Plant
  misc_feature: MA Experiment 20000437 PARAMETER Experiment Name: At_Drought_P Parameter: Treatment Value: Drought vs. No Drought
  misc_feature: MA Experiment ID: 20000527 Result: Down-regulated in Transcription
  misc_feature: MA Experiment 20000527 PARAMETER Experiment Name: At_10percent_PEG_P Parameter: Age (day) Value: 20
  misc_feature: MA Experiment 20000527 PARAMETER Experiment Name: At_10percent_PEG_P Parameter: Organism Value: A. thaliana
  misc_feature: MA Experiment 20000527 PARAMETER Experiment Name: At_10percent_PEG_P Parameter: Plant Line Value: WS
  misc_feature: MA Experiment 20000527 PARAMETER Experiment Name: At_10percent_PEG_P Parameter: Timepoint (day) Value: 20
  misc_feature: MA Experiment 20000527 PARAMETER Experiment Name: At_10percent_PEG_P Parameter: Tissue Value: Whole Plant
  misc_feature: MA Experiment 20000527 PARAMETER Experiment Name: At_10percent_PEG_P Parameter: Treatment Value: 10percent PEG vs. No Treatment
  misc_feature: MA Experiment ID: 20000794 Result: Up-regulated in Transcription
  misc_feature: MA Experiment 20000794 PARAMETER Experiment Name: At_Petals_P Parameter: Age (day) Value: 23-25 days
  misc_feature: MA Experiment 20000794 PARAMETER Experiment Name: At_Petals_P Parameter: Plant Line Value: WS
  misc_feature: MA Experiment 20000794 PARAMETER Experiment Name: At_Petals_P Parameter: Tissue Value: Petals vs. Whole plant
  misc_feature: MA Experiment ID: 20001247 Result: Up-regulated in Transcription
  misc_feature: MA Experiment 20001247 PARAMETER Experiment Name: At_Far-red-induction_P Parameter: Age (day) Value: 7
  misc_feature: MA Experiment 20001247 PARAMETER Experiment Name: At_Far-red-induction_P Parameter: Light Value: Far-red vs. White
  misc_feature: MA Experiment 20001247 PARAMETER Experiment Name: At_Far-red-induction_P Parameter: Organism Value: A. thaliana
  misc_feature: MA Experiment 20001247 PARAMETER Experiment Name: At_Far-red-induction_P Parameter: Plant Line Value: Columbia
  misc_feature: MA Experiment 20001247 PARAMETER Experiment Name: At_Far-red-induction_P Parameter: Timepoint (hr) Value: 1
  misc_feature: MA Experiment 20001247 PARAMETER Experiment Name: At_Far-red-induction_P Parameter: Tissue Value: Whole Plant
  misc_feature: MA Experiment ID: 20001450 Result: Up-regulated in Transcription
  misc_feature: MA Experiment 20001450 PARAMETER Experiment Name: At_Far-red-induction_P Parameter: Age (day) Value: 7
  misc_feature: MA Experiment 20001450 PARAMETER Experiment Name: At_Far-red-induction_P Parameter: Light Value: Far-red vs. White
  misc_feature: MA Experiment 20001450 PARAMETER Experiment Name: At_Far-red-induction_P Parameter: Organism Value: A. thaliana
  misc_feature: MA Experiment 20001450 PARAMETER Experiment Name: At_Far-red-induction_P Parameter: Plant Line Value: Columbia
  misc_feature: MA Experiment 20001450 PARAMETER Experiment Name: At_Far-red-induction_P Parameter: Timepoint (hr) Value: 8
  misc_feature: MA Experiment 20001450 PARAMETER Experiment Name: At_Far-red-induction_P Parameter: Tissue Value: Whole Plant
  misc_feature: MA Experiment ID: 20001904 Result: Up-regulated in Transcription
  misc_feature: MA Experiment 20001904 PARAMETER Experiment Name: At_Drought_Reproduction_P Parameter: Age (day) Value: 37
  misc_feature: MA Experiment 20001904 PARAMETER Experiment Name: At_Drought_Reproduction_P Parameter: Organism Value: A. thaliana
  misc_feature: MA Experiment 20001904 PARAMETER Experiment Name: At_Drought_Reproduction_P Parameter: Plant Line Value: WS
  misc_feature: MA Experiment 20001904 PARAMETER Experiment Name: At_Drought_Reproduction_P Parameter: Timepoint (day) Value: 7
  misc_feature: MA Experiment 20001904 PARAMETER Experiment Name: At_Drought_Reproduction_P Parameter: Tissue Value: Rosettes
  misc_feature: MA Experiment 20001904 PARAMETER Experiment Name: At_Drought_Reproduction_P Parameter: Treatment Value: Drought vs. No Drought
  misc_feature: MA Experiment ID: 20001905 Result: Up-regulated in Transcription
  misc_feature: MA Experiment 20001905 PARAMETER Experiment Name: At_Drought_Reproduction_P Parameter: Age (day) Value: 40
  misc_feature: MA Experiment 20001905 PARAMETER Experiment Name: At_Drought_Reproduction_P Parameter: Organism Value: A. thaliana
  misc_feature: MA Experiment 20001905 PARAMETER Experiment Name: At_Drought_Reproduction_P Parameter: Plant Line Value: WS
  misc_feature: MA Experiment 20001905 PARAMETER Experiment Name: At_Drought_Reproduction_P Parameter: Timepoint (day) Value: 10
  misc_feature: MA Experiment 20001905 PARAMETER Experiment Name: At_Drought_Reproduction_P Parameter: Tissue Value: Rosettes
  misc_feature: MA Experiment 20001905 PARAMETER Experiment Name: At_Drought_Reproduction_P Parameter: Treatment Value: Drought vs. No Drought
atggcgatgaggaagcttttatcgaagaaactcttcaatatcacgaatgttgcttcacagagtcttatgaattgtcgcatttcgtcttcttcgttagccgtacgaaccagagttccgaatgattcaacagatacaaccaaaatcgcaccggagcctggagatttggcgatgtcgcgaaggttcatgcataacagtgctatgattaggccggcggagattatgcagatgccggtgggagagagtttgattgagaaactccgtgagattgatggaagcaaggatcggattcgattagacggactttctccgccggagagggagacgagtttgacggtggcggatacgaagaagctgcttagagcggcgcagatcgagattgtgaaatcgaagctaagagaaacgggaagaagctggatgccgtataaggagtttgttagcgtttgtggtgaagcttcttcagatccagatctcggatctaaaatcgcgaagatgcttgatgattcagcaaacgtcatcgttttgggagattccgtttgtattagacctgatcaggtactttcttcgttcttcttctctagccttttagttaccaaatccattgaaggactgcttcctttgccaaagatccataacccaaatgaccctcggagaatcgagtttaaagagcttgaagctgaaaaggcagtgatcgatgtgaaagctcacactttggtgcggaaagagctttgggctggtctcggttacttgatcctacagactgcggggttcatgaggctaacgttttgggaactctcgtgggacgtgatggagccaatctgtttctatgtcacgtccgtgtactttatggctggttacgcgtttttcctcaggacatcgaaagagccttcttttgaagggttttaccaaagcaggttcgaggcgaaacagagaaagttgatgaatgagtatgagtttgatctggagaggtataatgaactgaagaagctgttttgctctaagccttcggatcatgtttccaagattcttggagctatcaagagttaa

SEQ ID NO: 79127 - protein, 347 aa, Arabidopsis thaliana
  peptide (1)..(347): Ceres Seq. ID no. 12649020
  misc_feature (147)..(339): Pfam Name: Protein of unknown function, DUF607 Pfam Description: Protein of unknown function, DUF607
  misc_feature (1)..(347): Homolog of NCBI NO: 15224063 NR Description: hypothetical protein; protein id: At2g23790.1
  misc_feature (1)..(347): Homolog of NCBI NO: 24496456 NR Description: hypothetical protein [Arabidopsis thaliana]
  misc_feature (3)..(347): Homolog of NCBI NO: 15234535 NR Description: putative protein; protein id: At4g36820.1
  misc_feature (20)..(329): Homolog of NCBI NO: 14596231 NR Description: Unknown protein [Arabidopsis thaliana]
  misc_feature (20)..(329): Homolog of NCBI NO: 15240047 NR Description: putative protein; protein id: At5g66650.1, by cDNA: gi_14596230 [Arabidopsis thaliana] contains similarity to unknown
  misc_feature (59)..(334): Homolog of NCBI NO: 37535778 NR Description: unknown protein [Oryza sativa (japonica
  misc_feature (96)..(334): Homolog of NCBI NO: 15239011 NR Description: unknown protein; protein id: At5g42610.1 thaliana] >gi|10177139|dbj|BAB10499.1| gene_id:MFO20.2~unknown
  misc_feature (1)..(328): Homolog of NCBI NO: 20330769 NR Description: Hypothetical protein [Oryza sativa (japonica
  misc_feature (105)..(339): Homolog of NCBI NO: 18391039 NR Description: Expressed protein; protein id: At1g09575.1,
  misc_feature (107)..(334): Homolog of NCBI NO: 34909244 NR Description: B1148D12.10 [Oryza sativa (japonica
MAMRKLLSKKLFNITNVASQSLMNCRISSSSLAVRTRVPNDSTDTTKIAPEPGDLAMSRRFMHNSAMIRPAEIMQMPVGESLIEKLREIDGSKDRIRLDGLSPPERETSLTVADTKKLLRAAQIEIVKSKLRETGRSWMPYKEFVSVCGEASSDPDLGSKIAKMLDDSANVIVLGDSVCIRPDQVLSSFFFSSLLVTKSIEGLLPLPKIHNPNDPRRIEFKELEAEKAVIDVKAHTLVRKELWAGLGYLILQTAGFMRLTFWELSWDVMEPICFYVTSVYFMAGYAFFLRTSKEPSFEGFYQSRFEAKQRKLMNEYEFDLERYNELKKLFCSKPSDHVSKILGAIKS

SEQ ID NO: 79128 - protein, 345 aa, Arabidopsis thaliana
  peptide (1)..(345): Ceres Seq. ID no. 12649021
  misc_feature (145)..(337): Pfam Name: Protein of unknown function, DUF607 Pfam Description: Protein of unknown function, DUF607
  misc_feature (1)..(345): Homolog of NCBI NO: 15224063 NR Description: hypothetical protein; protein id: At2g23790.1
  misc_feature (1)..(345): Homolog of NCBI NO: 24496456 NR Description: hypothetical protein [Arabidopsis thaliana]
  misc_feature (1)..(345): Homolog of NCBI NO: 15234535 NR Description: putative protein; protein id: At4g36820.1
  misc_feature (18)..(327): Homolog of NCBI NO: 14596231 NR Description: Unknown protein [Arabidopsis thaliana]
  misc_feature (18)..(327): Homolog of NCBI NO: 15240047 NR Description: putative protein; protein id: At5g66650.1, by cDNA: gi_14596230 [Arabidopsis thaliana] contains similarity to unknown
  misc_feature (57)..(332): Homolog of NCBI NO: 37535778 NR Description: unknown protein [Oryza sativa (japonica
  misc_feature (94)..(332): Homolog of NCBI NO: 15239011 NR Description: unknown protein; protein id: At5g42610.1 thaliana] >gi|10177139|dbj|BAB10499.1| gene_id:MFO20.2~unknown
  misc_feature (1)..(326): Homolog of NCBI NO: 20330769 NR Description: Hypothetical protein [Oryza sativa (japonica
  misc_feature (103)..(337): Homolog of NCBI NO: 18391039 NR Description: Expressed protein; protein id: At1g09575.1,
  misc_feature (105)..(332): Homolog of NCBI NO: 34909244 NR Description: B1148D12.10 [Oryza sativa (japonica
MRKLLSKKLFNITNVASQSLMNCRISSSSLAVRTRVPNDSTDTTKIAPEPGDLAMSRRFMHNSAMIRPAEIMQMPVGESLIEKLREIDGSKDRIRLDGLSPPERETSLTVADTKKLLRAAQIEIVKSKLRETGRSWMPYKEFVSVCGEASSDPDLGSKIAKMLDDSANVIVLGDSVCIRPDQVLSSFFFSSLLVTKSIEGLLPLPKIHNPNDPRRIEFKELEAEKAVIDVKAHTLVRKELWAGLGYLILQTAGFMRLTFWELSWDVMEPICFYVTSVYFMAGYAFFLRTSKEPSFEGFYQSRFEAKQRKLMNEYEFDLERYNELKKLFCSKPSDHVSKILGAIKS

SEQ ID NO: 79129 - protein, 325 aa, Arabidopsis thaliana
  peptide (1)..(325): Ceres Seq. ID no. 12649022
  misc_feature (125)..(317): Pfam Name: Protein of unknown function, DUF607 Pfam Description: Protein of unknown function, DUF607
  misc_feature (1)..(325): Homolog of NCBI NO: 15224063 NR Description: hypothetical protein; protein id: At2g23790.1
  misc_feature (1)..(325): Homolog of NCBI NO: 24496456 NR Description: hypothetical protein [Arabidopsis thaliana]
  misc_feature (1)..(325): Homolog of NCBI NO: 15234535 NR Description: putative protein; protein id: At4g36820.1
  misc_feature (1)..(307): Homolog of NCBI NO: 14596231 NR Description: Unknown protein [Arabidopsis thaliana]
  misc_feature (1)..(307): Homolog of NCBI NO: 15240047 NR Description: putative protein; protein id: At5g66650.1, by cDNA: gi_14596230 [Arabidopsis thaliana] contains similarity to unknown
  misc_feature (37)..(312): Homolog of NCBI NO: 37535778 NR Description: unknown protein [Oryza sativa (japonica
  misc_feature (74)..(312): Homolog of NCBI NO: 15239011 NR Description: unknown protein; protein id: At5g42610.1 thaliana] >gi|10177139|dbj|BAB10499.1| gene_id:MFO20.2~unknown
  misc_feature (1)..(306): Homolog of NCBI NO: 20330769 NR Description: Hypothetical protein [Oryza sativa (japonica
  misc_feature (83)..(317): Homolog of NCBI NO: 18391039 NR Description: Expressed protein; protein id: At1g09575.1,
  misc_feature (85)..(312): Homolog of NCBI NO: 34909244 NR Description: B1148D12.10 [Oryza sativa (japonica
MNCRISSSSLAVRTRVPNDSTDTTKIAPEPGDLAMSRRFMHNSAMIRPAEIMQMPVGESLIEKLREIDGSKDRIRLDGLSPPERETSLTVADTKKLLRAAQIEIVKSKLRETGRSWMPYKEFVSVCGEASSDPDLGSKIAKMLDDSANVIVLGDSVCIRPDQVLSSFFFSSLLVTKSIEGLLPLPKIHNPNDPRRIEFKELEAEKAVIDVKAHTLVRKELWAGLGYLILQTAGFMRLTFWELSWDVMEPICFYVTSVYFMAGYAFFLRTSKEPSFEGFYQSRFEAKQRKLMNEYEFDLERYNELKKLFCSKPSDHVSKILGAIKS

SEQ ID NO: 79130 - DNA, 717 bp, Arabidopsis thaliana
  misc_feature (1)..(717): Ceres Seq. ID no. 12649050
  misc_feature: MA Experiment ID: 108434 Result: Up-regulated in Transcription
  misc_feature: MA Experiment 108434 PARAMETER Experiment Name: At_Root_Tips_cDNA_P Parameter: Tissue Value: Root Tips
  misc_feature: MA Experiment ID: 108462 Result: Down-regulated in Transcription
  misc_feature: MA Experiment 108462 PARAMETER Experiment Name: At_Germinating_Seeds_cDNA_P Parameter: Age (day) Value: 2 vs. 0
  misc_feature: MA Experiment 108462 PARAMETER Experiment Name: At_Germinating_Seeds_cDNA_P Parameter: Tissue Value: Germinating Seeds
  misc_feature: MA Experiment ID: 108463 Result: Down-regulated in Transcription
  misc_feature: MA Experiment 108463 PARAMETER Experiment Name: At_Germinating_Seeds_cDNA_P Parameter: Age (day) Value: 3 vs. 0
  misc_feature: MA Experiment 108463 PARAMETER Experiment Name: At_Germinating_Seeds_cDNA_P Parameter: Tissue Value: Germinating Seeds
  misc_feature: MA Experiment ID: 108464 Result: Down-regulated in Transcription
  misc_feature: MA Experiment 108464 PARAMETER Experiment Name: At_Germinating_Seeds_cDNA_P Parameter: Age (day) Value: 4 vs. 0
  misc_feature: MA Experiment 108464 PARAMETER Experiment Name: At_Germinating_Seeds_cDNA_P Parameter: Tissue Value: Germinating Seeds
tttcttttttaatccctttgtttctctgtggtattcaacaaatttgtctcgaatttatagagctcgaagcttcaaggaagttataatggctagtgaagatgaatcgattgaacaaaaagctgctgctcgtaaagaggcacttaaagctctaagggcagctcaggaactgtctgagaccaaggaagacggagaggatgaagctgtcgaagaagatggtccagccatgaagtttagaaactatgttccccaagctaaggagcttcaggatggtaaactagcgccaccagagctacccaaattcgaagatccgatcgttgcacttccacctgctgtagagaagaaagaggacccatttgttaacatcgctccaaagaagccaaactgggacctccgaagagatgtgcagaagaagcttgataagctcgaaaggcggactcaaaaggcaatgcataaactcatggaggagcaagagaaagaacgtgagatggctgaagctgatggtaacaccatagaaagttgaaacccaacgacgtcatcaaagaaagccaccactgaacagtatattctactcgattttgtttaactgttaaagcattcgaagtgagtagaccatgtaaaatcctacagccattggcatagacatagtaggtttatcttcttgtgtgaatcaaagaaagtcgcaatttatttccgagtagaattaagtgcggtccggtt

SEQ ID NO: 79131 - protein, 172 aa, Arabidopsis thaliana
  peptide (1)..(172): Ceres Seq. ID no. 12649051
  misc_feature (29)..(172): Homolog of NCBI NO: 18397111 NR Description: expressed protein; protein id: At3g05070.1, by cDNA: 142966. [Arabidopsis thaliana] unknown protein [Arabidopsis thaliana]
  misc_feature (36)..(161): Homolog of NCBI NO: 20072383 NR Description: Similar to RIKEN cDNA 2700094L05 gene [Mus
  misc_feature (36)..(161): Homolog of NCBI NO: 21389497 NR Description: hypothetical protein MGC23918 [Homo sapiens]
  misc_feature (36)..(161): Homolog of NCBI NO: 21756313 NR Description: unnamed protein product [Homo sapiens]
  misc_feature (36)..(169): Homolog of NCBI NO: 34866382 NR Description: similar to hypothetical protein MGC23918 [Rattus
  misc_feature (36)..(169): Homolog of NCBI NO: 33469009 NR Description: RIKEN cDNA 2700094L05 [Mus musculus]
  misc_feature (43)..(169): Homolog of NCBI NO: 20874062 NR Description: similar to hypothetical protein MGC23918 [Homo
  misc_feature (36)..(164): Homolog of NCBI NO: 24651238 NR Description: CG15525-PA [Drosophila melanogaster]
  misc_feature (44)..(164): Homolog of NCBI NO: 21430888 NR Description: SD23244p [Drosophila melanogaster]
  misc_feature (29)..(159): Homolog of NCBI NO: 39581407 NR Description: Hypothetical protein CBG22501 [Caenorhabditis
FFFNPFVSLWYSTNLSRIYRARSFKEVIMASEDESIEQKAAARKEALKALRAAQELSETKEDGEDEAVEEDGPAMKFRNYVPQAKELQDGKLAPPELPKFEDPIVALPPAVEKKEDPFVNIAPKKPNWDLRRDVQKKLDKLERRTQKAMHKLMEEQEKEREMAEADGNTIES

SEQ ID NO: 79132 - protein, 144 aa, Arabidopsis thaliana; identical to SEQ ID NO: 42293
  peptide (1)..(144): Ceres Seq. ID no. 12649052
  misc_feature (1)..(144): Homolog of NCBI NO: 18397111 NR Description: expressed protein; protein id: At3g05070.1, by cDNA: 142966. [Arabidopsis thaliana] unknown protein [Arabidopsis thaliana]
  misc_feature (8)..(133): Homolog of NCBI NO: 20072383 NR Description: Similar to RIKEN cDNA 2700094L05 gene [Mus
  misc_feature (8)..(133): Homolog of NCBI NO: 21756313 NR Description: unnamed protein product [Homo sapiens]
  misc_feature (8)..(133): Homolog of NCBI NO: 21389497 NR Description: hypothetical protein MGC23918 [Homo sapiens]
  misc_feature (8)..(141): Homolog of NCBI NO: 34866382 NR Description: similar to hypothetical protein MGC23918 [Rattus
  misc_feature (8)..(141): Homolog of NCBI NO: 33469009 NR Description: RIKEN cDNA 2700094L05 [Mus musculus]
  misc_feature (15)..(141): Homolog of NCBI NO: 20874062 NR Description: similar to hypothetical protein MGC23918 [Homo
  misc_feature (8)..(136): Homolog of NCBI NO: 24651238 NR Description: CG15525-PA [Drosophila melanogaster]
  misc_feature (16)..(136): Homolog of NCBI NO: 21430888 NR Description: SD23244p [Drosophila melanogaster]
  misc_feature (1)..(131): Homolog of NCBI NO: 39581407 NR Description: Hypothetical protein CBG22501 [Caenorhabditis

SEQ ID NO: 79133 - protein, 98 aa, Arabidopsis thaliana; identical to SEQ ID NO: 39091
  peptide (1)..(98): Ceres Seq. ID no. 12649053
  misc_feature (1)..(98): Homolog of NCBI NO: 18397111 NR Description: expressed protein; protein id: At3g05070.1, by cDNA: 142966. [Arabidopsis thaliana] unknown protein [Arabidopsis thaliana]
  misc_feature (1)..(87): Homolog of NCBI NO: 20072383 NR Description: Similar to RIKEN cDNA 2700094L05 gene [Mus
  misc_feature (1)..(87): Homolog of NCBI NO: 21756313 NR Description: unnamed protein product [Homo sapiens]
  misc_feature (1)..(87): Homolog of NCBI NO: 21389497 NR Description: hypothetical protein MGC23918 [Homo sapiens]
  misc_feature (1)..(95): Homolog of NCBI NO: 34866382 NR Description: similar to hypothetical protein MGC23918 [Rattus
  misc_feature (1)..(95): Homolog of NCBI NO: 33469009 NR Description: RIKEN cDNA 2700094L05 [Mus musculus]
  misc_feature (1)..(95): Homolog of NCBI NO: 20874062 NR Description: similar to hypothetical protein MGC23918 [Homo
  misc_feature (1)..(90): Homolog of NCBI NO: 24651238 NR Description: CG15525-PA [Drosophila melanogaster]
  misc_feature (1)..(90): Homolog of NCBI NO: 21430888 NR Description: SD23244p [Drosophila melanogaster]
  misc_feature (1)..(85): Homolog of NCBI NO: 39581407 NR Description: Hypothetical protein CBG22501 [Caenorhabditis

SEQ ID NO: 79134 - DNA, 1470 bp, Arabidopsis thaliana
  misc_feature (1)..(1470): Ceres Seq. ID no. 12649056
  misc_feature: MA Experiment ID: 20000307 Result: Up-regulated in Transcription
  misc_feature: MA Experiment 20000307 PARAMETER Experiment Name: At_Germinating_Seeds_Sub_P Parameter: Age (hr) Value: 24 vs. 0
  misc_feature: MA Experiment 20000307 PARAMETER Experiment Name: At_Germinating_Seeds_Sub_P Parameter: Organism Value: A. thaliana
  misc_feature: MA Experiment 20000307 PARAMETER Experiment Name: At_Germinating_Seeds_Sub_P Parameter: Plant Line Value: WS
  misc_feature: MA Experiment 20000307 PARAMETER Experiment Name: At_Germinating_Seeds_Sub_P Parameter: Tissue Value: Germinating Seeds
  misc_feature: MA Experiment ID: 20000314 Result: Up-regulated in Transcription
  misc_feature: MA Experiment 20000314 PARAMETER Experiment Name: At_14day_Shoots-Roots_Sub_P Parameter: Age (day) Value: 14
  misc_feature: MA Experiment 20000314 PARAMETER Experiment Name: At_14day_Shoots-Roots_Sub_P Parameter: Organism Value: A. thaliana
  misc_feature: MA Experiment 20000314 PARAMETER Experiment Name: At_14day_Shoots-Roots_Sub_P Parameter: Plant Line Value: WS
  misc_feature: MA Experiment 20000314 PARAMETER Experiment Name: At_14day_Shoots-Roots_Sub_P Parameter: Tissue Value: Roots vs. Whole Plant
  misc_feature: MA Experiment ID: 20000440 Result: Up-regulated in Transcription
  misc_feature: MA Experiment 20000440 PARAMETER Experiment Name: At_Closed-Flower__Sub_P Parameter: Tissue Value: Closed Flower vs. Whole Plant
atggagggagagaatagtagcattgagaaaggattattattgataaggaaggaagagagtgcaaatacaactccatttcttgtcttcaccactttcatcattgtctctgcttccttctcctttggcgttgccttaggacatactgctggtacaatggcctccattatggaagatcttgatctttctatcacacaattttctgtatttggttcactattgacatttggaggaatgattggagcactatttagcgccacaattgcagattcatttggttgtaaaatgactttgtggatcactgaggtattctgcataagtggatggcttgcaattgcactagccaagaacattatttggctggacttgggacgattctttgtaggaattggagttggtctccttagttacgtggttcctgtatatatcgcagaaataactcctaaaactgtgcgaggcacttttacatttagtaatcagttattgcaaaattgtggagtcgcaacggcgtattaccttggaaatttcatgtcatggagaataatagccttaataggcatacttccatgcttgatacaacttgttgggttgtttttcgtccccgaatctccaagatggttggcaaaagaaggtcgtgacgaagaatgtgaggttgttcttcagaaactaagaggagatgaagcggatattgtgaaggaaactcaagaaatcttgatttctgttgaggcttctgcgaatatcagcatgcgtagtcttttcaaaaagaaatatactcatcaacttacaattggtataggtttgatgcttctgcaacagttaagtgggagtgcaggattaggttattacactggtagcgtatttgatcttgccggatttccttctcggattgggatgacggtgttgtctattgtcgtggtaccaaaagctatattgggtctgatacttgtggaacgatggggaagaagaccgcttcttatggcatcggcatttggtttatgtttaggttgtatctctcttgcattagcgtttggattgaaaggtgtccctggggttaatgtaaatgttactcccactttggcatttataggaataatggtaagtaagaaccaattcagtaatttatattatcttcaaaataaaaaatcatacttttttgttctttgtaaatgttattttttagtaataacattcgtaatgatgttcgcagctggattaggagccctaccatggatcataatgtctgagatatttccgatggacatgaaagtagtagctgggagtttagtaagcataacaaattggtttactggttggatcgtcagctactgtttcaattttatgcttctttggagcccaaccggaacttttatcatatttgctacgataagtggagcaacggttgtattcgcatggtgtttagtgcctgagactcgaggattgactttagaagaaatccaacgacgtgctaattaa

SEQ ID NO: 79135 - protein, 489 aa, Arabidopsis thaliana
  peptide (1)..(489): Ceres Seq. ID no. 12649057
  misc_feature (30)..(364): Pfam Name: Sugar (and other) transporter Pfam Description: Sugar (and other) transporter
  misc_feature (1)..(364): Homolog of NCBI NO: 22330860 NR Description: sugar transporter, putative; protein id: supported by cDNA: gi_17380763, supported by cDNA: gi_20259596 thaliana] >gi|17380764|gb|AAL36212.1| putative sugar transporter
  misc_feature (389)..(485): Homolog of NCBI NO: 22330860 NR Description: sugar transporter, putative; protein id: supported by cDNA: gi_17380763, supported by cDNA: gi_20259596 thaliana] >gi|17380764|gb|AAL36212.1| putative sugar transporter
  misc_feature (1)..(364): Homolog of NCBI NO: 7596771 NR Description: sugar transporter, putative [Arabidopsis thaliana]
  misc_feature (389)..(453): Homolog of NCBI NO: 7596771 NR Description: sugar transporter, putative [Arabidopsis thaliana]
  misc_feature (1)..(325): Homolog of NCBI NO: 30679401 NR Description: sugar transporter, putative [Arabidopsis thaliana]
  misc_feature (125)..(364): Homolog of NCBI NO: 6686833 NR Description: putative sugar transporter [Arabidopsis thaliana]
  misc_feature (389)..(485): Homolog of NCBI NO: 6686833 NR Description: putative sugar transporter [Arabidopsis thaliana]
  misc_feature (4)..(364): Homolog of NCBI NO: 18390957 NR Description: putative sugar transport protein, ERD6; protein At1g08920.1, supported by cDNA: gi_14194108 [Arabidopsis >gi|14194109|gb|AAK56249.1|AF367260_1 At1g08920/F7G19_20
  misc_feature (393)..(485): Homolog of NCBI NO: 18390957 NR Description: putative sugar transport protein, ERD6; protein At1g08920.1, supported by cDNA: gi_14194108 [Arabidopsis >gi|14194109|gb|AAK56249.1|AF367260_1 At1g08920/F7G19_20
  misc_feature (1)..(365): Homolog of NCBI NO: 18421106 NR Description: sugar transporter-like protein; protein id: supported by cDNA: gi_14585698, supported by cDNA: gi_15294181
MEGENSSIEKGLLLIRKEESANTTPFLVFTTFIIVSASFSFGVALGHTAGTMASIMEDLDLSITQFSVFGSLLTFGGMIGALFSATIADSFGCKMTLWITEVFCISGWLAIALAKNIIWLDLGRFFVGIGVGLLSYVVPVYIAEITPKTVRGTFTFSNQLLQNCGVATAYYLGNFMSWRIIALIGILPCLIQLVGLFFVPESPRWLAKEGRDEECEVVLQKLRGDEADIVKETQEILISVEASANISMRSLFKKKYTHQLTIGIGLMLLQQLSGSAGLGYYTGSVFDLAGFPSRIGMTVLSIVVVPKAILGLILVERWGRRPLLMASAFGLCLGCISLALAFGLKGVPGVNVNVTPTLAFIGIMVSKNQFSNLYYLQNKKSYFFVLCKCYFLVITFVMMFAAGLGALPWIIMSEIFPMDMKVVAGSLVSITNWFTGWIVSYCFNFMLLWSPTGTFIIFATISGATVVFAWCLVPETRGLTLEEIQRRAN

SEQ ID NO: 79136 - protein, 438 aa, Arabidopsis thaliana
  peptide (1)..(438): Ceres Seq. ID no. 12649058
  misc_feature (1)..(313): Pfam Name: Sugar (and other) transporter Pfam Description: Sugar (and other) transporter
  misc_feature (1)..(313): Homolog of NCBI NO: 22330860 NR Description: sugar transporter, putative; protein id: supported by cDNA: gi_17380763, supported by cDNA: gi_20259596 thaliana] >gi|17380764|gb|AAL36212.1| putative sugar transporter
  misc_feature (338)..(434): Homolog of NCBI NO: 22330860 NR Description: sugar transporter, putative; protein id: supported by cDNA: gi_17380763, supported by cDNA: gi_20259596 thaliana] >gi|17380764|gb|AAL36212.1| putative sugar transporter
  misc_feature (1)..(313): Homolog of NCBI NO: 7596771 NR Description: sugar transporter, putative [Arabidopsis thaliana]
  misc_feature (338)..(402): Homolog of NCBI NO: 7596771 NR Description: sugar transporter, putative [Arabidopsis thaliana]
  misc_feature (1)..(274): Homolog of NCBI NO: 30679401 NR Description: sugar transporter, putative [Arabidopsis thaliana]
  misc_feature (74)..(313): Homolog of NCBI NO: 6686833 NR Description: putative sugar transporter [Arabidopsis thaliana]
  misc_feature (338)..(434): Homolog of NCBI NO: 6686833 NR Description: putative sugar transporter [Arabidopsis thaliana]
  misc_feature (1)..(313): Homolog of NCBI NO: 18390957 NR Description: putative sugar transport protein, ERD6; protein At1g08920.1, supported by cDNA: gi_14194108 [Arabidopsis >gi|14194109|gb|AAK56249.1|AF367260_1 At1g08920/F7G19_20
  misc_feature (342)..(434): Homolog of NCBI NO: 18390957 NR Description: putative sugar transport protein, ERD6; protein At1g08920.1, supported by cDNA: gi_14194108 [Arabidopsis >gi|14194109|gb|AAK56249.1|AF367260_1 At1g08920/F7G19_20
  misc_feature (1)..(314): Homolog of NCBI NO: 18421106 NR Description: sugar transporter-like protein; protein id: supported by cDNA: gi_14585698, supported by cDNA: gi_15294181
MASIMEDLDLSITQFSVFGSLLTFGGMIGALFSATIADSFGCKMTLWITEVFCISGWLAIALAKNIIWLDLGRFFVGIGVGLLSYVVPVYIAEITPKTVRGTFTFSNQLLQNCGVATAYYLGNFMSWRIIALIGILPCLIQLVGLFFVPESPRWLAKEGRDEECEVVLQKLRGDEADIVKETQEILISVEASANISMRSLFKKKYTHQLTIGIGLMLLQQLSGSAGLGYYTGSVFDLAGFPSRIGMTVLSIVVVPKAILGLILVERWGRRPLLMASAFGLCLGCISLALAFGLKGVPGVNVNVTPTLAFIGIMVSKNQFSNLYYLQNKKSYFFVLCKCYFLVITFVMMFAAGLGALPWIIMSEIFPMDMKVVAGSLVSITNWFTGWIVSYCFNFMLLWSPTGTFIIFATISGATVVFAWCLVPETRGLTLEEIQRRAN

SEQ ID NO: 79137 - protein, 434 aa, Arabidopsis thaliana
  peptide (1)..(434): Ceres Seq. ID no. 12649059
  misc_feature (1)..(309): Pfam Name: Sugar (and other) transporter Pfam Description: Sugar (and other) transporter
  misc_feature (1)..(309): Homolog of NCBI NO: 22330860 NR Description: sugar transporter, putative; protein id: supported by cDNA: gi_17380763, supported by cDNA: gi_20259596 thaliana] >gi|17380764|gb|AAL36212.1| putative sugar transporter
  misc_feature (334)..(430): Homolog of NCBI NO: 22330860 NR Description: sugar transporter, putative; protein id: supported by cDNA: gi_17380763, supported by cDNA: gi_20259596 thaliana] >gi|17380764|gb|AAL36212.1| putative sugar transporter
  misc_feature (1)..(309): Homolog of NCBI NO: 7596771 NR Description: sugar transporter, putative [Arabidopsis thaliana]
  misc_feature (334)..(398): Homolog of NCBI NO: 7596771 NR Description: sugar transporter, putative [Arabidopsis thaliana]
  misc_feature (1)..(270): Homolog of NCBI NO: 30679401 NR Description: sugar transporter, putative [Arabidopsis thaliana]
  misc_feature (70)..(309): Homolog of NCBI NO: 6686833 NR Description: putative sugar transporter [Arabidopsis thaliana]
  misc_feature (334)..(430): Homolog of NCBI NO: 6686833 NR Description: putative sugar transporter [Arabidopsis thaliana]
  misc_feature (1)..(309): Homolog of NCBI NO: 18390957 NR Description: putative sugar transport protein, ERD6; protein At1g08920.1, supported by cDNA: gi_14194108 [Arabidopsis >gi|14194109|gb|AAK56249.1|AF367260_1 At1g08920/F7G19_20
  misc_feature (338)..(430): Homolog of NCBI NO: 18390957 NR Description: putative sugar transport protein, ERD6; protein At1g08920.1, supported by cDNA: gi_14194108 [Arabidopsis >gi|14194109|gb|AAK56249.1|AF367260_1 At1g08920/F7G19_20
  misc_feature (1)..(310): Homolog of NCBI NO: 18421106 NR Description: sugar transporter-like protein; protein id: supported by cDNA: gi_14585698, supported by cDNA: gi_15294181
MEDLDLSITQFSVFGSLLTFGGMIGALFSATIADSFGCKMTLWITEVFCISGWLAIALAKNIIWLDLGRFFVGIGVGLLSYVVPVYIAEITPKTVRGTFTFSNQLLQNCGVATAYYLGNFMSWRIIALIGILPCLIQLVGLFFVPESPRWLAKEGRDEECEVVLQKLRGDEADIVKETQEILISVEASANISMRSLFKKKYTHQLTIGIGLMLLQQLSGSAGLGYYTGSVFDLAGFPSRIGMTVLSIVVVPKAILGLILVERWGRRPLLMASAFGLCLGCISLALAFGLKGVPGVNVNVTPTLAFIGIMVSKNQFSNLYYLQNKKSYFFVLCKCYFLVITFVMMFAAGLGALPWIIMSEIFPMDMKVVAGSLVSITNWFTGWIVSYCFNFMLLWSPTGTFIIFATISGATVVFAWCLVPETRGLTLEEIQRRAN

SEQ ID NO: 79138 - DNA, 2385 bp, Arabidopsis thaliana
  misc_feature (1)..(2385): Ceres Seq. ID no. 12649092
  misc_feature: MA Experiment ID: 20000173 Result: Down-regulated in Transcription
  misc_feature: MA Experiment 20000173 PARAMETER Experiment Name: At_42deg_Heat_P Parameter: Age (day) Value: 14
  misc_feature: MA Experiment 20000173 PARAMETER Experiment Name: At_42deg_Heat_P Parameter: Organism Value: A. thaliana
  misc_feature: MA Experiment 20000173 PARAMETER Experiment Name: At_42deg_Heat_P Parameter: Plant Line Value: WS
  misc_feature: MA Experiment 20000173 PARAMETER Experiment Name: At_42deg_Heat_P Parameter: Temperature (deg C) Value: 42 vs. 22
  misc_feature: MA Experiment 20000173 PARAMETER Experiment Name: At_42deg_Heat_P Parameter: Timepoint (hr) Value: 6
  misc_feature: MA Experiment 20000173 PARAMETER Experiment Name: At_42deg_Heat_P Parameter: Tissue Value: Aerial
  misc_feature: MA Experiment ID: 20000180 Result: Down-regulated in Transcription
  misc_feature: MA Experiment 20000180 PARAMETER Experiment Name: At_Germinating_Seeds_P Parameter: Age (hr) Value: 24 vs. 0
  misc_feature: MA Experiment 20000180 PARAMETER Experiment Name: At_Germinating_Seeds_P Parameter: Tissue Value: Germinating Seeds
  misc_feature: MA Experiment ID: 20001451 Result: Down-regulated in Transcription
  misc_feature: MA Experiment 20001451 PARAMETER Experiment Name: At_Far-red-induction_P Parameter: Age (day) Value: 7
  misc_feature: MA Experiment 20001451 PARAMETER Experiment Name: At_Far-red-induction_P Parameter: Light Value: Far-red vs. White
  misc_feature: MA Experiment 20001451 PARAMETER Experiment Name: At_Far-red-induction_P Parameter: Organism Value: A. thaliana
  misc_feature: MA Experiment 20001451 PARAMETER Experiment Name: At_Far-red-induction_P Parameter: Plant Line Value: Columbia
  misc_feature: MA Experiment 20001451 PARAMETER Experiment Name: At_Far-red-induction_P Parameter: Timepoint (hr) Value: 24
  misc_feature: MA Experiment 20001451 PARAMETER Experiment Name: At_Far-red-induction_P Parameter: Tissue Value: Whole Plant
atgtcgcgaaccagaaaatctcagtctaagcactgtggcagctccattttcgaggagtggatggaaagtagccgagaaaggaaacttgactctgataaagatactaccttgttgatggatatggaaagggctggcgaaatggaggctccgcggaaggggaaaagagtctacaagaaaagagtgaaagtcgaagaagcagaatgtaatgattctgatgacaatggagaagcatgcagtgccacacaagggctcagaagtaaatcacaaagacgaaaggctgctattgaagcctcaagagagaaatactcaccgcgcagcccaaagaaaagagatgacaaacatacttccggagcttttgatgccctgcaagcattggccgaattgtcagcttcaatgcttccagcaaatttgatggagtcagaattatctgctcagttgaaggaagaaagaacagaatacgacatggacgagaaatctagcacaccagaagctacttccacaagcagtcatggggaaaaagcaaatgtagagccagatgatagtctccttcatgcaatttcttctgttgagaatgctaacaagagaaagtcaaaaccttcaaggctggtatccactgattgtgatgatgttcccacagggaagctacaaccacaaactagtggcagtttaagaaaacgtaaaccaaaggtactaggggatgaagctccagcagagtttagtcagaacaaatccataaacaagaaggaattgcctcaagatgagaataatatgaagtctttggttaaaacaaaacgcgctggtcaagttccggctcagtcaaaacagatgaaaactgttaaggcgttggaggaatctgctataacaagtgataagaaaagacctgggatggatatagtagcgtcacctaaacaagtttctgactcgggtccaaccagtttatcgcagaaacctccaaacaggcgaaagaagagtctgcagaaaagcttacaagaaaaggctaaatcttctgaaaccactcataaagctgcacgtagttccagatctctttcagaacaagagttgttgttaaaggataagcttgctacttctctgtcgtttccctttgcacgtcgaaggtgcatatttgaatggttttatagtgctatcgaccatccctggttttcaaagatggagtttgtcgattacctaaatcacgtggggcttggtcacattccaagacttactcgtcttgaatggagcgtcattaaaagttctcttggtagaccacgaagattctctgagagatttttacatgaagagcgggagaaacttaaacagtaccgcgaatctgtgcgaaagcattatacagagcttcgaacgggtgctagggaggggcttcctacagatttggctcggccattagcagttgggaacagagtcattgccatccatcccaaaacacgggagattcatgatggaaaaattctcactgttgatcataacaaatgcaatgttctcttcgatgacttgggcgttgagttggttatggacattgattgcatgcctttaaatccactggaatacatgccagagggtctaaggaggcaaattgataagtgcttgtctatgaagaaagaagcacagctaagcgggaatacaaaccttggtgtgtctgtgctattccctccttgcggacttgaaaatgtcagcttttccatgaatcctcctctgaatcagggtgatatgattgctcccattctgcatggtaaagtatcaagcaacactagtagtccacggcagactaatcattcatatatcacaacttataacaaagcaaaagaagctgagattcaacgggcacaagcgctacagcatgctttagatgaaaaggaaatggagccagagatgctagaaattgtcaagggttcaaaaacaagagcgcaagcaatggtggatgcagctataaaggctgcatcatctgtgaaggaaggggaagatgtgaacacaatgatccaagaagccttagagttggttggcaaaaatcagctattacgcagctctatggtcaaacatcacgagcatgtaaatggcagtatagagcatcatcacaacccatctccttcaaatggatcagagcctgtggctaacaacgatttaaactcacaagatggttcagagaaaaacgctcaaatgccttcagagcttatcacctcctgtgttgccacttggctcatgattcagatgtgcacggagagacagtaccctccagctgatgtcgcacagcttatagacgcagcagtcacaagcttgcagccacgatgcccacagaacctaccgatctacagagaaatccaaacgtgcatgggacggatcaagactcaaatcatgtcccttgtaccaacttga

SEQ ID NO: 79139 - protein, 794 aa, Arabidopsis thaliana
  peptide (1)..(794): Ceres Seq. ID no. 12649093
  misc_feature (121)..(794): Homolog of NCBI NO: 15240995 NR Description: putative protein; protein id: At5g27610.1
  misc_feature (1)..(357): Homolog of NCBI NO: 6729048 NR Description: unknown protein, 3' partial [Arabidopsis thaliana]
  misc_feature (187)..(731): Homolog of NCBI NO: 15233065 NR Description: unknown protein; protein id: At3g21430.1
  misc_feature (358)..(731): Homolog of NCBI NO: 9294690 NR Description: gene_id:MHC9.11~unknown protein [Arabidopsis
  misc_feature (138)..(529): Homolog of NCBI NO: 34903510 NR Description: P0001B06.7 [Oryza sativa (japonica
  misc_feature (660)..(794): Homolog of NCBI NO: 34903510 NR Description: P0001B06.7 [Oryza sativa (japonica
  misc_feature (417)..(794): Homolog of NCBI NO: 15233065 NR Description: unknown protein; protein id: At3g21430.1
  misc_feature (417)..(794): Homolog of NCBI NO: 9294690 NR Description: gene_id:MHC9.11~unknown protein [Arabidopsis
  misc_feature (220)..(523): Homolog of NCBI NO: 27369419 NR Description: TGS2 [Homo sapiens]
  misc_feature (268)..(523): Homolog of NCBI NO: 30424802 NR Description: RIKEN cDNA 2700022J23 [Mus musculus]
MSRTRKSQSKHCGSSIFEEWMESSRERKLDSDKDTTLLMDMERAGEMEAPRKGKRVYKKRVKVEEAECNDSDDNGEACSATQGLRSKSQRRKAAIEASREKYSPRSPKKRDDKHTSGAFDALQALAELSASMLPANLMESELSAQLKEERTEYDMDEKSSTPEATSTSSHGEKANVEPDDSLLHAISSVENANKRKSKPSRLVSTDCDDVPTGKLQPQTSGSLRKRKPKVLGDEAPAEFSQNKSINKKELPQDENNMKSLVKTKRAGQVPAQSKQMKTVKALEESAITSDKKRPGMDIVASPKQVSDSGPTSLSQKPPNRRKKSLQKSLQEKAKSSETTHKAARSSRSLSEQELLLKDKLATSLSFPFARRRCIFEWFYSAIDHPWFSKMEFVDYLNHVGLGHIPRLTRLEWSVIKSSLGRPRRFSERFLHEEREKLKQYRESVRKHYTELRTGAREGLPTDLARPLAVGNRVIAIHPKTREIHDGKILTVDHNKCNVLFDDLGVELVMDIDCMPLNPLEYMPEGLRRQIDKCLSMKKEAQLSGNTNLGVSVLFPPCGLENVSFSMNPPLNQGDMIAPILHGKVSSNTSSPRQTNHSYITTYNKAKEAEIQRAQALQHALDEKEMEPEMLEIVKGSKTRAQAMVDAAIKAASSVKEGEDVNTMIQEALELVGKNQLLRSSMVKHHEHVNGSIEHHHNPSPSNGSEPVANNDLNSQDGSEKNAQMPSELITSCVATWLMIQMCTERQYPPADVAQLIDAAVTSLQPRCPQNLPIYREIQTCMGRIKTQIMSLVPT

SEQ ID NO: 79140 - protein, 774 aa, Arabidopsis thaliana
  peptide (1)..(774): Ceres Seq. ID no. 12649094
  misc_feature (101)..(774): Homolog of NCBI NO: 15240995 NR Description: putative protein; protein id: At5g27610.1
  misc_feature (1)..(337): Homolog of NCBI NO: 6729048 NR Description: unknown protein, 3' partial [Arabidopsis thaliana]
  misc_feature (167)..(711): Homolog of NCBI NO: 15233065 NR Description: unknown protein; protein id: At3g21430.1
  misc_feature (338)..(711): Homolog of NCBI NO: 9294690 NR Description: gene_id:MHC9.11~unknown protein [Arabidopsis
  misc_feature (118)..(509): Homolog of NCBI NO: 34903510 NR Description: P0001B06.7 [Oryza sativa (japonica
  misc_feature (640)..(774): Homolog of NCBI NO: 34903510 NR Description: P0001B06.7 [Oryza sativa (japonica
  misc_feature (397)..(774): Homolog of NCBI NO: 15233065 NR Description: unknown protein; protein id: At3g21430.1
  misc_feature (397)..(774): Homolog of NCBI NO: 9294690 NR Description: gene_id:MHC9.11~unknown protein [Arabidopsis
  misc_feature (200)..(503): Homolog of NCBI NO: 27369419 NR Description: TGS2 [Homo sapiens]
  misc_feature (248)..(503): Homolog of NCBI NO: 30424802 NR Description: RIKEN cDNA 2700022J23 [Mus musculus]
MESSRERKLDSDKDTTLLMDMERAGEMEAPRKGKRVYKKRVKVEEAECNDSDDNGEACSATQGLRSKSQRRKAAIEASREKYSPRSPKKRDDKHTSGAFDALQALAELSASMLPANLMESELSAQLKEERTEYDMDEKSSTPEATSTSSHGEKANVEPDDSLLHAISSVENANKRKSKPSRLVSTDCDDVPTGKLQPQTSGSLRKRKPKVLGDEAPAEFSQNKSINKKELPQDENNMKSLVKTKRAGQVPAQSKQMKTVKALEESAITSDKKRPGMDIVASPKQVSDSGPTSLSQKPPNRRKKSLQKSLQEKAKSSETTHKAARSSRSLSEQELLLKDKLATSLSFPFARRRCIFEWFYSAIDHPWFSKMEFVDYLNHVGLGHIPRLTRLEWSVIKSSLGRPRRFSERFLHEEREKLKQYRESVRKHYTELRTGAREGLPTDLARPLAVGNRVIAIHPKTREIHDGKILTVDHNKCNVLFDDLGVELVMDIDCMPLNPLEYMPEGLRRQIDKCLSMKKEAQLSGNTNLGVSVLFPPCGLENVSFSMNPPLNQGDMIAPILHGKVSSNTSSPRQTNHSYITTYNKAKEAEIQRAQALQHALDEKEMEPEMLEIVKGSKTRAQAMVDAAIKAASSVKEGEDVNTMIQEALELVGKNQLLRSSMVKHHEHVNGSIEHHHNPSPSNGSEPVANNDLNSQDGSEKNAQMPSELITSCVATWLMIQMCTERQYPPADVAQLIDAAVTSLQPRCPQNLPIYREIQTCMGRIKTQIMSLVPT

SEQ ID NO: 79141 - protein, 756 aa, Arabidopsis thaliana
  peptide (1)..(756): Ceres Seq. ID no. 12649095
  misc_feature (83)..(756): Homolog of NCBI NO: 15240995 NR Description: putative protein; protein id: At5g27610.1
  misc_feature (1)..(319): Homolog of NCBI NO: 6729048 NR Description: unknown protein, 3' partial [Arabidopsis thaliana]
  misc_feature (149)..(693): Homolog of NCBI NO: 15233065 NR Description: unknown protein; protein id: At3g21430.1
  misc_feature (320)..(693): Homolog of NCBI NO: 9294690 NR Description: gene_id:MHC9.11~unknown protein [Arabidopsis
  misc_feature (100)..(491): Homolog of NCBI NO: 34903510 NR Description: P0001B06.7 [Oryza sativa (japonica
  misc_feature (622)..(756): Homolog of NCBI NO: 34903510 NR Description: P0001B06.7 [Oryza sativa (japonica
  misc_feature (379)..(756): Homolog of NCBI NO: 15233065 NR Description: unknown protein; protein id: At3g21430.1
  misc_feature (379)..(756): Homolog of NCBI NO: 9294690 NR Description: gene_id:MHC9.11~unknown protein [Arabidopsis
  misc_feature (182)..(485): Homolog of NCBI NO: 27369419 NR Description: TGS2 [Homo sapiens]
  misc_feature (230)..(485): Homolog of NCBI NO: 30424802 NR Description: RIKEN cDNA 2700022J23 [Mus musculus]
MDMERAGEMEAPRKGKRVYKKRVKVEEAECNDSDDNGEACSATQGLRSKSQRRKAAIEASREKYSPRSPKKRDDKHTSGAFDALQALAELSASMLPANLMESELSAQLKEERTEYDMDEKSSTPEATSTSSHGEKANVEPDDSLLHAISSVENANKRKSKPSRLVSTDCDDVPTGKLQPQTSGSLRKRKPKVLGDEAPAEFSQNKSINKKELPQDENNMKSLVKTKRAGQVPAQSKQMKTVKALEESAITSDKKRPGMDIVASPKQVSDSGPTSLSQKPPNRRKKSLQKSLQEKAKSSETTHKAARSSRSLSEQELLLKDKLATSLSFPFARRRCIFEWFYSAIDHPWFSKMEFVDYLNHVGLGHIPRLTRLEWSVIKSSLGRPRRFSERFLHEEREKLKQYRESVRKHYTELRTGAREGLPTDLARPLAVGNRVIAIHPKTREIHDGKILTVDHNKCNVLFDDLGVELVMDIDCMPLNPLEYMPEGLRRQIDKCLSMKKEAQLSGNTNLGVSVLFPPCGLENVSFSMNPPLNQGDMIAPILHGKVSSNTSSPRQTNHSYITTYNKAKEAEIQRAQALQHALDEKEMEPEMLEIVKGSKTRAQAMVDAAIKAASSVKEGEDVNTMIQEALELVGKNQLLRSSMVKHHEHVNGSIEHHHNPSPSNGSEPVANNDLNSQDGSEKNAQMPSELITSCVATWLMIQMCTERQYPPADVAQLIDAAVTSLQPRCPQNLPIYREIQTCMGRIKTQIMSLVPT

SEQ ID NO: 79142 - DNA, 5043 bp, Arabidopsis thaliana
  misc_feature (1)..(5043): Ceres Seq. ID no. 12649238
  misc_feature: MA Experiment ID: 108573 Result: Up-regulated in Transcription
  misc_feature: MA Experiment 108573 PARAMETER Experiment Name: At_Drought_cDNA_P Parameter: Timepoint (hr) Value: 6
  misc_feature: MA Experiment 108573 PARAMETER Experiment Name: At_Drought_cDNA_P Parameter: Tissue Value: Aerial
  misc_feature: MA Experiment 108573 PARAMETER Experiment Name: At_Drought_cDNA_P Parameter: Treatment Value: Drought vs. No Drought
  misc_feature: MA Experiment ID: 108585 Result: Up-regulated in Transcription
  misc_feature: MA Experiment 108585 PARAMETER Experiment Name: At_5mM_NaNP_cDNA_P Parameter: Timepoint (hr) Value: 6
  misc_feature: MA Experiment 108585 PARAMETER Experiment Name: At_5mM_NaNP_cDNA_P Parameter: Tissue Value: Aerial
  misc_feature: MA Experiment 108585 PARAMETER Experiment Name: At_5mM_NaNP_cDNA_P Parameter: Treatment Value: null
atggaaataaacaagtttcgtgctctttcgcggcgagctcagcagctacattacacatccttgaatggacttaaacgaagatgcaacaacgcacacggtgcagctaattttcactcgttgaagagagctacacaaacccaaatccagaaatcgcagaccaaacctctccttaaatgtggagactcggatataaaagagtggaacgttgctataagcagctacatgcgtactggaagatgcaacgaagcgcttcgtgtcttcaaacgcatgcctaggtggagttccgtttcttataacggtatgatttctggttatttgagaaacggtgagtttgaactcgcccggaagttgttcgatgaaatgcctgaacgagatttagtttcctggaatgtgatgattaaagggtatgtacggaacaggaatcttgggaaagcgagggaattgtttgagataatgcctgagagagatgtttgttcgtggaataccatgttgtcgggttacgctcagaatggttgtgttgatgatgcaaggagtgtttttgatcgaatgcctgagaagaacgatgtatcgtggaatgcattgctctctgcttatgttcagaatagtaagatggaggaggcttgtattatgaatgtgagggatgtggtctcatggaatacgatcatcactggttatgcacagagcgggaaaatcgatgaggcgcggcagctatttgatgagtctcctgttcaagatgtctttacatggacagcaatggtgtcaggatatatacaaaaccggatggtggaagaagcgagagaattattcgacaaaatgccagagagaaacgaagtgtcatggaatgccatgcttgcaggatatgtgcagggcgagagaatggagatggcaaaggaattgtttgatgttatgccttgtagaaatgttagtacatggaacacgatgataactggatatgctcagtgtgggaaaatttctgaagctaagaacctttttgataaaatgccaaagagagatccggtctcttgggcagctatgattgcagggtattcgcaaagcggacacagctttgaagctcttcgtttgtttgtacaaatggagagggagggaggtagattgaatcggtcttcgttttcatctgctctaagcacatgtgcagacgttgttgctctcgagctcgggaagcaattgcatggacgattagttaaaggtgggtatgagactgggtgctttgttgggaatgcgcttttgttgatgtattgcaaatgtggaagcatagaagaagctaatgacttgtttaaggagatggctgggaaggacattgtctcttggaacacaatgattgcaggttactcaaggcacgggttcggagaagtggctttaaggttcttcgagtcgatgaagagagaaggactgaagccagatgatgctaccatggttgcggtattatctgcatgcagtcacacaggacttgttgacaaaggcaggcaatatttctatacgatgactcaagactatggcgtaatgcctaactcacagcactatgcttgcatggttgatcttcttggtcgagctgggcttctagaagatgctcacaatctaatgaagaacatgccctttgagccagacgctgcaatttggggaactttacttggtgcaagcagagttcatggaaacacagagctagccgaaacagctgcagataagatatttgcaatggagcctgaaaattccggtatgtatgttcttctctctaatctatacgcttcttcgggtcgatggggagatgttggtaaactacgagtgagaatgcgggataaaggggtgaagaaagttccagggtacagttggattgaaattcagaacaagactcatactttctcggttggggatgagtttcatcctgagaaagacgagatctttgcatttttggaggagctggatttgagaatgaagaaagcagggtatgtttcaaagacgagtgtggttcttcatgatgtggaggaagaagagaaggagcgtatggttcggtaccatagcgagagactggctgtagcttatgggataatgcgtgtgtcttcagggagaccgatccgtgtgataaagaatctgcgtgtatgtgaggattgtcacaacgccatcaagtatatggccagaatcacagggagactgattatcttgagggataataacaggtttcaccattttaaggatggttcatgttcttgcggagccatttataaacaacactcgagaaaacgcttgagaagacgtattcaacgttgggttggttccatggatcctcccacccaaagccataactcggtccgtactgttccaggctcgaatcatagccacaccgatttgattatctcatcgttcctttcgtttccagattcctctccgatctccattagcaattccttcgatcgagtccttgatagagctctcgcctccgcttccgctgatgaatccgttcaggatcgtctcgtcgatcgtactctcgaactcgcgtcgcttcttctcgattccactaggcgttgcttccgtaagcgagcttctgttcacaattccaattcctggtccctccctccagaacttaccattaaggtcttttcgatgcttgatacaaagtctatgatgcaagcagctgtgtgctgcaccatgttcaataaatgtgcaatggaccgtttatgttactcccacatcgacctgacaacgtctgctagatatgctgataaaggagttgtgtctactatgatcaatcgggctggtaaagaactcagatccctgaaacttggtcgtgttgttcgtacagctggatctgattctgctgcacctttgcttagcggatcttgtctttccccactagcatataatcatggttttcttgggagtcgcttgagaagcctacggctttacaatctcagacctataaaatacaggtccttatgcgatgcgttgtcagtttgtccaaatatcactgatctgaggattgtgggattgtataacttaaccgaggagctatttaattcattgacaaaaaaatgccgcttaatagagcacctgttcttagagacctacggttatccacgtacgttagagagtaaagcaggatcatccttagtagagtttgtgaccaattgccccaacttaacgtccctgacgctcatacgttttggactaaccgatgactgggcccgaaatcttgctgagagttgtcgtaaactgaagtacctgaatttgtcccgatcacctacaatcaagggtcgttttttgagggagttgggacttagctgcaaagaaaatctactcaagactctaatattgcgcagctgcccaaaactacaggagaaagaagtattggaattctgtaactcactactcacagggaacttcaaatccattcggcaaattgatgtttcaagtaacagtggattagcttcttcagacaggggcaagagatgtaacaaaccaaactttcctctggagaggctgaaagaagaaagatcagatgtcacatttgtggcggattttccatcaacaagttcaggaaagcgttatggtgtgtgcgatgaagaagagctgaggctgatagagatgatggaagctgaggacgatgaagtggacgaagaagatgactcggatgacgacactgacgatgtatcggatgaagatgagtcagaaaatgatgatgacatgggaatgggatttgatgtcgattatttgttaaaattaaaagcaagaccacatataaattactctgcaacacgtcccgaattcgtttccaaaaacgttatggatactccaaaccctaagcgacagtgctgtgatgctttctcctcgatccaaagacctaattctgttactatagctccagatttcaaccagaatgactttgattcgactatctcctcttttcttttgttgcctgattcgccatataattctattggttgctctttcgatagagtgcaaggtcaagttctcgactctgcttccaaagcttccggtgatgattccgtcagggatcgtctcatcgatcgtactggcaaactcgcatttcttcttcttgaatccaccaaacgattctctcgaatgcgcgctactcactacaattacaattcttggtccctccctgatgaactcaccattaaggtgttttcggggcttgatacaaagtctctgatgcaagcttcagcatgttgcaccatgttccgcaaatgttctatagaccctttatgttactctcacattgacttgaaaatgggtggcaaacgcatttttgatgaaattgtgtgtagtatgattcacaaagctggaacagaactcagatcccttaaactcggtcgtgttatatcttcacgcaaaggatcttcgttcacaagcacttgtcttacctcagtaattcgtaatcatgggaaaaaaattctagagcaagtactaaagacgctcactaaaaatcctcgcttgataatagaacgtttaatcttacagaacaatatcgacttaattcctgcatcaggtgtatcttcttcaaccgttgaggcatttgttacctcctgccccagcttaactacgctaaagctcgtaggttttggactaaaggaagaaacagtcagaaatcttgcggagggttttcctaagcttacatacatgaatctgactagaacgcctggaattagtggtcggtttttgagggatttgagaactatcggcagagacagtccaatcaagactctaatattgcgtgactgtcattgtctagataggagagaaatagggtattttttggattcacttctcaatggacacttcaaattcattcgacatattgacgtaacaagtgaagttgctgatgggggtagggaaattatcataggaaagtatattataacgaagctgaaagaacaaagatcagatgtcacaattgtagccaaatctattttaacttgcttttttttaacccatggaatgggattgtcatcaagtgcgcgatactgttcaagaaaaacttataactaccaaacacatttttaccaataa

SEQ ID NO: 79143 - protein, 1680 aa, Arabidopsis thaliana
  peptide (1)..(1680): Ceres Seq. ID no. 12649239
  misc_feature (158)..(191): Pfam Name: PPR repeat Pfam Description: PPR repeat
  misc_feature (765)..(983): Homolog of NCBI NO: 15235471 NR Description: hypothetical protein; protein id: At4g02740.1
  misc_feature (1040)..(1243): Homolog of NCBI NO: 15235471 NR Description: hypothetical protein; protein id: At4g02740.1
  misc_feature (1315)..(1447): Homolog of NCBI NO: 15235471 NR Description: hypothetical protein; protein id: At4g02740.1
  misc_feature (1474)..(1544): Homolog of NCBI NO: 15235471 NR Description: hypothetical protein; protein id: At4g02740.1
  misc_feature (1612)..(1629): Homolog of NCBI NO: 15235471 NR Description: hypothetical protein; protein id: At4g02740.1
  misc_feature (68)..(742): Homolog of NCBI NO: 15217508 NR Description: hypothetical protein; protein id: At1g09410.1
  misc_feature (71)..(742): Homolog of NCBI NO: 15223594 NR Description: hypothetical protein; protein id: At1g56690.1
  misc_feature (963)..(1094): Homolog of NCBI NO: 15235471 NR Description: hypothetical protein; protein id: At4g02740.1
  misc_feature (1)..(537): Homolog of NCBI NO: 15235498 NR Description: hypothetical protein; protein id: At4g02750.1
  misc_feature (183)..(743): Homolog of NCBI NO: 22328738 NR Description: similar to putative selenium-binding protein;
MEINKFRALSRRAQQLHYTSLNGLKRRCNNAHGAANFHSLKRATQTQIQKSQTKPLLKCGDSDIKEWNVAISSYMRTGRCNEALRVFKRMPRWSSVSYNGMISGYLRNGEFELARKLFDEMPERDLVSWNVMIKGYVRNRNLGKARELFEIMPERDVCSWNTMLSGYAQNGCVDDARSVFDRMPEKNDVSWNALLSAYVQNSKMEEACIMNVRDVVSWNTIITGYAQSGKIDEARQLFDESPVQDVFTWTAMVSGYIQNRMVEEARELFDKMPERNEVSWNAMLAGYVQGERMEMAKELFDVMPCRNVSTWNTMITGYAQCGKISEAKNLFDKMPKRDPVSWAAMIAGYSQSGHSFEALRLFVQMEREGGRLNRSSFSSALSTCADVVALELGKQLHGRLVKGGYETGCFVGNALLLMYCKCGSIEEANDLFKEMAGKDIVSWNTMIAGYSRHGFGEVALRFFESMKREGLKPDDATMVAVLSACSHTGLVDKGRQYFYTMTQDYGVMPNSQHYACMVDLLGRAGLLEDAHNLMKNMPFEPDAAIWGTLLGASRVHGNTELAETAADKIFAMEPENSGMYVLLSNLYASSGRWGDVGKLRVRMRDKGVKKVPGYSWIEIQNKTHTFSVGDEFHPEKDEIFAFLEELDLRMKKAGYVSKTSVVLHDVEEEEKERMVRYHSERLAVAYGIMRVSSGRPIRVIKNLRVCEDCHNAIKYMARITGRLIILRDNNRFHHFKDGSCSCGAIYKQHSRKRLRRRIQRWVGSMDPPTQSHNSVRTVPGSNHSHTDLIISSFLSFPDSSPISISNSFDRVLDRALASASADESVQDRLVDRTLELASLLLDSTRRCFRKRASVHNSNSWSLPPELTIKVFSMLDTKSMMQAAVCCTMFNKCAMDRLCYSHIDLTTSARYADKGVVSTMINRAGKELRSLKLGRVVRTAGSDSAAPLLSGSCLSPLAYNHGFLGSRLRSLRLYNLRPIKYRSLCDALSVCPNITDLRIVGLYNLTEELFNSLTKKCRLIEHLFLETYGYPRTLESKAGSSLVEFVTNCPNLTSLTLIRFGLTDDWARNLAESCRKLKYLNLSRSPTIKGRFLRELGLSCKENLLKTLILRSCPKLQEKEVLEFCNSLLTGNFKSIRQIDVSSNSGLASSDRGKRCNKPNFPLERLKEERSDVTFVADFPSTSSGKRYGVCDEEELRLIEMMEAEDDEVDEEDDSDDDTDDVSDEDESENDDDMGMGFDVDYLLKLKARPHINYSATRPEFVSKNVMDTPNPKRQCCDAFSSIQRPNSVTIAPDFNQNDFDSTISSFLLLPDSPYNSIGCSFDRVQGQVLDSASKASGDDSVRDRLIDRTGKLAFLLLESTKRFSRMRATHYNYNSWSLPDELTIKVFSGLDTKSLMQASACCTMFRKCSIDPLCYSHIDLKMGGKRIFDEIVCSMIHKAGTELRSLKLGRVISSRKGSSFTSTCLTSVIRNHGKKILEQVLKTLTKNPRLIIERLILQNNIDLIPASGVSSSTVEAFVTSCPSLTTLKLVGFGLKEETVRNLAEGFPKLTYMNLTRTPGISGRFLRDLRTIGRDSPIKTLILRDCHCLDRREIGYFLDSLLNGHFKFIRHIDVTSEVADGGREIIIGKYIITKLKEQRSDVTIVAKSILTCFFLTHGMGLSSSARYCSRKTYNYQTHFYQ

SEQ ID NO: 79144 - protein, 1606 aa, Arabidopsis thaliana
  peptide (1)..(1606): Ceres Seq. ID no. 12649240
  misc_feature (84)..(117): Pfam Name: PPR repeat Pfam Description: PPR repeat
  misc_feature (691)..(909): Homolog of NCBI NO: 15235471 NR Description: hypothetical protein; protein id: At4g02740.1
  misc_feature (966)..(1169): Homolog of NCBI NO: 15235471 NR Description: hypothetical protein; protein id: At4g02740.1
  misc_feature (1241)..(1373): Homolog of NCBI NO: 15235471 NR Description: hypothetical protein; protein id: At4g02740.1
  misc_feature (1400)..(1470): Homolog of NCBI NO: 15235471 NR Description: hypothetical protein; protein id: At4g02740.1
  misc_feature (1538)..(1555): Homolog of NCBI NO: 15235471 NR Description: hypothetical protein; protein id: At4g02740.1
  misc_feature (1)..(668): Homolog of NCBI NO: 15217508 NR Description: hypothetical protein; protein id: At1g09410.1
  misc_feature (1)..(668): Homolog of NCBI NO: 15223594 NR Description: hypothetical protein; protein id: At1g56690.1
  misc_feature (889)..(1020): Homolog of NCBI NO: 15235471 NR Description: hypothetical protein; protein id: At4g02740.1
  misc_feature (1)..(463): Homolog of NCBI NO: 15235498 NR Description: hypothetical protein; protein id: At4g02750.1
  misc_feature (109)..(669): Homolog of NCBI NO: 22328738 NR Description: similar to putative selenium-binding protein;
MRTGRCNEALRVFKRMPRWSSVSYNGMISGYLRNGEFELARKLFDEMPERDLVSWNVMIKGYVRNRNLGKARELFEIMPERDVCSWNTMLSGYAQNGCVDDARSVFDRMPEKNDVSWNALLSAYVQNSKMEEACIMNVRDVVSWNTIITGYAQSGKIDEARQLFDESPVQDVFTWTAMVSGYIQNRMVEEARELFDKMPERNEVSWNAMLAGYVQGERMEMAKELFDVMPCRNVSTWNTMITGYAQCGKISEAKNLFDKMPKRDPVSWAAMIAGYSQSGHSFEALRLFVQMEREGGRLNRSSFSSALSTCADVVALELGKQLHGRLVKGGYETGCFVGNALLLMYCKCGSIEEANDLFKEMAGKDIVSWNTMIAGYSRHGFGEVALRFFESMKREGLKPDDATMVAVLSACSHTGLVDKGRQYFYTMTQDYGVMPNSQHYACMVDLLGRAGLLEDAHNLMKNMPFEPDAAIWGTLLGASRVHGNTELAETAADKIFAMEPENSGMYVLLSNLYASSGRWGDVGKLRVRMRDKGVKKVPGYSWIEIQNKTHTFSVGDEFHPEKDEIFAFLEELDLRMKKAGYVSKTSVVLHDVEEEEKERMVRYHSERLAVAYGIMRVSSGRPIRVIKNLRVCEDCHNAIKYMARITGRLIILRDNNRFHHFKDGSCSCGAIYKQHSRKRLRRRIQRWVGSMDPPTQSHNSVRTVPGSNHSHTDLIISSFLSFPDSSPISISNSFDRVLDRALASASADESVQDRLVDRTLELASLLLDSTRRCFRKRASVHNSNSWSLPPELTIKVFSMLDTKSMMQAAVCCTMFNKCAMDRLCYSHIDLTTSARYADKGVVSTMINRAGKELRSLKLGRVVRTAGSDSAAPLLSGSCLSPLAYNHGFLGSRLRSLRLYNLRPIKYRSLCDALSVCPNITDLRIVGLYNLTEELFNSLTKKCRLIEHLFLETYGYPRTLESKAGSSLVEFVTNCPNLTSLTLIRFGLTDDWARNLAESCRKLKYLNLSRSPTIKGRFLRELGLSCKENLLKTLILRSCPKLQEKEVLEFCNSLLTGNFKSIRQIDVSSNSGLASSDRGKRCNKPNFPLERLKEERSDVTFVADFPSTSSGKRYGVCDEEELRLIEMMEAEDDEVDEEDDSDDDTDDVSDEDESENDDDMGMGFDVDYLLKLKARPHINYSATRPEFVSKNVMDTPNPKRQCCDAFSSIQRPNSVTIAPDFNQNDFDSTISSFLLLPDSPYNSIGCSFDRVQGQVLDSASKASGDDSVRDRLIDRTGKLAFLLLESTKRFSRMRATHYNYNSWSLPDELTIKVFSGLDTKSLMQASACCTMFRKCSIDPLCYSHIDLKMGGKRIFDEIVCSMIHKAGTELRSLKLGRVISSRKGSSFTSTCLTSVIRNHGKKILEQVLKTLTKNPRLIIERLILQNNIDLIPASGVSSSTVEAFVTSCPSLTTLKLVGFGLKEETVRNLAEGFPKLTYMNLTRTPGISGRFLRDLRTIGRDSPIKTLILRDCHCLDRREIGYFLDSLLNGHFKFIRHIDVTSEVADGGREIIIGKYIITKLKEQRSDVTIVAKSILTCFFLTHGMGLSSSARYCSRKTYNYQTHFYQ

SEQ ID NO: 79145 - protein, 1591 aa, Arabidopsis thaliana
  peptide (1)..(1591): Ceres Seq. ID no. 12649241
  misc_feature (69)..(102): Pfam Name: PPR repeat Pfam Description: PPR repeat
  misc_feature (676)..(894): Homolog of NCBI NO: 15235471 NR Description: hypothetical protein; protein id: At4g02740.1
  misc_feature (951)..(1154): Homolog of NCBI NO: 15235471 NR Description: hypothetical protein; protein id: At4g02740.1
  misc_feature (1226)..(1358): Homolog of NCBI NO: 15235471 NR Description: hypothetical protein; protein id: At4g02740.1
  misc_feature (1385)..(1455): Homolog of NCBI NO: 15235471 NR Description: hypothetical protein; protein id: At4g02740.1
  misc_feature (1523)..(1540): Homolog of NCBI NO: 15235471 NR Description: hypothetical protein; protein id: At4g02740.1
  misc_feature (1)..(653): Homolog of NCBI NO: 15217508 NR Description: hypothetical protein; protein id: At1g09410.1
  misc_feature (1)..(653): Homolog of NCBI NO: 15223594 NR Description: hypothetical protein; protein id: At1g56690.1
  misc_feature (874)..(1005): Homolog of NCBI NO: 15235471 NR Description: hypothetical protein; protein id: At4g02740.1
  misc_feature (1)..(448): Homolog of NCBI NO: 15235498 NR Description: hypothetical protein; protein id: At4g02750.1
  misc_feature (94)..(654): Homolog of NCBI NO: 22328738 NR Description: similar to putative selenium-binding protein;
MPRWSSVSYNGMISGYLRNGEFELARKLFDEMPERDLVSWNVMIKGYVRNRNLGKARELFEIMPERDVCSWNTMLSGYAQNGCVDDARSVFDRMPEKNDVSWNALLSAYVQNSKMEEACIMNVRDVVSWNTIITGYAQSGKIDEARQLFDESPVQDVFTWTAMVSGYIQNRMVEEARELFDKMPERNEVSWNAMLAGYVQGERMEMAKELFDVMPCRNVSTWNTMITGYAQCGKISEAKNLFDKMPKRDPVSWAAMIAGYSQSGHSFEALRLFVQMEREGGRLNRSSFSSALSTCADVVALELGKQLHGRLVKGGYETGCFVGNALLLMYCKCGSIEEANDLFKEMAGKDIVSWNTMIAGYSRHGFGEVALRFFESMKREGLKPDDATMVAVLSACSHTGLVDKGRQYFYTMTQDYGVMPNSQHYACMVDLLGRAGLLEDAHNLMKNMPFEPDAAIWGTLLGASRVHGNTELAETAADKIFAMEPENSGMYVLLSNLYASSGRWGDVGKLRVRMRDKGVKKVPGYSWIEIQNKTHTFSVGDEFHPEKDEIFAFLEELDLRMKKAGYVSKTSVVLHDVEEEEKERMVRYHSERLAVAYGIMRVSSGRPIRVIKNLRVCEDCHNAIKYMARITGRLIILRDNNRFHHFKDGSCSCGAIYKQHSRKRLRRRIQRWVGSMDPPTQSHNSVRTVPGSNHSHTDLIISSFLSFPDSSPISISNSFDRVLDRALASASADESVQDRLVDRTLELASLLLDSTRRCFRKRASVHNSNSWSLPPELTIKVFSMLDTKSMMQAAVCCTMFNKCAMDRLCYSHIDLTTSARYADKGVVSTMINRAGKELRSLKLGRVVRTAGSDSAAPLLSGSCLSPLAYNHGFLGSRLRSLRLYNLRPIKYRSLCDALSVCPNITDLRIVGLYNLTEELFNSLTKKCRLIEHLFLETYGYPRTLESKAGSSLVEFVTNCPNLTSLTLIRFGLTDDWARNLAESCRKLKYLNLSRSPTIKGRFLRELGLSCKENLLKTLILRSCPKLQEKEVLEFCNSLLTGNFKSIRQIDVSSNSGLASSDRGKRCNKPNFPLERLKEERSDVTFVADFPSTSSGKRYGVCDEEELRLIEMMEAEDDEVDEEDDSDDDTDDVSDEDESENDDDMGMGFDVDYLLKLKARPHINYSATRPEFVSKNVMDTPNPKRQCCDAFSSIQRPNSVTIAPDFNQNDFDSTISSFLLLPDSPYNSIGCSFDRVQGQVLDSASKASGDDSVRDRLIDRTGKLAFLLLESTKRFSRMRATHYNYNSWSLPDELTIKVFSGLDTKSLMQASACCTMFRKCSIDPLCYSHIDLKMGGKRIFDEIVCSMIHKAGTELRSLKLGRVISSRKGSSFTSTCLTSVIRNHGKKILEQVLKTLTKNPRLIIERLILQNNIDLIPASGVSSSTVEAFVTSCPSLTTLKLVGFGLKEETVRNLAEGFPKLTYMNLTRTPGISGRFLRDLRTIGRDSPIKTLILRDCHCLDRREIGYFLDSLLNGHFKFIRHIDVTSEVADGGREIIIGKYIITKLKEQRSDVTIVAKSILTCFFLTHGMGLSSSARYCSRKTYNYQTHFYQ

SEQ ID NO: 79146 - DNA, 2400 bp, Arabidopsis thaliana
  misc_feature (1)..(2400): Ceres Seq. ID no. 12649324
  misc_feature: MA Experiment ID: 108434 Result: Up-regulated in Transcription
  misc_feature: MA Experiment 108434 PARAMETER Experiment Name: At_Root_Tips_cDNA_P Parameter: Tissue Value: Root Tips
  misc_feature: MA Experiment ID: 108461 Result: Up-regulated in Transcription
  misc_feature: MA Experiment 108461 PARAMETER Experiment Name: At_Germinating_Seeds_cDNA_P Parameter: Age (day) Value: 1 vs. 0
  misc_feature: MA Experiment 108461 PARAMETER Experiment Name: At_Germinating_Seeds_cDNA_P Parameter: Tissue Value: Germinating Seeds
  misc_feature: MA Experiment ID: 108462 Result: Up-regulated in Transcription
  misc_feature: MA Experiment 108462 PARAMETER Experiment Name: At_Germinating_Seeds_cDNA_P Parameter: Age (day) Value: 2 vs. 0
  misc_feature: MA Experiment 108462 PARAMETER Experiment Name: At_Germinating_Seeds_cDNA_P Parameter: Tissue Value: Germinating Seeds
  misc_feature: MA Experiment ID: 108473 Result: Down-regulated in Transcription
  misc_feature: MA Experiment 108473 PARAMETER Experiment Name: At_Drought_Flowers_cDNA_P Parameter: Timepoint (hr) Value: 7 d
  misc_feature: MA Experiment 108473 PARAMETER Experiment Name: At_Drought_Flowers_cDNA_P Parameter: Tissue Value: Flower
  misc_feature: MA Experiment 108473 PARAMETER Experiment Name: At_Drought_Flowers_cDNA_P Parameter: Treatment Value: Drought vs. No Drought
  misc_feature: MA Experiment ID: 108572 Result: Down-regulated in Transcription
  misc_feature: MA Experiment 108572 PARAMETER Experiment Name: At_Drought_cDNA_P Parameter: Timepoint (hr) Value: 1
  misc_feature: MA Experiment 108572 PARAMETER Experiment Name: At_Drought_cDNA_P Parameter: Tissue Value: Aerial
  misc_feature: MA Experiment 108572 PARAMETER Experiment Name: At_Drought_cDNA_P Parameter: Treatment Value: Drought vs. No Drought
  misc_feature: MA Experiment ID: 108573 Result: Down-regulated in Transcription
  misc_feature: MA Experiment 108573 PARAMETER Experiment Name: At_Drought_cDNA_P Parameter: Timepoint (hr) Value: 6
  misc_feature: MA Experiment 108573 PARAMETER Experiment Name: At_Drought_cDNA_P Parameter: Tissue Value: Aerial
  misc_feature: MA Experiment 108573 PARAMETER Experiment Name: At_Drought_cDNA_P Parameter: Treatment Value: Drought vs. No Drought
  misc_feature: MA Experiment ID: 108585 Result: Down-regulated in Transcription
  misc_feature: MA Experiment 108585 PARAMETER Experiment Name: At_5mM_NaNP_cDNA_P Parameter: Timepoint (hr) Value: 6
  misc_feature: MA Experiment 108585 PARAMETER Experiment Name: At_5mM_NaNP_cDNA_P Parameter: Tissue Value: Aerial
  misc_feature: MA Experiment 108585 PARAMETER Experiment Name: At_5mM_NaNP_cDNA_P Parameter: Treatment Value: null
  misc_feature: MA Experiment ID: 20000111 Result: Down-regulated in Transcription
  misc_feature: MA Experiment 20000111 PARAMETER Experiment Name: At_42deg_Heat_cDNA_P Parameter: Temperature (deg C) Value: 42 vs. 22
  misc_feature: MA Experiment 20000111 PARAMETER Experiment Name: At_42deg_Heat_cDNA_P Parameter: Timepoint (hr) Value: 6
  misc_feature: MA Experiment 20000111 PARAMETER Experiment Name: At_42deg_Heat_cDNA_P Parameter: Tissue Value: Aerial
  misc_feature: MA Experiment ID: 20000113 Result: Down-regulated in Transcription
  misc_feature: MA Experiment 20000113 PARAMETER Experiment Name: At_42deg_Heat_cDNA_P Parameter: Temperature (deg C) Value: 42 vs. 22
  misc_feature: MA Experiment 20000113 PARAMETER Experiment Name: At_42deg_Heat_cDNA_P Parameter: Timepoint (hr) Value: 8
  misc_feature: MA Experiment 20000113 PARAMETER Experiment Name: At_42deg_Heat_cDNA_P Parameter: Tissue Value: Aerial
  misc_feature: MA Experiment ID: 20000173 Result: Down-regulated in Transcription
  misc_feature: MA Experiment 20000173 PARAMETER Experiment Name: At_42deg_Heat_P Parameter: Age (day) Value: 14
  misc_feature: MA Experiment 20000173 PARAMETER Experiment Name: At_42deg_Heat_P Parameter: Organism Value: A. thaliana
  misc_feature: MA Experiment 20000173 PARAMETER Experiment Name: At_42deg_Heat_P Parameter: Plant Line Value: WS
  misc_feature: MA Experiment 20000173 PARAMETER Experiment Name: At_42deg_Heat_P Parameter: Temperature (deg C) Value: 42 vs. 22
  misc_feature: MA Experiment 20000173 PARAMETER Experiment Name: At_42deg_Heat_P Parameter: Timepoint (hr) Value: 6
  misc_feature: MA Experiment 20000173 PARAMETER Experiment Name: At_42deg_Heat_P Parameter: Tissue Value: Aerial
  misc_feature: MA Experiment ID: 20000179 Result: Up-regulated in Transcription
  misc_feature: MA Experiment 20000179 PARAMETER Experiment Name: At_Germinating_Seeds_P Parameter: Age (hr) Value: 6 vs. 0
  misc_feature: MA Experiment 20000179 PARAMETER Experiment Name: At_Germinating_Seeds_P Parameter: Tissue Value: Germinating Seeds
  misc_feature: MA Experiment ID: 20000180 Result: Up-regulated in Transcription
  misc_feature: MA Experiment 20000180 PARAMETER Experiment Name: At_Germinating_Seeds_P Parameter: Age (hr) Value: 24 vs. 0
  misc_feature: MA Experiment 20000180 PARAMETER Experiment Name: At_Germinating_Seeds_P Parameter: Tissue Value: Germinating Seeds
  misc_feature: MA Experiment ID: 20000182 Result: Down-regulated in Transcription
  misc_feature: MA Experiment 20000182 PARAMETER Experiment Name: At_2mM_SA_P Parameter: Age (day) Value: 14
  misc_feature: MA Experiment 20000182 PARAMETER Experiment Name: At_2mM_SA_P Parameter: Organism Value: A. thaliana
  misc_feature: MA Experiment 20000182 PARAMETER Experiment Name: At_2mM_SA_P Parameter: Plant Line Value: WS
  misc_feature: MA Experiment 20000182 PARAMETER Experiment Name: At_2mM_SA_P Parameter: Timepoint (hr) Value: 6
  misc_feature: MA Experiment 20000182 PARAMETER Experiment Name: At_2mM_SA_P Parameter: Tissue Value: Aerial
  misc_feature: MA Experiment 20000182 PARAMETER Experiment Name: At_2mM_SA_P Parameter: Treatment Value: 2mM SA vs. No Treatment
  misc_feature: MA Experiment ID: 20000185 Result: Down-regulated in Transcription
  misc_feature: MA Experiment 20000185 PARAMETER Experiment Name: At_Roots__P Parameter: Age (day) Value: 7 vs. 21
  misc_feature: MA Experiment 20000185 PARAMETER Experiment Name: At_Roots__P Parameter: Organism Value: A. thaliana
  misc_feature: MA Experiment 20000185 PARAMETER Experiment Name: At_Roots__P Parameter: Tissue Value: Roots vs. Whole Plant
  misc_feature: MA Experiment ID: 20000214 Result: Down-regulated in Transcription
  misc_feature: MA Experiment 20000214 PARAMETER Experiment Name: At_4deg_Cold_P Parameter: Timepoint (hr) Value: 6
  misc_feature: MA Experiment ID: 20000224 Result: Down-regulated in Transcription
  misc_feature: MA Experiment ID: 20000234 Result: Up-regulated in Transcription
  misc_feature: MA Experiment 20000234 PARAMETER Experiment Name: At_Siliques_P Parameter: Age (day) Value: 21
  misc_feature: MA Experiment 20000234 PARAMETER Experiment Name: At_Siliques_P Parameter: Organism Value: A. thaliana
  misc_feature: MA Experiment 20000234 PARAMETER Experiment Name: At_Siliques_P Parameter: Plant Line Value: WS
  misc_feature: MA Experiment 20000234 PARAMETER Experiment Name: At_Siliques_P Parameter: Tissue Value: Less Than 5mm Siliques vs. Whole Plant
  misc_feature: MA Experiment ID: 20000265 Result: Up-regulated in Transcription
  misc_feature: MA Experiment 20000265 PARAMETER Experiment Name: At_Open_Flower_P Parameter: Age (day) Value: 21
  misc_feature: MA Experiment 20000265 PARAMETER Experiment Name: At_Open_Flower_P Parameter: Plant Line Value: WS
  misc_feature: MA Experiment 20000265 PARAMETER Experiment Name: At_Open_Flower_P Parameter: Tissue Value: Closed Flower vs. Whole Plant
  misc_feature: MA Experiment ID: 20000268 Result: Down-regulated in Transcription
  misc_feature: MA Experiment 20000268 PARAMETER Experiment Name: At_100mM_NaCl__P Parameter: Age (day) Value: 14
  misc_feature: MA Experiment 20000268 PARAMETER Experiment Name: At_100mM_NaCl__P Parameter: Organism Value: A. thaliana
  misc_feature: MA Experiment 20000268 PARAMETER Experiment Name: At_100mM_NaCl__P Parameter: Plant Line Value: WS
  misc_feature: MA Experiment 20000268 PARAMETER Experiment Name: At_100mM_NaCl__P Parameter: Timepoint (hr) Value: 6
  misc_feature: MA Experiment 20000268 PARAMETER Experiment Name: At_100mM_NaCl__P Parameter: Tissue Value: Whole Plant
  misc_feature: MA Experiment 20000268 PARAMETER Experiment Name: At_100mM_NaCl__P Parameter: Treatment Value: 100mM NaCl vs. No Treatment
  misc_feature: MA Experiment ID: 20000436 Result: Down-regulated in Transcription
  misc_feature: MA Experiment 20000436 PARAMETER Experiment Name: At_Drought_P Parameter: Age (day) Value: 7
  misc_feature: MA Experiment 20000436 PARAMETER Experiment Name: At_Drought_P Parameter: Organism Value: A. thaliana
  misc_feature: MA Experiment 20000436 PARAMETER Experiment Name: At_Drought_P Parameter: Plant Line Value: WS
  misc_feature: MA Experiment 20000436 PARAMETER Experiment Name: At_Drought_P Parameter: Timepoint (hr) Value: 12
  misc_feature: MA Experiment 20000436 PARAMETER Experiment Name: At_Drought_P Parameter: Tissue Value: Whole Plant
  misc_feature: MA Experiment 20000436 PARAMETER Experiment Name: At_Drought_P Parameter: Treatment Value: Drought vs. No Drought
  misc_feature: MA Experiment ID: 20000437 Result: Down-regulated in Transcription
  misc_feature: MA Experiment 20000437 PARAMETER Experiment Name: At_Drought_P Parameter: Age (day) Value: 8
  misc_feature: MA Experiment 20000437 PARAMETER Experiment Name: At_Drought_P Parameter: Organism Value: A. thaliana
  misc_feature: MA Experiment 20000437 PARAMETER Experiment Name: At_Drought_P Parameter: Plant Line Value: WS
  misc_feature: MA Experiment 20000437 PARAMETER Experiment Name: At_Drought_P Parameter: Timepoint (hr) Value: 24
  misc_feature: MA Experiment 20000437 PARAMETER Experiment Name: At_Drought_P Parameter: Tissue Value: Whole Plant
  misc_feature: MA Experiment 20000437 PARAMETER Experiment Name: At_Drought_P Parameter: Treatment Value: Drought vs. No Drought
  misc_feature: MA Experiment ID: 20000438 Result: Down-regulated in Transcription
  misc_feature: MA Experiment 20000438 PARAMETER Experiment Name: At_Shoots__P Parameter: Age (day) Value: 14
  misc_feature: MA Experiment 20000438 PARAMETER Experiment Name: At_Shoots__P Parameter: Tissue Value: Shoots vs. Whole Plant
  misc_feature: MA Experiment ID: 20000439 Result: Down-regulated in Transcription
  misc_feature: MA Experiment 20000439 PARAMETER Experiment Name: At_Roots__P Parameter: Age (day) Value: 14 vs. 21
  misc_feature: MA Experiment 20000439 PARAMETER Experiment Name: At_Roots__P Parameter: Organism Value: A. thaliana
  misc_feature: MA Experiment 20000439 PARAMETER Experiment Name: At_Roots__P Parameter: Tissue Value: Roots vs. Whole Plant
  misc_feature: MA Experiment ID: 20000495 Result: Up-regulated in Transcription
  misc_feature: MA Experiment 20000495 PARAMETER Experiment Name: At_Guard_Cells_P Parameter: Harvest Date Value: 8/2/2002
  misc_feature: MA Experiment 20000495 PARAMETER Experiment Name: At_Guard_Cells_P Parameter: Organism Value: A. thaliana
  misc_feature: MA Experiment 20000495 PARAMETER Experiment Name: At_Guard_Cells_P Parameter: Tissue Value: Guard Cells vs. Leaves
  misc_feature: MA Experiment ID: 20000496 Result: Up-regulated in Transcription
  misc_feature: MA Experiment 20000496 PARAMETER Experiment Name: At_Guard_Cells_P Parameter: Harvest Date Value: 7/19/2002
  misc_feature: MA Experiment 20000496 PARAMETER Experiment Name: At_Guard_Cells_P Parameter: Organism Value: Canola
  misc_feature: MA Experiment 20000496 PARAMETER Experiment Name: At_Guard_Cells_P Parameter: Tissue Value: Guard Cells vs. Leaves
  misc_feature: MA Experiment ID: 20000606 Result: Up-regulated in Transcription
  misc_feature: MA Experiment 20000606 PARAMETER Experiment Name: At_CS8548_Mutant_P Parameter: Age (day) Value: 14
  misc_feature: MA Experiment 20000606 PARAMETER Experiment Name: At_CS8548_Mutant_P Parameter: Plant Line Value: CS8548 vs. wt
  misc_feature: MA Experiment 20000606 PARAMETER Experiment Name: At_CS8548_Mutant_P Parameter: Tissue Value: Whole Plant
  misc_feature: MA Experiment ID: 20000794 Result: Down-regulated in Transcription
  misc_feature: MA Experiment 20000794 PARAMETER Experiment Name: At_Petals_P Parameter: Age (day) Value: 23-25 days
  misc_feature: MA Experiment 20000794 PARAMETER Experiment Name: At_Petals_P Parameter: Plant Line Value: WS
  misc_feature: MA Experiment 20000794 PARAMETER Experiment Name: At_Petals_P Parameter: Tissue Value: Petals vs. Whole plant
  misc_feature: MA Experiment ID: 20001451 Result: Down-regulated in Transcription
  misc_feature: MA Experiment 20001451 PARAMETER Experiment Name: At_Far-red-induction_P Parameter: Age (day) Value: 7
  misc_feature: MA Experiment 20001451 PARAMETER Experiment Name: At_Far-red-induction_P Parameter: Light Value: Far-red vs. White
  misc_feature: MA Experiment 20001451 PARAMETER Experiment Name: At_Far-red-induction_P Parameter: Organism Value: A. thaliana
  misc_feature: MA Experiment 20001451 PARAMETER Experiment Name: At_Far-red-induction_P Parameter: Plant Line Value: Columbia
  misc_feature: MA Experiment 20001451 PARAMETER Experiment Name: At_Far-red-induction_P Parameter: Timepoint (hr) Value: 24
  misc_feature: MA Experiment 20001451 PARAMETER Experiment Name: At_Far-red-induction_P Parameter: Tissue Value: Whole Plant
  misc_feature: MA Experiment ID: 20001554 Result: Down-regulated in Transcription
  misc_feature: MA Experiment 20001554 PARAMETER Experiment Name: At_Drought_Soil_Dry_P Parameter: Age (day) Value: 21
  misc_feature: MA Experiment 20001554 PARAMETER Experiment Name: At_Drought_Soil_Dry_P Parameter: Organism Value: A. thaliana
  misc_feature: MA Experiment 20001554 PARAMETER Experiment Name: At_Drought_Soil_Dry_P Parameter: Plant Line Value: WS
  misc_feature: MA Experiment 20001554 PARAMETER Experiment Name: At_Drought_Soil_Dry_P Parameter: Post Timepoint (hr) Value: None
  misc_feature: MA Experiment 20001554 PARAMETER Experiment Name: At_Drought_Soil_Dry_P Parameter: Post-Treatment Value: None
  misc_feature: MA Experiment 20001554 PARAMETER Experiment Name: At_Drought_Soil_Dry_P Parameter: Timepoint (day) Value: 7
  misc_feature: MA Experiment 20001554 PARAMETER Experiment Name: At_Drought_Soil_Dry_P Parameter: Treatment Value: Drought vs. No Drought
  misc_feature: MA Experiment ID: 20001555 Result: Down-regulated in Transcription
  misc_feature: MA Experiment 20001555 PARAMETER Experiment Name: At_Drought_Soil_Dry_P Parameter: Age (day) Value: 24
  misc_feature: MA Experiment 20001555 PARAMETER Experiment Name: At_Drought_Soil_Dry_P Parameter: Organism Value: A. thaliana
  misc_feature: MA Experiment 20001555 PARAMETER Experiment Name: At_Drought_Soil_Dry_P Parameter: Plant Line Value: WS
  misc_feature: MA Experiment 20001555 PARAMETER Experiment Name: At_Drought_Soil_Dry_P Parameter: Post Timepoint (hr) Value: None
  misc_feature: MA Experiment 20001555 PARAMETER Experiment Name: At_Drought_Soil_Dry_P Parameter: Post-Treatment Value: None
  misc_feature: MA Experiment 20001555 PARAMETER Experiment Name: At_Drought_Soil_Dry_P Parameter: Timepoint (day) Value: 10
  misc_feature: MA Experiment 20001555 PARAMETER Experiment Name: At_Drought_Soil_Dry_P Parameter: Treatment Value: Drought vs. No Drought
  misc_feature: MA Experiment ID: 20001556 Result: Down-regulated in Transcription
  misc_feature: MA Experiment 20001556 PARAMETER Experiment Name: At_Drought_Soil_Dry_P Parameter: Age (day) Value: 26
  misc_feature: MA Experiment 20001556 PARAMETER Experiment Name: At_Drought_Soil_Dry_P Parameter: Organism Value: A. thaliana
  misc_feature: MA Experiment 20001556 PARAMETER Experiment Name: At_Drought_Soil_Dry_P Parameter: Plant Line Value: WS
  misc_feature: MA Experiment 20001556 PARAMETER Experiment Name: At_Drought_Soil_Dry_P Parameter: Post Timepoint (hr) Value: None
  misc_feature: MA Experiment 20001556 PARAMETER Experiment Name: At_Drought_Soil_Dry_P Parameter: Post-Treatment Value: None
  misc_feature: MA Experiment 20001556 PARAMETER Experiment Name: At_Drought_Soil_Dry_P Parameter: Timepoint (day) Value: 12
  misc_feature: MA Experiment 20001556 PARAMETER Experiment Name: At_Drought_Soil_Dry_P Parameter: Treatment Value: Drought vs. No Drought
  misc_feature: MA Experiment ID: 20001557 Result: Up-regulated in Transcription
  misc_feature: MA Experiment 20001557 PARAMETER Experiment Name: At_Drought_Soil_Dry_P Parameter: Age (day) Value: 27
  misc_feature: MA Experiment 20001557 PARAMETER Experiment Name: At_Drought_Soil_Dry_P Parameter: Organism Value: A. thaliana
  misc_feature: MA Experiment 20001557 PARAMETER Experiment Name: At_Drought_Soil_Dry_P Parameter: Plant Line Value: WS
  misc_feature: MA Experiment 20001557 PARAMETER Experiment Name: At_Drought_Soil_Dry_P Parameter: Post Timepoint (hr) Value: 3
  misc_feature: MA Experiment 20001557 PARAMETER Experiment Name: At_Drought_Soil_Dry_P Parameter: Post-Treatment Value: Re-Water vs. No Drought
  misc_feature: MA Experiment 20001557 PARAMETER Experiment Name: At_Drought_Soil_Dry_P Parameter: Timepoint (day) Value: 13
  misc_feature: MA Experiment 20001557 PARAMETER Experiment Name: At_Drought_Soil_Dry_P Parameter: Treatment Value: Drought vs. No Drought
  misc_feature: MA Experiment ID: 20001558 Result: Up-regulated in Transcription
  misc_feature: MA Experiment 20001558 PARAMETER Experiment Name: At_Drought_Soil_Dry_P Parameter: Age (day) Value: 27
  misc_feature: MA Experiment 20001558 PARAMETER Experiment Name: At_Drought_Soil_Dry_P Parameter: Organism Value: A. thaliana
  misc_feature: MA Experiment 20001558 PARAMETER Experiment Name: At_Drought_Soil_Dry_P Parameter: Plant Line Value: WS
  misc_feature: MA Experiment 20001558 PARAMETER Experiment Name: At_Drought_Soil_Dry_P Parameter: Post Timepoint (hr) Value: 6
  misc_feature: MA Experiment 20001558 PARAMETER Experiment Name: At_Drought_Soil_Dry_P Parameter: Post-Treatment Value: Re-Water vs. No Drought
  misc_feature: MA Experiment 20001558 PARAMETER Experiment Name: At_Drought_Soil_Dry_P Parameter: Timepoint (day) Value: 13
  misc_feature: MA Experiment 20001558 PARAMETER Experiment Name: At_Drought_Soil_Dry_P Parameter: Treatment Value: Drought vs. No Drought
  misc_feature: MA Experiment ID: 20001560 Result: Up-regulated in Transcription
  misc_feature: MA Experiment 20001560 PARAMETER Experiment Name: At_Drought_Soil_Dry_P Parameter: Age (day) Value: 28
  misc_feature: MA Experiment 20001560 PARAMETER Experiment Name: At_Drought_Soil_Dry_P Parameter: Organism Value: A. thaliana
  misc_feature: MA Experiment 20001560 PARAMETER Experiment Name: At_Drought_Soil_Dry_P Parameter: Plant Line Value: WS
  misc_feature: MA Experiment 20001560 PARAMETER Experiment Name: At_Drought_Soil_Dry_P Parameter: Post Timepoint (hr) Value: None
  misc_feature: MA Experiment 20001560 PARAMETER Experiment Name: At_Drought_Soil_Dry_P Parameter: Post-Treatment Value: None
  misc_feature: MA Experiment 20001560 PARAMETER Experiment Name: At_Drought_Soil_Dry_P Parameter: Timepoint (day) Value: 14
  misc_feature: MA Experiment 20001560 PARAMETER Experiment Name: At_Drought_Soil_Dry_P Parameter: Treatment Value: Drought vs. No Drought
  misc_feature: MA Experiment ID: 20001904 Result: Down-regulated in Transcription
  misc_feature: MA Experiment 20001904 PARAMETER Experiment Name: At_Drought_Reproduction_P Parameter: Age (day) Value: 37
  misc_feature: MA Experiment 20001904 PARAMETER Experiment Name: At_Drought_Reproduction_P Parameter: Organism Value: A. thaliana
  misc_feature: MA Experiment 20001904 PARAMETER Experiment Name: At_Drought_Reproduction_P Parameter: Plant Line Value: WS
  misc_feature: MA Experiment 20001904 PARAMETER Experiment Name: At_Drought_Reproduction_P Parameter: Timepoint (day) Value: 7
  misc_feature: MA Experiment 20001904 PARAMETER Experiment Name: At_Drought_Reproduction_P Parameter: Tissue Value: Rosettes
  misc_feature: MA Experiment 20001904 PARAMETER Experiment Name: At_Drought_Reproduction_P Parameter: Treatment Value: Drought vs. No Drought
  misc_feature: MA Experiment ID: 20001905 Result: Down-regulated in Transcription
  misc_feature: MA Experiment 20001905 PARAMETER Experiment Name: At_Drought_Reproduction_P Parameter: Age (day) Value: 40
  misc_feature: MA Experiment 20001905 PARAMETER Experiment Name: At_Drought_Reproduction_P Parameter: Organism Value: A. thaliana
  misc_feature: MA Experiment 20001905 PARAMETER Experiment Name: At_Drought_Reproduction_P Parameter: Plant Line Value: WS
  misc_feature: MA Experiment 20001905 PARAMETER Experiment Name: At_Drought_Reproduction_P Parameter: Timepoint (day) Value: 10
  misc_feature: MA Experiment 20001905 PARAMETER Experiment Name: At_Drought_Reproduction_P Parameter: Tissue Value: Rosettes
  misc_feature: MA Experiment 20001905 PARAMETER Experiment Name: At_Drought_Reproduction_P Parameter: Treatment Value: Drought vs. No Drought
  misc_feature: MA Experiment ID: 20001906 Result: Down-regulated in Transcription
  misc_feature: MA Experiment 20001906 PARAMETER Experiment Name: At_Drought_Reproduction_P Parameter: Age (day) Value: 35
  misc_feature: MA Experiment 20001906 PARAMETER Experiment Name: At_Drought_Reproduction_P Parameter: Organism Value: A. thaliana
  misc_feature: MA Experiment 20001906 PARAMETER Experiment Name: At_Drought_Reproduction_P Parameter: Plant Line Value: WS
  misc_feature: MA Experiment 20001906 PARAMETER Experiment Name: At_Drought_Reproduction_P Parameter: Timepoint (day) Value: 5
  misc_feature: MA Experiment 20001906 PARAMETER Experiment Name: At_Drought_Reproduction_P Parameter: Tissue Value: Siliques
  misc_feature: MA Experiment 20001906 PARAMETER Experiment Name: At_Drought_Reproduction_P Parameter: Treatment Value: Drought vs. No Drought
  misc_feature: MA Experiment ID: 20001907 Result: Down-regulated in Transcription
  misc_feature: MA Experiment 20001907 PARAMETER Experiment Name: At_Drought_Reproduction_P Parameter: Age (day) Value: 37
  misc_feature: MA Experiment 20001907 PARAMETER Experiment Name: At_Drought_Reproduction_P Parameter: Organism Value: A. thaliana
  misc_feature: MA Experiment 20001907 PARAMETER Experiment Name: At_Drought_Reproduction_P Parameter: Plant Line Value: WS
  misc_feature: MA Experiment 20001907 PARAMETER Experiment Name: At_Drought_Reproduction_P Parameter: Timepoint (day) Value: 7
  misc_feature: MA Experiment 20001907 PARAMETER Experiment Name: At_Drought_Reproduction_P Parameter: Tissue Value: Siliques
  misc_feature: MA Experiment 20001907 PARAMETER Experiment Name: At_Drought_Reproduction_P Parameter: Treatment Value: Drought vs. No Drought
  misc_feature: MA Experiment ID: 20001908 Result: Down-regulated in Transcription
  misc_feature: MA Experiment 20001908 PARAMETER Experiment Name: At_Drought_Reproduction_P Parameter: Age (day) Value: 40
  misc_feature: MA Experiment 20001908 PARAMETER Experiment Name: At_Drought_Reproduction_P Parameter: Organism Value: A. thaliana
  misc_feature: MA Experiment 20001908 PARAMETER Experiment Name: At_Drought_Reproduction_P Parameter: Plant Line Value: WS
  misc_feature: MA Experiment 20001908 PARAMETER Experiment Name: At_Drought_Reproduction_P Parameter: Timepoint (day) Value: 10
  misc_feature: MA Experiment 20001908 PARAMETER Experiment Name: At_Drought_Reproduction_P Parameter: Tissue Value: Siliques
  misc_feature: MA Experiment 20001908 PARAMETER Experiment Name: At_Drought_Reproduction_P Parameter: Treatment Value: Drought vs. No Drought
  misc_feature: MA Experiment ID: 20001911 Result: Down-regulated in Transcription
  misc_feature: MA Experiment 20001911 PARAMETER Experiment Name: At_Drought_Reproduction_P Parameter: Age (day) Value: 40
  misc_feature: MA Experiment 20001911 PARAMETER Experiment Name: At_Drought_Reproduction_P Parameter: Organism Value: A. thaliana
  misc_feature: MA Experiment 20001911 PARAMETER Experiment Name: At_Drought_Reproduction_P Parameter: Plant Line Value: WS
  misc_feature: MA Experiment 20001911 PARAMETER Experiment Name: At_Drought_Reproduction_P Parameter: Timepoint (day) Value: 10
  misc_feature: MA Experiment 20001911 PARAMETER Experiment Name: At_Drought_Reproduction_P Parameter: Tissue Value: Flowers
  misc_feature: MA Experiment 20001911 PARAMETER Experiment Name: At_Drought_Reproduction_P Parameter: Treatment Value: Drought vs. No Drought
atggtcggtatggatttgttcaaatgtgtaatgatgataatggtgttggttgtctcttgtggtgaagctgtttctggagctaagttcgatgagctttatcggtcaagctgggctatggatcattgtgtcaacgaaggcgaagtcacaaaactcaagcttgacaattactctggagctgggtttgaatcaagaagcaaatacttgtttggtaaagtctctatccagattaagcttgttgagggtgattcagcaggaacagtcactgctttctacatgtcttcagatggtccgaaccacaacgaattcgattttgagttcttagggaacactaccggcgagccttacatagtccagaccaatatctacgtgaacggagttggaaacagagaacaaagactcaacctttggttcgatcccaccactgagtttcacacttactcaatcctctggagtaaacgcagtgttgtattcatggtagacgaaacaccgattcgagttcagaagaatcttgaagagaaaggtatcccatttgctaaagatcaagcaatgggtgtttacagctccatttggaatgcagatgattgggctacacaaggaggtcttgttaaaactgattggagtcacgctcctttcgttgcttcttacaaagaattccaaatcgatgcatgtgagattccaacaactactgatctaagcaagtgtaatggagaccagaagttttggtgggatgaaccaactgtctctgagcttagccttcatcagaatcatcagcttatttgggttcgagctaatcatatgatttatgattattgttttgatgctactaggtttcctgttactcctcttgagtgccaacatcatcgaaacaaaatagcaaaaaactcgattaagatacttttaacaatggagacaagatctgtgaaacggaagaagaagaagaaagaagaagaagcaaattggtttatcagagtagatagaatcagcaacctccctgattctctaaatcatcagattcttctcttgcttcctcttaaatctgcagcacaagctagcttactttcgaaacgatggagatctctctttctctcattgcctgatcttgatttcacctccatcaacgatctcaagaatccgaaatctttctcttctaactccatttacaaagtgctttctcttcgtagtcatcgtgactccaacaatcttagatcacttcgttttcgcgttcccgtcactttcacaagtctcaattccttgattcgtttagctgttactcatcaggttcaagatcttgacattgaagtcactaccaaagactactttaacttccctcgttggattgtgacctctcaaaatttaagagctctgacgcttaaatcagccaaccttggttttcgattacctccttcatcatcagcacgaggaggtttccaaaagcttacttcactctctttatctcgtgtgatactacacaatcaaccttgtctgtcagatttcttcactgatccgagcttccctcttctggagaaactaaccctagaatgttgctttggactcaaggaacttaaggttagttgccgtcttctccaagagttttctctaaagaactctttacagcttgagggcttagaggtttctggtaataagcttcagaaacttaaggttgagagttgcttctattcatactcagaaaagagctttgtgaagattaacacaccgaatctcaaaactttcctttggaattcaaacgctgtcactactagtgttcatttcttggacaagttagtttgtctgagaaaagcatttgttaaagtgttttggcatcatcaagatctcaattctcagatacaaagcttattcactctcttgtcaggtctctgtcattcctataaactacaacttggaaaccaatccgtagagattttgtcgagtaagaagggactattaaagaatcatcttctaccgtttcacaacatgagattcttggaactgcaaacacgtttgaatagacacaatgttcaaacactgtcatgtctgttcaagagctgtccaatgctaaacatacttaccgtcaaaatcattgatgatcaaacaagtgaaagaaggcaatggaataaggatttgtgggatatgtcaaactcagagattcagtactgggaatctcaagcctatgaattagaatctttcttgaaccacttggaatttgtggagattcacggattcgtagagtgcgagaacgaaatgagcctcgcaatctttttgctgagacatggaaaggctttaatcaagatgacgcttcggtctagtttcctctgtagagactctctccgcagacaaatgataaggtcacagctaacgggattctccatggcttcttccaaagccaaaatctcatttcattga

SEQ ID NO: 79147 - protein, 799 aa, Arabidopsis thaliana
  peptide (1)..(799): Ceres Seq. ID no. 12649325
  misc_feature (29)..(208): Pfam Name: Glycosyl hydrolases family 16 Pfam Description: Glycosyl hydrolases family 16
  misc_feature (302)..(799): Homolog of NCBI NO: 15236266 NR Description: F-box protein family; protein id: At4g03220.1
  misc_feature (1)..(289): Homolog of NCBI NO: 15236265 NR Description: xyloglucan endotransglycosylase, putative; id: At4g03210.1, supported by cDNA: 17748., supported by cDNA:
  misc_feature (4)..(289): Homolog of NCBI NO: 21553878 NR Description: putative xyloglucan endotransglycosylase
  misc_feature (14)..(284): Homolog of NCBI NO: 5070246 NR Description: xyloglucan endo-transglycosylase-like protein
  misc_feature (9)..(289): Homolog of NCBI NO: 15240733 NR Description: xyloglucan endotransglycosylase (EXGT-A4); id: At5g13870.1 [Arabidopsis thaliana] endoxyloglucan transferase [Arabidopsis thaliana]
  misc_feature (29)..(289): Homolog of NCBI NO: 950299 NR Description: xyloglucan endotransglycosylase precursor
  misc_feature (28)..(289): Homolog of NCBI NO: 541939 NR Description: xyloglucan endo-1,4-beta-D-glucanase (EC 3.2.1.-)
MVGMDLFKCVMMIMVLVVSCGEAVSGAKFDELYRSSWAMDHCVNEGEVTKLKLDNYSGAGFESRSKYLFGKVSIQIKLVEGDSAGTVTAFYMSSDGPNHNEFDFEFLGNTTGEPYIVQTNIYVNGVGNREQRLNLWFDPTTEFHTYSILWSKRSVVFMVDETPIRVQKNLEEKGIPFAKDQAMGVYSSIWNADDWATQGGLVKTDWSHAPFVASYKEFQIDACEIPTTTDLSKCNGDQKFWWDEPTVSELSLHQNHQLIWVRANHMIYDYCFDATRFPVTPLECQHHRNKIAKNSIKILLTMETRSVKRKKKKKEEEANWFIRVDRISNLPDSLNHQILLLLPLKSAAQASLLSKRWRSLFLSLPDLDFTSINDLKNPKSFSSNSIYKVLSLRSHRDSNNLRSLRFRVPVTFTSLNSLIRLAVTHQVQDLDIEVTTKDYFNFPRWIVTSQNLRALTLKSANLGFRLPPSSSARGGFQKLTSLSLSRVILHNQPCLSDFFTDPSFPLLEKLTLECCFGLKELKVSCRLLQEFSLKNSLQLEGLEVSGNKLQKLKVESCFYSYSEKSFVKINTPNLKTFLWNSNAVTTSVHFLDKLVCLRKAFVKVFWHHQDLNSQIQSLFTLLSGLCHSYKLQLGNQSVEILSSKKGLLKNHLLPFHNMRFLELQTRLNRHNVQTLSCLFKSCPMLNILTVKIIDDQTSERRQWNKDLWDMSNSEIQYWESQAYELESFLNHLEFVEIHGFVECENEMSLAIFLLRHGKALIKMTLRSSFLCRDSLRRQMIRSQLTGFSMASSKAKISFH

SEQ ID NO: 79148 - protein, 796 aa, Arabidopsis thaliana
  peptide (1)..(796): Ceres Seq. ID no. 12649326
  misc_feature (26)..(205): Pfam Name: Glycosyl hydrolases family 16 Pfam Description: Glycosyl hydrolases family 16
  misc_feature (299)..(796): Homolog of NCBI NO: 15236266 NR Description: F-box protein family; protein id: At4g03220.1
  misc_feature (1)..(286): Homolog of NCBI NO: 15236265 NR Description: xyloglucan endotransglycosylase, putative; id: At4g03210.1, supported by cDNA: 17748., supported by cDNA:
  misc_feature (1)..(286): Homolog of NCBI NO: 21553878 NR Description: putative xyloglucan endotransglycosylase
  misc_feature (11)..(281): Homolog of NCBI NO: 5070246 NR Description: xyloglucan endo-transglycosylase-like protein
  misc_feature (6)..(286): Homolog of NCBI NO: 15240733 NR Description: xyloglucan endotransglycosylase (EXGT-A4); id: At5g13870.1 [Arabidopsis thaliana] endoxyloglucan transferase [Arabidopsis thaliana]
  misc_feature (26)..(286): Homolog of NCBI NO: 950299 NR Description: xyloglucan endotransglycosylase precursor
  misc_feature (25)..(286): Homolog of NCBI NO: 541939 NR Description: xyloglucan endo-1,4-beta-D-glucanase (EC 3.2.1.-)
MDLFKCVMMIMVLVVSCGEAVSGAKFDELYRSSWAMDHCVNEGEVTKLKLDNYSGAGFESRSKYLFGKVSIQIKLVEGDSAGTVTAFYMSSDGPNHNEFDFEFLGNTTGEPYIVQTNIYVNGVGNREQRLNLWFDPTTEFHTYSILWSKRSVVFMVDETPIRVQKNLEEKGIPFAKDQAMGVYSSIWNADDWATQGGLVKTDWSHAPFVASYKEFQIDACEIPTTTDLSKCNGDQKFWWDEPTVSELSLHQNHQLIWVRANHMIYDYCFDATRFPVTPLECQHHRNKIAKNSIKILLTMETRSVKRKKKKKEEEANWFIRVDRISNLPDSLNHQILLLLPLKSAAQASLLSKRWRSLFLSLPDLDFTSINDLKNPKSFSSNSIYKVLSLRSHRDSNNLRSLRFRVPVTFTSLNSLIRLAVTHQVQDLDIEVTTKDYFNFPRWIVTSQNLRALTLKSANLGFRLPPSSSARGGFQKLTSLSLSRVILHNQPCLSDFFTDPSFPLLEKLTLECCFGLKELKVSCRLLQEFSLKNSLQLEGLEVSGNKLQKLKVESCFYSYSEKSFVKINTPNLKTFLWNSNAVTTSVHFLDKLVCLRKAFVKVFWHHQDLNSQIQSLFTLLSGLCHSYKLQLGNQSVEILSSKKGLLKNHLLPFHNMRFLELQTRLNRHNVQTLSCLFKSCPMLNILTVKIIDDQTSERRQWNKDLWDMSNSEIQYWESQAYELESFLNHLEFVEIHGFVECENEMSLAIFLLRHGKALIKMTLRSSFLCRDSLRRQMIRSQLTGFSMASSKAKISFH

SEQ ID NO: 79149 - protein, 789 aa, Arabidopsis thaliana
  peptide (1)..(789): Ceres Seq. ID no. 12649327
  misc_feature (19)..(198): Pfam Name: Glycosyl hydrolases family 16 Pfam Description: Glycosyl hydrolases family 16
  misc_feature (292)..(789): Homolog of NCBI NO: 15236266 NR Description: F-box protein family; protein id: At4g03220.1
  misc_feature (1)..(279): Homolog of NCBI NO: 15236265 NR Description: xyloglucan endotransglycosylase, putative; id: At4g03210.1, supported by cDNA: 17748., supported by cDNA:
  misc_feature (1)..(279): Homolog of NCBI NO: 21553878 NR Description: putative xyloglucan endotransglycosylase
  misc_feature (4)..(274): Homolog of NCBI NO: 5070246 NR Description: xyloglucan endo-transglycosylase-like protein
  misc_feature (1)..(279): Homolog of NCBI NO: 15240733 NR Description: xyloglucan endotransglycosylase (EXGT-A4); id: At5g13870.1 [Arabidopsis thaliana] endoxyloglucan transferase [Arabidopsis thaliana]
  misc_feature (19)..(279): Homolog of NCBI NO: 950299 NR Description: xyloglucan endotransglycosylase precursor
  misc_feature (18)..(279): Homolog of NCBI NO: 541939 NR Description: xyloglucan endo-1,4-beta-D-glucanase (EC 3.2.1.-)
MMIMVLVVSCGEAVSGAKFDELYRSSWAMDHCVNEGEVTKLKLDNYSGAGFESRSKYLFGKVSIQIKLVEGDSAGTVTAFYMSSDGPNHNEFDFEFLGNTTGEPYIVQTNIYVNGVGNREQRLNLWFDPTTEFHTYSILWSKRSVVFMVDETPIRVQKNLEEKGIPFAKDQAMGVYSSIWNADDWATQGGLVKTDWSHAPFVASYKEFQIDACEIPTTTDLSKCNGDQKFWWDEPTVSELSLHQNHQLIWVRANHMIYDYCFDATRFPVTPLECQHHRNKIAKNSIKILLTMETRSVKRKKKKKEEEANWFIRVDRISNLPDSLNHQILLLLPLKSAAQASLLSKRWRSLFLSLPDLDFTSINDLKNPKSFSSNSIYKVLSLRSHRDSNNLRSLRFRVPVTFTSLNSLIRLAVTHQVQDLDIEVTTKDYFNFPRWIVTSQNLRALTLKSANLGFRLPPSSSARGGFQKLTSLSLSRVILHNQPCLSDFFTDPSFPLLEKLTLECCFGLKELKVSCRLLQEFSLKNSLQLEGLEVSGNKLQKLKVESCFYSYSEKSFVKINTPNLKTFLWNSNAVTTSVHFLDKLVCLRKAFVKVFWHHQDLNSQIQSLFTLLSGLCHSYKLQLGNQSVEILSSKKGLLKNHLLPFHNMRFLELQTRLNRHNVQTLSCLFKSCPMLNILTVKIIDDQTSERRQWNKDLWDMSNSEIQYWESQAYELESFLNHLEFVEIHGFVECENEMSLAIFLLRHGKALIKMTLRSSFLCRDSLRRQMIRSQLTGFSMASSKAKISFH

SEQ ID NO: 79150 - DNA, 2412 bp, Arabidopsis thaliana
  misc_feature (1)..(2412): Ceres Seq. ID no. 12649336
  misc_feature: MA Experiment ID: 20000179 Result: Up-regulated in Transcription
  misc_feature: MA Experiment 20000179 PARAMETER Experiment Name: At_Germinating_Seeds_P Parameter: Age (hr) Value: 6 vs. 0
  misc_feature: MA Experiment 20000179 PARAMETER Experiment Name: At_Germinating_Seeds_P Parameter: Tissue Value: Germinating Seeds
  misc_feature: MA Experiment ID: 20000437 Result: Up-regulated in Transcription
  misc_feature: MA Experiment 20000437 PARAMETER Experiment Name: At_Drought_P Parameter: Age (day) Value: 8
  misc_feature: MA Experiment 20000437 PARAMETER Experiment Name: At_Drought_P Parameter: Organism Value: A. thaliana
  misc_feature: MA Experiment 20000437 PARAMETER Experiment Name: At_Drought_P Parameter: Plant Line Value: WS
  misc_feature: MA Experiment 20000437 PARAMETER Experiment Name: At_Drought_P Parameter: Timepoint (hr) Value: 24
  misc_feature: MA Experiment 20000437 PARAMETER Experiment Name: At_Drought_P Parameter: Tissue Value: Whole Plant
  misc_feature: MA Experiment 20000437 PARAMETER Experiment Name: At_Drought_P Parameter: Treatment Value: Drought vs. No Drought
  misc_feature: MA Experiment ID: 20000439 Result: Up-regulated in Transcription
  misc_feature: MA Experiment 20000439 PARAMETER Experiment Name: At_Roots__P Parameter: Age (day) Value: 14 vs. 21
  misc_feature: MA Experiment 20000439 PARAMETER Experiment Name: At_Roots__P Parameter: Organism Value: A. thaliana
  misc_feature: MA Experiment 20000439 PARAMETER Experiment Name: At_Roots__P Parameter: Tissue Value: Roots vs. Whole Plant
  misc_feature: MA Experiment ID: 20000495 Result: Up-regulated in Transcription
  misc_feature: MA Experiment 20000495 PARAMETER Experiment Name: At_Guard_Cells_P Parameter: Harvest Date Value: 8/2/2002
  misc_feature: MA Experiment 20000495 PARAMETER Experiment Name: At_Guard_Cells_P Parameter: Organism Value: A. thaliana
  misc_feature: MA Experiment 20000495 PARAMETER Experiment Name: At_Guard_Cells_P Parameter: Tissue Value: Guard Cells vs. Leaves
  misc_feature: MA Experiment ID: 20000794 Result: Up-regulated in Transcription
  misc_feature: MA Experiment 20000794 PARAMETER Experiment Name: At_Petals_P Parameter: Age (day) Value: 23-25 days
  misc_feature: MA Experiment 20000794 PARAMETER Experiment Name: At_Petals_P Parameter: Plant Line Value: WS
  misc_feature: MA Experiment 20000794 PARAMETER Experiment Name: At_Petals_P Parameter: Tissue Value: Petals vs. Whole plant
  misc_feature: MA Experiment ID: 20001906 Result: Up-regulated in Transcription
  misc_feature: MA Experiment 20001906 PARAMETER Experiment Name: At_Drought_Reproduction_P Parameter: Age (day) Value: 35
  misc_feature: MA Experiment 20001906 PARAMETER Experiment Name: At_Drought_Reproduction_P Parameter: Organism Value: A. thaliana
  misc_feature: MA Experiment 20001906 PARAMETER Experiment Name: At_Drought_Reproduction_P Parameter: Plant Line Value: WS
  misc_feature: MA Experiment 20001906 PARAMETER Experiment Name: At_Drought_Reproduction_P Parameter: Timepoint (day) Value: 5
  misc_feature: MA Experiment 20001906 PARAMETER Experiment Name: At_Drought_Reproduction_P Parameter: Tissue Value: Siliques
  misc_feature: MA Experiment 20001906 PARAMETER Experiment Name: At_Drought_Reproduction_P Parameter: Treatment Value: Drought vs. No Drought
atgattctttctgtcttcttctatatgtttttgctgcatattcgtcgattagattgttttgttgcagttcaagactccaaaacattgttcaaaggttcaacattgatcaatgacagccatggagagactcttgtttcagctggtcagagatttgagcttggcttcttcactcctaatggaagctccgacgaaagaaggtacttagggatttggttttacaatttacatccactgactgttgtctgggttgcaaatcgtgaatctccggttcttgaccgttcctgcattttcaccatctctaaagatgggaatcttgaagttattgattcaaagggaagagtgtattgggacaccggtgttaaaccttcctcagtatctgcggagagaatggtaaagctgatggataatggtaatcttgtgttgattagtgatggaaatgaagcaaatgtggtttggcagagttttcagaatcctactgatacatttctcccagggatgaggatggatgagaatatgactttatcatcatggagaagcttcaacgatccatcacatggaaatttcacctttcagatggatcaagaagaagacaaacagttcatcatttggaaaagatcaatgagatactggaaatccggaatttcgggtaaattcataggatccgacgagatgccttatgcgatttcttactttctttccaatttcacagagactgttactgttcacaatgcctctgtgcctcctctcttcacatctttgtataccaatacaaggttcaccatgagctcctctggtcaagctcagtacttcaggttagatggagaaagattctgggcacagatttgggctgaacctagagatgaatgtagtgtatacaatgcttgtggaaattttggtagctgcaacagcaagaatgaggaaatgtgtaagtgtttgccaggttttaggcctaatttcctggagaaatgggtcaagggagatttttctggtggatgttccagggagtcaaggatctgtggtaaagacggtgttgtggtgggagacatgttcttgaatctgagtgtggttgaagtaggaagtccggattcacagtttgatgcacataatgaaaaagaatgcagagcagagtgcttgaataattgccaatgccaagcttactcatatgaagaagttgatatacttcaaagcaataccaagtgctggatttggttggaggatctcaataatctcaaggaaggctatttaggtagccgcaacgttttcattcgcgtagcagttccagatatagactgtaaagactggcctaattcatcttgcagtaaatctggagaagggaagaagcagtgcttctgcaatcatgattttaagtggaatggattcaatctaaactgcactcaagatgttccatcttttgagctcgagaccatcctatatgcaacatccaacttctcaaatgcaaacaagctaggccaaggagggtttggaccggtttataagggaatgtttcctggagatcaagagattgctgtgaagaggctatctcgctgctcgggtcaaggactggaggaattcaagaatgaagttgttttgattgccaagctccaacaccggaatcttgttcgacttcttggctattgtgttgctggagaagagaaactgttattgtatgaatacatgccacacaaaagcttagacttcttcatcttcgaccggaagctttgccagcgattagattggaagatgcgttgtaatatcattctaggaatcgctcgtggacttctctatctgcatcaagactctagactgagaatcatccacagagatctaaaaacaagcaacattctgttagatgaagagatgaatcccaagatctctgactttggcttggctagaatatttggaggcagtgaaacatcagccaatactaatagagttgttggaacctatggatacatgtctccagagtatgctttagaaggtcttttctcattcaaatcagatgtctttagtttcggcgtggttgtgattgaaactatcagcgggaagcgtaacaccgggtttcatgaacctgagaaatctttaagccttctaggccatgcgtgggatctctggaaagcggaaagggggattgagttattggatcaggctttacaagaatcatgcgaaaccgagggattcttgaagtgcttgaacgtaggacttctctgtgtacaagaagatcctaatgatcgtcctacaatgtcaaatgttgttttcatgctcggaagcagcgaagctgctactcttcctactccaaaacaaccggcttttgttcttagacgttgcccttcatcaagcaaagcttcctcatccaccaagccagaaacttgctctgaaaatgagcttaccataactcttgaagatggaagataa

SEQ ID NO: 79151 - protein, 803 aa, Arabidopsis thaliana
  peptide (1)..(803): Ceres Seq. ID no. 12649337
  misc_feature (77)..(192): Pfam Name: D-mannose binding lectin Pfam Description: D-mannose binding lectin
  misc_feature (43)..(407): Homolog of NCBI NO: 836954 NR Description: receptor protein kinase [Ipomoea trifida]
  misc_feature (456)..(803): Homolog of NCBI NO: 836954 NR Description: receptor protein kinase [Ipomoea trifida]
  misc_feature (28)..(429): Homolog of NCBI NO: 7434416 NR Description: serine/threonine kinase (EC 2.7.1.-) BRLK - wild >gi|2181190|emb|CAA73134.1| serine/threonine kinase [Brassica
  misc_feature (454)..(803): Homolog of NCBI NO: 7434416 NR Description: serine/threonine kinase (EC 2.7.1.-) BRLK - wild >gi|2181190|emb|CAA73134.1| serine/threonine kinase [Brassica
  misc_feature (6)..(432): Homolog of NCBI NO: 15234427 NR Description: receptor-like serine/threonine protein kinase
  misc_feature (463)..(803): Homolog of NCBI NO: 15234427 NR Description: receptor-like serine/threonine protein kinase
  misc_feature (6)..(432): Homolog of NCBI NO: 913141 NR Description: ARK3 product/receptor-like serine/threonine
  misc_feature (463)..(803): Homolog of NCBI NO: 913141 NR Description: ARK3 product/receptor-like serine/threonine
  misc_feature (1)..(429): Homolog of NCBI NO: 15234429 NR Description: serine/threonine kinase - like protein; protein
  misc_feature (454)..(803): Homolog of NCBI NO: 15234429 NR Description: serine/threonine kinase - like protein; protein
MILSVFFYMFLLHIRRLDCFVAVQDSKTLFKGSTLINDSHGETLVSAGQRFELGFFTPNGSSDERRYLGIWFYNLHPLTVVWVANRESPVLDRSCIFTISKDGNLEVIDSKGRVYWDTGVKPSSVSAERMVKLMDNGNLVLISDGNEANVVWQSFQNPTDTFLPGMRMDENMTLSSWRSFNDPSHGNFTFQMDQEEDKQFIIWKRSMRYWKSGISGKFIGSDEMPYAISYFLSNFTETVTVHNASVPPLFTSLYTNTRFTMSSSGQAQYFRLDGERFWAQIWAEPRDECSVYNACGNFGSCNSKNEEMCKCLPGFRPNFLEKWVKGDFSGGCSRESRICGKDGVVVGDMFLNLSVVEVGSPDSQFDAHNEKECRAECLNNCQCQAYSYEEVDILQSNTKCWIWLEDLNNLKEGYLGSRNVFIRVAVPDIDCKDWPNSSCSKSGEGKKQCFCNHDFKWNGFNLNCTQDVPSFELETILYATSNFSNANKLGQGGFGPVYKGMFPGDQEIAVKRLSRCSGQGLEEFKNEVVLIAKLQHRNLVRLLGYCVAGEEKLLLYEYMPHKSLDFFIFDRKLCQRLDWKMRCNIILGIARGLLYLHQDSRLRIIHRDLKTSNILLDEEMNPKISDFGLARIFGGSETSANTNRVVGTYGYMSPEYALEGLFSFKSDVFSFGVVVIETISGKRNTGFHEPEKSLSLLGHAWDLWKAERGIELLDQALQESCETEGFLKCLNVGLLCVQEDPNDRPTMSNVVFMLGSSEAATLPTPKQPAFVLRRCPSSSKASSSTKPETCSENELTITLEDGR

SEQ ID NO: 79152 - protein, 795 aa, Arabidopsis thaliana
  peptide (1)..(795): Ceres Seq. ID no. 12649338
  misc_feature (69)..(184): Pfam Name: D-mannose binding lectin Pfam Description: D-mannose binding lectin
  misc_feature (35)..(399): Homolog of NCBI NO: 836954 NR Description: receptor protein kinase [Ipomoea trifida]
  misc_feature (448)..(795): Homolog of NCBI NO: 836954 NR Description: receptor protein kinase [Ipomoea trifida]
  misc_feature (20)..(421): Homolog of NCBI NO: 7434416 NR Description: serine/threonine kinase (EC 2.7.1.-) BRLK - wild >gi|2181190|emb|CAA73134.1| serine/threonine kinase [Brassica
  misc_feature (446)..(795): Homolog of NCBI NO: 7434416 NR Description: serine/threonine kinase (EC 2.7.1.-) BRLK - wild >gi|2181190|emb|CAA73134.1| serine/threonine kinase [Brassica
  misc_feature (1)..(424): Homolog of NCBI NO: 15234427 NR Description: receptor-like serine/threonine protein kinase
  misc_feature (455)..(795): Homolog of NCBI NO: 15234427 NR Description: receptor-like serine/threonine protein kinase
  misc_feature (1)..(424): Homolog of NCBI NO: 913141 NR Description: ARK3 product/receptor-like serine/threonine
  misc_feature (455)..(795): Homolog of NCBI NO: 913141 NR Description: ARK3 product/receptor-like serine/threonine
  misc_feature (1)..(421): Homolog of NCBI NO: 15234429 NR Description: serine/threonine kinase - like protein; protein
  misc_feature (446)..(795): Homolog of NCBI NO: 15234429 NR Description: serine/threonine kinase - like protein; protein
MFLLHIRRLDCFVAVQDSKTLFKGSTLINDSHGETLVSAGQRFELGFFTPNGSSDERRYLGIWFYNLHPLTVVWVANRESPVLDRSCIFTISKDGNLEVIDSKGRVYWDTGVKPSSVSAERMVKLMDNGNLVLISDGNEANVVWQSFQNPTDTFLPGMRMDENMTLSSWRSFNDPSHGNFTFQMDQEEDKQFIIWKRSMRYWKSGISGKFIGSDEMPYAISYFLSNFTETVTVHNASVPPLFTSLYTNTRFTMSSSGQAQYFRLDGERFWAQIWAEPRDECSVYNACGNFGSCNSKNEEMCKCLPGFRPNFLEKWVKGDFSGGCSRESRICGKDGVVVGDMFLNLSVVEVGSPDSQFDAHNEKECRAECLNNCQCQAYSYEEVDILQSNTKCWIWLEDLNNLKEGYLGSRNVFIRVAVPDIDCKDWPNSSCSKSGEGKKQCFCNHDFKWNGFNLNCTQDVPSFELETILYATSNFSNANKLGQGGFGPVYKGMFPGDQEIAVKRLSRCSGQGLEEFKNEVVLIAKLQHRNLVRLLGYCVAGEEKLLLYEYMPHKSLDFFIFDRKLCQRLDWKMRCNIILGIARGLLYLHQDSRLRIIHRDLKTSNILLDEEMNPKISDFGLARIFGGSETSANTNRVVGTYGYMSPEYALEGLFSFKSDVFSFGVVVIETISGKRNTGFHEPEKSLSLLGHAWDLWKAERGIELLDQALQESCETEGFLKCLNVGLLCVQEDPNDRPTMSNVVFMLGSSEAATLPTPKQPAFVLRRCPSSSKASSSTKPETCSENELTITLEDGR

SEQ ID NO: 79153 - protein, 674 aa, Arabidopsis thaliana
  peptide (1)..(674): Ceres Seq. ID no. 12649339
  misc_feature (1)..(63): Pfam Name: D-mannose binding lectin Pfam Description: D-mannose binding lectin
  misc_feature (1)..(278): Homolog of NCBI NO: 836954 NR Description: receptor protein kinase [Ipomoea trifida]
  misc_feature (327)..(674): Homolog of NCBI NO: 836954 NR Description: receptor protein kinase [Ipomoea trifida]
  misc_feature (1)..(300): Homolog of NCBI NO: 7434416 NR Description: serine/threonine kinase (EC 2.7.1.-) BRLK - wild >gi|2181190|emb|CAA73134.1| serine/threonine kinase [Brassica
  misc_feature (325)..(674): Homolog of NCBI NO: 7434416 NR Description: serine/threonine kinase (EC 2.7.1.-) BRLK - wild >gi|2181190|emb|CAA73134.1| serine/threonine kinase [Brassica
  misc_feature (1)..(303): Homolog of NCBI NO: 15234427 NR Description: receptor-like serine/threonine protein kinase
  misc_feature (334)..(674): Homolog of NCBI NO: 15234427 NR Description: receptor-like serine/threonine protein kinase
  misc_feature (1)..(303): Homolog of NCBI NO: 913141 NR Description: ARK3 product/receptor-like serine/threonine
  misc_feature (334)..(674): Homolog of NCBI NO: 913141 NR Description: ARK3 product/receptor-like serine/threonine
  misc_feature (1)..(300): Homolog of NCBI NO: 15234429 NR Description: serine/threonine kinase - like protein; protein
  misc_feature (325)..(674): Homolog of NCBI NO: 15234429 NR Description: serine/threonine kinase - like protein; protein
MVKLMDNGNLVLISDGNEANVVWQSFQNPTDTFLPGMRMDENMTLSSWRSFNDPSHGNFTFQMDQEEDKQFIIWKRSMRYWKSGISGKFIGSDEMPYAISYFLSNFTETVTVHNASVPPLFTSLYTNTRFTMSSSGQAQYFRLDGERFWAQIWAEPRDECSVYNACGNFGSCNSKNEEMCKCLPGFRPNFLEKWVKGDFSGGCSRESRICGKDGVVVGDMFLNLSVVEVGSPDSQFDAHNEKECRAECLNNCQCQAYSYEEVDILQSNTKCWIWLEDLNNLKEGYLGSRNVFIRVAVPDIDCKDWPNSSCSKSGEGKKQCFCNHDFKWNGFNLNCTQDVPSFELETILYATSNFSNANKLGQGGFGPVYKGMFPGDQEIAVKRLSRCSGQGLEEFKNEVVLIAKLQHRNLVRLLGYCVAGEEKLLLYEYMPHKSLDFFIFDRKLCQRLDWKMRCNIILGIARGLLYLHQDSRLRIIHRDLKTSNILLDEEMNPKISDFGLARIFGGSETSANTNRVVGTYGYMSPEYALEGLFSFKSDVFSFGVVVIETISGKRNTGFHEPEKSLSLLGHAWDLWKAERGIELLDQALQESCETEGFLKCLNVGLLCVQEDPNDRPTMSNVVFMLGSSEAATLPTPKQPAFVLRRCPSSSKASSSTKPETCSENELTITLEDGR

SEQ ID NO: 79154 - DNA, 2214 bp, Arabidopsis thaliana
  misc_feature (1)..(2214): Ceres Seq. ID no. 12649439
  misc_feature: MA Experiment ID: 20000355 Result: Up-regulated in Transcription
  misc_feature: MA Experiment 20000355 PARAMETER Experiment Name: At_Siliques_Sub_P Parameter: Age (day) Value: 21
  misc_feature: MA Experiment 20000355 PARAMETER Experiment Name: At_Siliques_Sub_P Parameter: Organism Value: A. thaliana
  misc_feature: MA Experiment 20000355 PARAMETER Experiment Name: At_Siliques_Sub_P Parameter: Plant Line Value: WS
  misc_feature: MA Experiment 20000355 PARAMETER Experiment Name: At_Siliques_Sub_P Parameter: Tissue Value: Less Than 5mm Siliques vs. Whole Plant
atggcgagtgagagttcgcaatcttcctcgccgtcgtcatctcaacctccgtcatctgtaccttctccgtcgccgggtaacaacgtcggcgatacgtttataggaagtttcatcagtctaatttctaagtacgagatccgttacgaaggcattctctaccatctcaacgttcaggactcgacgctaggtctaaaaaacgtaagatcatgtggaacggaggggaggaagaaagatgggccgcaaattccgccatgtgataaagtttacgattacattctttttcgtggaagtgacatcaaggatctccaagttaacccatctccatctgctcaatcaagacaagagattcaaagtgaacaagacgtcaatcagtcccctcactctaggccagctatgactatgagctctccgatttctggctatgatagcggttatggtttggggagaggatcacaatggatcaatacacctgctttgagtagtaaaccggttcctgtcacacaacattcatcagtccctttaagcttccagcctccttcagctaatgctggaagtttgacagaatcaccagtgagcttaattgattcaactcaaagtaatgctggttcctcgatgcccattccttcttttgtgcaaggtaacaaatttgcttccagtggtgtccctcttggtatgatgcagaagccagtttcatcctcctcgaccatacccaatggtccgcagattattgattatttttcttcaccaatcatggggttagtggatgattcatcacaggttgttactcgttcacctgacgtctcttccaatcaatcatactcttccaacccttctcctcttggtcaaacacaactccatactccacctggccttgcttcagtatcctctaacctttctccaccttctgaagcgcagctttctgctccaaatattcagaaaatttaccccagtgcaccccaggctattggtaaagttgtctatgaccctcagtctaatcatcctcaccgatctatacctcatgagttacctgctgtggcttctaattcagctcctgtgattcctggtccattgtcaaaatcgcctgagtcatttttcgatatggatccgtcactgcaatctaggcagcagatggtatataggggtcaagagatgtttgctgcaactaacccggcatcagcgaatgtgccatcacaaagttttgctcccagaaatcatgcaccattgctgcctcttccagtttcagctcatcagtctcggatccctagttctagcattgagtacactgaagaatttgattttgaagcaatgaatgagaagttcaagaagagtgaactatggggttatcttggaagaaataaccagaggaatcaaaatgattatggggaagaaactgcgattgagccaaacgcagaagggaagcctgcatataacaaggatgacttttttgacacaatctcgtgcaatcaacttgaccgtgtggcaagaagcggacaacagcacaaccagtttcccgaacacatgagacaagttcctgaggcatttggtaataattttcaaaggccacctccactacaaccaggtcagggtgcatatctcgctgcacaaaccaattacagaggcggataccataataacaacaacaacaactactactcaaactcgggttatgccatcatttgtgccataatctctattgttgtaatcgttggtggcattatagtcttcgttggttacctggtcattcatcctcgagttcccatcattagtgtcgcggatgctcacctcgacttcttaaagtatgatatagttggagttttgcaaacgcagttaacgattgtgattcgcgtagagaatgataacgctaaggctcatgcgttgtttgatgaaactgagttcaagctaagctatgaaggcaaacctattgcgattttaaaagcgcctgagtttgaagttgttaaagagaaatcaatgttccttccttacttggttcagtcatatccaataccattgaatccaacaatgatgcaagctgtagactatgcggttaaaaaagatgttattactttcgagctcaaaggtggctcaagaactcggtggcgagtcggaccattaggatcggttaagtttgagtgtaaccttagctgtcagcttaggtttagaccttctgatcatagttacattccatctccttgcacctctgctcataagcattag

SEQ ID NO: 79155 - protein, 737 aa, Arabidopsis thaliana
  peptide (1)..(737): Ceres Seq. ID no. 12649440
  misc_feature (1)..(556): Homolog of NCBI NO: 15242378 NR Description: unknown protein; protein id: At5g45330.1 thaliana] >gi|10177004|dbj|BAB10254.1| gene_id:K9E15.11~unknown
  misc_feature (557)..(737): Homolog of NCBI NO: 15242362 NR Description: unknown protein; protein id: At5g45320.1 thaliana] >gi|10177003|dbj|BAB10253.1| gene_id:K9E15.10~unknown
MASESSQSSSPSSSQPPSSVPSPSPGNNVGDTFIGSFISLISKYEIRYEGILYHLNVQDSTLGLKNVRSCGTEGRKKDGPQIPPCDKVYDYILFRGSDIKDLQVNPSPSAQSRQEIQSEQDVNQSPHSRPAMTMSSPISGYDSGYGLGRGSQWINTPALSSKPVPVTQHSSVPLSFQPPSANAGSLTESPVSLIDSTQSNAGSSMPIPSFVQGNKFASSGVPLGMMQKPVSSSSTIPNGPQIIDYFSSPIMGLVDDSSQVVTRSPDVSSNQSYSSNPSPLGQTQLHTPPGLASVSSNLSPPSEAQLSAPNIQKIYPSAPQAIGKVVYDPQSNHPHRSIPHELPAVASNSAPVIPGPLSKSPESFFDMDPSLQSRQQMVYRGQEMFAATNPASANVPSQSFAPRNHAPLLPLPVSAHQSRIPSSSIEYTEEFDFEAMNEKFKKSELWGYLGRNNQRNQNDYGEETAIEPNAEGKPAYNKDDFFDTISCNQLDRVARSGQQHNQFPEHMRQVPEAFGNNFQRPPPLQPGQGAYLAAQTNYRGGYHNNNNNNYYSNSGYAIICAIISIVVIVGGIIVFVGYLVIHPRVPIISVADAHLDFLKYDIVGVLQTQLTIVIRVENDNAKAHALFDETEFKLSYEGKPIAILKAPEFEVVKEKSMFLPYLVQSYPIPLNPTMMQAVDYAVKKDVITFELKGGSRTRWRVGPLGSVKFECNLSCQLRFRPSDHSYIPSPCTSAHKH

SEQ ID NO: 79156 - protein, 606 aa, Arabidopsis thaliana
  peptide (1)..(606): Ceres Seq. ID no. 12649441
  misc_feature (1)..(425): Homolog of NCBI NO: 15242378 NR Description: unknown protein; protein id: At5g45330.1 thaliana] >gi|10177004|dbj|BAB10254.1| gene_id:K9E15.11~unknown
  misc_feature (426)..(606): Homolog of NCBI NO: 15242362 NR Description: unknown protein; protein id: At5g45320.1 thaliana] >gi|10177003|dbj|BAB10253.1| gene_id:K9E15.10~unknown
MTMSSPISGYDSGYGLGRGSQWINTPALSSKPVPVTQHSSVPLSFQPPSANAGSLTESPVSLIDSTQSNAGSSMPIPSFVQGNKFASSGVPLGMMQKPVSSSSTIPNGPQIIDYFSSPIMGLVDDSSQVVTRSPDVSSNQSYSSNPSPLGQTQLHTPPGLASVSSNLSPPSEAQLSAPNIQKIYPSAPQAIGKVVYDPQSNHPHRSIPHELPAVASNSAPVIPGPLSKSPESFFDMDPSLQSRQQMVYRGQEMFAATNPASANVPSQSFAPRNHAPLLPLPVSAHQSRIPSSSIEYTEEFDFEAMNEKFKKSELWGYLGRNNQRNQNDYGEETAIEPNAEGKPAYNKDDFFDTISCNQLDRVARSGQQHNQFPEHMRQVPEAFGNNFQRPPPLQPGQGAYLAAQTNYRGGYHNNNNNNYYSNSGYAIICAIISIVVIVGGIIVFVGYLVIHPRVPIISVADAHLDFLKYDIVGVLQTQLTIVIRVENDNAKAHALFDETEFKLSYEGKPIAILKAPEFEVVKEKSMFLPYLVQSYPIPLNPTMMQAVDYAVKKDVITFELKGGSRTRWRVGPLGSVKFECNLSCQLRFRPSDHSYIPSPCTSAHKH

SEQ ID NO: 79157 - protein, 604 aa, Arabidopsis thaliana
  peptide (1)..(604): Ceres Seq. ID no. 12649442
  misc_feature (1)..(423): Homolog of NCBI NO: 15242378 NR Description: unknown protein; protein id: At5g45330.1 thaliana] >gi|10177004|dbj|BAB10254.1| gene_id:K9E15.11~unknown
  misc_feature (424)..(604): Homolog of NCBI NO: 15242362 NR Description: unknown protein; protein id: At5g45320.1 thaliana] >gi|10177003|dbj|BAB10253.1| gene_id:K9E15.10~unknown
MSSPISGYDSGYGLGRGSQWINTPALSSKPVPVTQHSSVPLSFQPPSANAGSLTESPVSLIDSTQSNAGSSMPIPSFVQGNKFASSGVPLGMMQKPVSSSSTIPNGPQIIDYFSSPIMGLVDDSSQVVTRSPDVSSNQSYSSNPSPLGQTQLHTPPGLASVSSNLSPPSEAQLSAPNIQKIYPSAPQAIGKVVYDPQSNHPHRSIPHELPAVASNSAPVIPGPLSKSPESFFDMDPSLQSRQQMVYRGQEMFAATNPASANVPSQSFAPRNHAPLLPLPVSAHQSRIPSSSIEYTEEFDFEAMNEKFKKSELWGYLGRNNQRNQNDYGEETAIEPNAEGKPAYNKDDFFDTISCNQLDRVARSGQQHNQFPEHMRQVPEAFGNNFQRPPPLQPGQGAYLAAQTNYRGGYHNNNNNNYYSNSGYAIICAIISIVVIVGGIIVFVGYLVIHPRVPIISVADAHLDFLKYDIVGVLQTQLTIVIRVENDNAKAHALFDETEFKLSYEGKPIAILKAPEFEVVKEKSMFLPYLVQSYPIPLNPTMMQAVDYAVKKDVITFELKGGSRTRWRVGPLGSVKFECNLSCQLRFRPSDHSYIPSPCTSAHKH

SEQ ID NO: 79158 - DNA, 2163 bp, Arabidopsis thaliana
  misc_feature (1)..(2163): Ceres Seq. ID no. 12649474
  misc_feature: MA Experiment ID: 20000180 Result: Up-regulated in Transcription
  misc_feature: MA Experiment 20000180 PARAMETER Experiment Name: At_Germinating_Seeds_P Parameter: Age (hr) Value: 24 vs. 0
  misc_feature: MA Experiment 20000180 PARAMETER Experiment Name: At_Germinating_Seeds_P Parameter: Tissue Value: Germinating Seeds
  misc_feature: MA Experiment ID: 20000185 Result: Up-regulated in Transcription
  misc_feature: MA Experiment 20000185 PARAMETER Experiment Name: At_Roots__P Parameter: Age (day) Value: 7 vs. 21
  misc_feature: MA Experiment 20000185 PARAMETER Experiment Name: At_Roots__P Parameter: Organism Value: A. thaliana
  misc_feature: MA Experiment 20000185 PARAMETER Experiment Name: At_Roots__P Parameter: Tissue Value: Roots vs. Whole Plant
  misc_feature: MA Experiment ID: 20000234 Result: Up-regulated in Transcription
  misc_feature: MA Experiment 20000234 PARAMETER Experiment Name: At_Siliques_P Parameter: Age (day) Value: 21
  misc_feature: MA Experiment 20000234 PARAMETER Experiment Name: At_Siliques_P Parameter: Organism Value: A. thaliana
  misc_feature: MA Experiment 20000234 PARAMETER Experiment Name: At_Siliques_P Parameter: Plant Line Value: WS
  misc_feature: MA Experiment 20000234 PARAMETER Experiment Name: At_Siliques_P Parameter: Tissue Value: Less Than 5mm Siliques vs. Whole Plant
  misc_feature: MA Experiment ID: 20000264 Result: Up-regulated in Transcription
  misc_feature: MA Experiment 20000264 PARAMETER Experiment Name: At_Open_Flower_P Parameter: Age (day) Value: 21
  misc_feature: MA Experiment 20000264 PARAMETER Experiment Name: At_Open_Flower_P Parameter: Plant Line Value: WS
  misc_feature: MA Experiment 20000264 PARAMETER Experiment Name: At_Open_Flower_P Parameter: Tissue Value: Open Flower vs. Whole Plant
  misc_feature: MA Experiment ID: 20000265 Result: Up-regulated in Transcription
  misc_feature: MA Experiment 20000265 PARAMETER Experiment Name: At_Open_Flower_P Parameter: Age (day) Value: 21
  misc_feature: MA Experiment 20000265 PARAMETER Experiment Name: At_Open_Flower_P Parameter: Plant Line Value: WS
  misc_feature: MA Experiment 20000265 PARAMETER Experiment Name: At_Open_Flower_P Parameter: Tissue Value: Closed Flower vs. Whole Plant
  misc_feature: MA Experiment ID: 20000286 Result: Up-regulated in Transcription
  misc_feature: MA Experiment 20000286 PARAMETER Experiment Name: At_Open_Flower_P Parameter: Age (day) Value: 21
  misc_feature: MA Experiment 20000286 PARAMETER Experiment Name: At_Open_Flower_P Parameter: Plant Line Value: WS
  misc_feature: MA Experiment 20000286 PARAMETER Experiment Name: At_Open_Flower_P Parameter: Tissue Value: Half Open vs. Whole Plant
  misc_feature: MA Experiment ID: 20000439 Result: Up-regulated in Transcription
  misc_feature: MA Experiment 20000439 PARAMETER Experiment Name: At_Roots__P Parameter: Age (day) Value: 14 vs. 21
  misc_feature: MA Experiment 20000439 PARAMETER Experiment Name: At_Roots__P Parameter: Organism Value: A. thaliana
  misc_feature: MA Experiment 20000439 PARAMETER Experiment Name: At_Roots__P Parameter: Tissue Value: Roots vs. Whole Plant
  misc_feature: MA Experiment ID: 20000495 Result: Up-regulated in Transcription
  misc_feature: MA Experiment 20000495 PARAMETER Experiment Name: At_Guard_Cells_P Parameter: Harvest Date Value: 8/2/2002
  misc_feature: MA Experiment 20000495 PARAMETER Experiment Name: At_Guard_Cells_P Parameter: Organism Value: A. thaliana
  misc_feature: MA Experiment 20000495 PARAMETER Experiment Name: At_Guard_Cells_P Parameter: Tissue Value: Guard Cells vs. Leaves
atgtctaaagttgtgtatgaaggatggatggtaaggtatggaagaagaaagatcggacgatcgtatattcatatgaggtatttcgtgttggagcctcgtcttttggcttattacaagaagaagcctcaagataatcagcttcctatcaagacgatggttattgatggaaactgtagagttgaggatcgtggcttgaagacacatcatggacatatggtttatgtgttgtctatttataacaagaaagaaaagcaccacagaatcacgatggcagctttcaacatccaggaagctttaatgtggaaggagaaaattgagtgtgtcatagatcagcatcaagactccctagttccaagtggtcagcaatatgtttcttttgaatataaacctggaatggacgctggaaggaccgcttcatcttcagatcatgaaagcccagagttcagtgcgctggaggatgaaaatgactctcagcgtgatttattaaggaggacaactattggaaatggccctccagaatctatacttgactggactaaagagtttgatgctgagttgtcaaaccagagttccagcaaccaagcgttttcgagaaaacactggcgtctccttcagtgccaaaatggtctacggatttttgaagagctacttgaagttgattatcttccaagaagctgcagcagggctatgaaggctgttggtgttgtagaggccacatgtgaagagatattcgagcttgtgatgagcatggatggcactcgatatgagtgggactgcagttttcataatggaagattagtggaagaggtcgatggtcacacagcaatactctatcacagacttctgctcgactggtttccaatggttgtatggcctcgtgacctctgctatgtacgttattggcgacgtaatgacgatggaagttatgtggtattgtttcgttctagggagcatgaaaattgtggtccacaacctggatttgtgcgggctcatcttgagagtggaggatttaacatcgccccactaaagccccggaatggaaggcctaggacacaagtgcaacatctaatacaaatcgatctgaaagggtggggttcaggttatcttccagcatttcaacaacattgtcttcttcaaatgctgaacagtgtttctggtttgcgtgagtggttctcacagacagatgatagaggtcaaccgatcaggatccctgttatggttaatatggcatcttcttccttagcgttgggtaaaggtggaaagcatcaccataagtcttccctttctattgatcaaacaaatggtgccagcagaaactctgtgctaatggatgaagactcggatgacgatgacgagtttcagatacctgattcagaaccagagcctgaaacgagtaagcaggatcaggagactgatgccaagaaaacagaggaacctgctctcaacattgatctgtcatgtttctcgggtaatctgcgacacgatgataacgaaaatgcccgtaactgctggaggatttctgatgggaacaactttaaagtccgtggcaagagtttctgtgacgataaaaggaagattcctgctgggaagcatctaatggatcttgtcgccgtcgattggttcaaagacactaaaagaatggatcatgtggttagacgcaagggctgtgctgcacaagttgctgcagagaaaggtcttttctcaacggtagtaaatgttcaagttcctggatcaacacactatagtatggtattttatttcgtgactaaagaacttgtacctggatcactcttccaacgttttgttgatggtgatgacgaatttcgtaatagcaggctcaagcttatacctttagtcccaaagggttcatggatagtaaggcaaagcgtgggaagcactccgtgtctcctcgggaaagcagtagattgcaactatatccgtggtccaacatacttagaaatagatgtagatatcggctcatccacagtcgcaaatggagttcttggtcttgtcatcggcgtaatcacatctttggttgtcgaaatggctttccttgtacaggcgaatacaccagaagaattgcccgagcggcttatcggggcggtgagggtttctcatgtagagctatcatcggctatagttcccaatttggattcagattag

SEQ ID NO: 79159 - protein, 720 aa, Arabidopsis thaliana
  peptide (1)..(720): Ceres Seq. ID no. 12649475
  misc_feature (181)..(393): Pfam Name: START domain Pfam Description: START domain
  misc_feature (1)..(309): Homolog of NCBI NO: 15234105 NR Description: hypothetical protein; protein id: At4g19040.1
  misc_feature (335)..(525): Homolog of NCBI NO: 15234105 NR Description: hypothetical protein; protein id: At4g19040.1
  misc_feature (649)..(720): Homolog of NCBI NO: 15234105 NR Description: hypothetical protein; protein id: At4g19040.1
  misc_feature (461)..(621): Homolog of NCBI NO: 15234105 NR Description: hypothetical protein; protein id: At4g19040.1
  misc_feature (310)..(717): Homolog of NCBI NO: 37534986 NR Description: unknown protein [Oryza sativa (japonica
  misc_feature (2)..(120): Homolog of NCBI NO: 37534986 NR Description: unknown protein [Oryza sativa (japonica
  misc_feature (210)..(248): Homolog of NCBI NO: 37534986 NR Description: unknown protein [Oryza sativa (japonica
  misc_feature (299)..(574): Homolog of NCBI NO: 34897970 NR Description: hypothetical protein~similar to Arabidopsis
  misc_feature (574)..(718): Homolog of NCBI NO: 34897970 NR Description: hypothetical protein~similar to Arabidopsis
  misc_feature (4)..(145): Homolog of NCBI NO: 34897970 NR Description: hypothetical protein~similar to Arabidopsis
MSKVVYEGWMVRYGRRKIGRSYIHMRYFVLEPRLLAYYKKKPQDNQLPIKTMVIDGNCRVEDRGLKTHHGHMVYVLSIYNKKEKHHRITMAAFNIQEALMWKEKIECVIDQHQDSLVPSGQQYVSFEYKPGMDAGRTASSSDHESPEFSALEDENDSQRDLLRRTTIGNGPPESILDWTKEFDAELSNQSSSNQAFSRKHWRLLQCQNGLRIFEELLEVDYLPRSCSRAMKAVGVVEATCEEIFELVMSMDGTRYEWDCSFHNGRLVEEVDGHTAILYHRLLLDWFPMVVWPRDLCYVRYWRRNDDGSYVVLFRSREHENCGPQPGFVRAHLESGGFNIAPLKPRNGRPRTQVQHLIQIDLKGWGSGYLPAFQQHCLLQMLNSVSGLREWFSQTDDRGQPIRIPVMVNMASSSLALGKGGKHHHKSSLSIDQTNGASRNSVLMDEDSDDDDEFQIPDSEPEPETSKQDQETDAKKTEEPALNIDLSCFSGNLRHDDNENARNCWRISDGNNFKVRGKSFCDDKRKIPAGKHLMDLVAVDWFKDTKRMDHVVRRKGCAAQVAAEKGLFSTVVNVQVPGSTHYSMVFYFVTKELVPGSLFQRFVDGDDEFRNSRLKLIPLVPKGSWIVRQSVGSTPCLLGKAVDCNYIRGPTYLEIDVDIGSSTVANGVLGLVIGVITSLVVEMAFLVQANTPEELPERLIGAVRVSHVELSSAIVPNLDSD

SEQ ID NO: 79160 - protein, 711 aa, Arabidopsis thaliana
  peptide (1)..(711): Ceres Seq. ID no. 12649476
  misc_feature (172)..(384): Pfam Name: START domain Pfam Description: START domain
  misc_feature (1)..(300): Homolog of NCBI NO: 15234105 NR Description: hypothetical protein; protein id: At4g19040.1
  misc_feature (326)..(516): Homolog of NCBI NO: 15234105 NR Description: hypothetical protein; protein id: At4g19040.1
  misc_feature (640)..(711): Homolog of NCBI NO: 15234105 NR Description: hypothetical protein; protein id: At4g19040.1
  misc_feature (452)..(612): Homolog of NCBI NO: 15234105 NR Description: hypothetical protein; protein id: At4g19040.1
  misc_feature (301)..(708): Homolog of NCBI NO: 37534986 NR Description: unknown protein [Oryza sativa (japonica
  misc_feature (1)..(111): Homolog of NCBI NO: 37534986 NR Description: unknown protein [Oryza sativa (japonica
  misc_feature (201)..(239): Homolog of NCBI NO: 37534986 NR Description: unknown protein [Oryza sativa (japonica
  misc_feature (290)..(565): Homolog of NCBI NO: 34897970 NR Description: hypothetical protein~similar to Arabidopsis
  misc_feature (565)..(709): Homolog of NCBI NO: 34897970 NR Description: hypothetical protein~similar to Arabidopsis
  misc_feature (1)..(136): Homolog of NCBI NO: 34897970 NR Description: hypothetical protein~similar to Arabidopsis
MVRYGRRKIGRSYIHMRYFVLEPRLLAYYKKKPQDNQLPIKTMVIDGNCRVEDRGLKTHHGHMVYVLSIYNKKEKHHRITMAAFNIQEALMWKEKIECVIDQHQDSLVPSGQQYVSFEYKPGMDAGRTASSSDHESPEFSALEDENDSQRDLLRRTTIGNGPPESILDWTKEFDAELSNQSSSNQAFSRKHWRLLQCQNGLRIFEELLEVDYLPRSCSRAMKAVGVVEATCEEIFELVMSMDGTRYEWDCSFHNGRLVEEVDGHTAILYHRLLLDWFPMVVWPRDLCYVRYWRRNDDGSYVVLFRSREHENCGPQPGFVRAHLESGGFNIAPLKPRNGRPRTQVQHLIQIDLKGWGSGYLPAFQQHCLLQMLNSVSGLREWFSQTDDRGQPIRIPVMVNMASSSLALGKGGKHHHKSSLSIDQTNGASRNSVLMDEDSDDDDEFQIPDSEPEPETSKQDQETDAKKTEEPALNIDLSCFSGNLRHDDNENARNCWRISDGNNFKVRGKSFCDDKRKIPAGKHLMDLVAVDWFKDTKRMDHVVRRKGCAAQVAAEKGLFSTVVNVQVPGSTHYSMVFYFVTKELVPGSLFQRFVDGDDEFRNSRLKLIPLVPKGSWIVRQSVGSTPCLLGKAVDCNYIRGPTYLEIDVDIGSSTVANGVLGLVIGVITSLVVEMAFLVQANTPEELPERLIGAVRVSHVELSSAIVPNLDSD

SEQ ID NO: 79161 - protein, 696 aa, Arabidopsis thaliana
  peptide (1)..(696): Ceres Seq. ID no. 12649477
  misc_feature (157)..(369): Pfam Name: START domain Pfam Description: START domain
  misc_feature (1)..(285): Homolog of NCBI NO: 15234105 NR Description: hypothetical protein; protein id: At4g19040.1
  misc_feature (311)..(501): Homolog of NCBI NO: 15234105 NR Description: hypothetical protein; protein id: At4g19040.1
  misc_feature (625)..(696): Homolog of NCBI NO: 15234105 NR Description: hypothetical protein; protein id: At4g19040.1
  misc_feature (437)..(597): Homolog of NCBI NO: 15234105 NR Description: hypothetical protein; protein id: At4g19040.1
  misc_feature (286)..(693): Homolog of NCBI NO: 37534986 NR Description: unknown protein [Oryza sativa (japonica
  misc_feature (1)..(96): Homolog of NCBI NO: 37534986 NR Description: unknown protein [Oryza sativa (japonica
  misc_feature (186)..(224): Homolog of NCBI NO: 37534986 NR Description: unknown protein [Oryza sativa (japonica
  misc_feature (275)..(550): Homolog of NCBI NO: 34897970 NR Description: hypothetical protein~similar to Arabidopsis
  misc_feature (550)..(694): Homolog of NCBI NO: 34897970 NR Description: hypothetical protein~similar to Arabidopsis
  misc_feature (1)..(121): Homolog of NCBI NO: 34897970 NR Description: hypothetical protein~similar to Arabidopsis
MRYFVLEPRLLAYYKKKPQDNQLPIKTMVIDGNCRVEDRGLKTHHGHMVYVLSIYNKKEKHHRITMAAFNIQEALMWKEKIECVIDQHQDSLVPSGQQYVSFEYKPGMDAGRTASSSDHESPEFSALEDENDSQRDLLRRTTIGNGPPESILDWTKEFDAELSNQSSSNQAFSRKHWRLLQCQNGLRIFEELLEVDYLPRSCSRAMKAVGVVEATCEEIFELVMSMDGTRYEWDCSFHNGRLVEEVDGHTAILYHRLLLDWFPMVVWPRDLCYVRYWRRNDDGSYVVLFRSREHENCGPQPGFVRAHLESGGFNIAPLKPRNGRPRTQVQHLIQIDLKGWGSGYLPAFQQHCLLQMLNSVSGLREWFSQTDDRGQPIRIPVMVNMASSSLALGKGGKHHHKSSLSIDQTNGASRNSVLMDEDSDDDDEFQIPDSEPEPETSKQDQETDAKKTEEPALNIDLSCFSGNLRHDDNENARNCWRISDGNNFKVRGKSFCDDKRKIPAGKHLMDLVAVDWFKDTKRMDHVVRRKGCAAQVAAEKGLFSTVVNVQVPGSTHYSMVFYFVTKELVPGSLFQRFVDGDDEFRNSRLKLIPLVPKGSWIVRQSVGSTPCLLGKAVDCNYIRGPTYLEIDVDIGSSTVANGVLGLVIGVITSLVVEMAFLVQANTPEELPERLIGAVRVSHVELSSAIVPNLDSD

SEQ ID NO: 79162 - DNA, 2283 bp, Arabidopsis thaliana
  misc_feature (1)..(2283): Ceres Seq. ID no. 12649498
  misc_feature: MA Experiment ID: 20000307 Result: Down-regulated in Transcription
  misc_feature: MA Experiment 20000307 PARAMETER Experiment Name: At_Germinating_Seeds_Sub_P Parameter: Age (hr) Value: 24 vs. 0
  misc_feature: MA Experiment 20000307 PARAMETER Experiment Name: At_Germinating_Seeds_Sub_P Parameter: Organism Value: A. thaliana
  misc_feature: MA Experiment 20000307 PARAMETER Experiment Name: At_Germinating_Seeds_Sub_P Parameter: Plant Line Value: WS
  misc_feature: MA Experiment 20000307 PARAMETER Experiment Name: At_Germinating_Seeds_Sub_P Parameter: Tissue Value: Germinating Seeds
  misc_feature: MA Experiment ID: 20000327 Result: Down-regulated in Transcription
  misc_feature: MA Experiment 20000327 PARAMETER Experiment Name: At_42deg_Heat_Sub_P Parameter: Age (day) Value: 14
  misc_feature: MA Experiment 20000327 PARAMETER Experiment Name: At_42deg_Heat_Sub_P Parameter: Organism Value: A. thaliana
  misc_feature: MA Experiment 20000327 PARAMETER Experiment Name: At_42deg_Heat_Sub_P Parameter: Plant Line Value: WS
  misc_feature: MA Experiment 20000327 PARAMETER Experiment Name: At_42deg_Heat_Sub_P Parameter: Temperature (deg C) Value: 42 vs. 22
  misc_feature: MA Experiment 20000327 PARAMETER Experiment Name: At_42deg_Heat_Sub_P Parameter: Timepoint (hr) Value: 1
  misc_feature: MA Experiment 20000327 PARAMETER Experiment Name: At_42deg_Heat_Sub_P Parameter: Tissue Value: Aerial
  misc_feature: MA Experiment ID: 20000328 Result: Down-regulated in Transcription
  misc_feature: MA Experiment 20000328 PARAMETER Experiment Name: At_42deg_Heat_Sub_P Parameter: Age (day) Value: 14
  misc_feature: MA Experiment 20000328 PARAMETER Experiment Name: At_42deg_Heat_Sub_P Parameter: Organism Value: A. thaliana
  misc_feature: MA Experiment 20000328 PARAMETER Experiment Name: At_42deg_Heat_Sub_P Parameter: Plant Line Value: WS
  misc_feature: MA Experiment 20000328 PARAMETER Experiment Name: At_42deg_Heat_Sub_P Parameter: Temperature (deg C) Value: 42 vs. 22
  misc_feature: MA Experiment 20000328 PARAMETER Experiment Name: At_42deg_Heat_Sub_P Parameter: Timepoint (hr) Value: 6
  misc_feature: MA Experiment 20000328 PARAMETER Experiment Name: At_42deg_Heat_Sub_P Parameter: Tissue Value: Aerial
  misc_feature: MA Experiment ID: 20000346 Result: Down-regulated in Transcription
  misc_feature: MA Experiment 20000346 PARAMETER Experiment Name: At_2mM_SA_Sub_P Parameter: Age (day) Value: 14
  misc_feature: MA Experiment 20000346 PARAMETER Experiment Name: At_2mM_SA_Sub_P Parameter: Organism Value: A. thaliana
  misc_feature: MA Experiment 20000346 PARAMETER Experiment Name: At_2mM_SA_Sub_P Parameter: Plant Line Value: WS
  misc_feature: MA Experiment 20000346 PARAMETER Experiment Name: At_2mM_SA_Sub_P Parameter: Timepoint (hr) Value: 1
  misc_feature: MA Experiment 20000346 PARAMETER Experiment Name: At_2mM_SA_Sub_P Parameter: Tissue Value: Aerial
  misc_feature: MA Experiment 20000346 PARAMETER Experiment Name: At_2mM_SA_Sub_P Parameter: Treatment Value: 2mM SA vs. No Treatment
  misc_feature: MA Experiment ID: 20000355 Result: Up-regulated in Transcription
  misc_feature: MA Experiment 20000355 PARAMETER Experiment Name: At_Siliques_Sub_P Parameter: Age (day) Value: 21
  misc_feature: MA Experiment 20000355 PARAMETER Experiment Name: At_Siliques_Sub_P Parameter: Organism Value: A. thaliana
  misc_feature: MA Experiment 20000355 PARAMETER Experiment Name: At_Siliques_Sub_P Parameter: Plant Line Value: WS
  misc_feature: MA Experiment 20000355 PARAMETER Experiment Name: At_Siliques_Sub_P Parameter: Tissue Value: Less Than 5mm Siliques vs. Whole Plant
atgaagaagcttacttctctcttccctctcctctttctcattcccctcttagcctcatgtgctgaagaaaaacaggtgtatattgtctattttggagaacataaaggtgataaagcctttcatgaaattgaagaacatcatcattcttatcttcaatcggttaaagaatccgaagaagacgctagagcatcgctcttgtatagctacaaacatagcatcaatggcttcgcggctgagctaacccctgaccaagcctctaaactagaaaaattagcagaggttgtttcagtattcaagagccatccaagaaaatatgaagcacatacgacacggtcatgggaatttgtaggattggaggaggaagaaaccgacagtgatgttccacgtcgaaaaaatgatgccgatgatcggtttcgtgtgggaagaaattttttgaagaaggcaaagcatggtgatggaatcatcgtcggtgttctcgacagtggtgtgtggccagaatcaaagagtttcaatgacaaaggaatgggaccagttccaaaatcatggaaaggaatctgccaaaccggagttgcctttaactcttctcactgtaaccgagatcccgacggacatgggtcccacacagcttctactgccgttggccgtcgagttctcggtgcatccgcacttggcggtttcgccaagggctcggcatcgggcggtgcaccgttagctcgtctagctatttacaaagcttgttgggccaagcccaatgcggaaaaagttgaaggaaatatctgtctagaagaggacatgcttgccgcgatcgatgacgccatcgctgatggcgttcacgtcatcagcatttccatcggaacgaccgagccttttccatttacacaagatggaatcgcgatgggggcgttgcatgcggttaagaggaatattgtggttgctgctagcgctgggaattcagggccaaagccgggaactttgtcgaatctggcaccgtggattataactgtcggagctagtactcttgatcgggctttcgttggcggtcttgttcttggcaatggctatacaatcaagacggattcgataacggcatttaaaatggacaaatttgcccctcttgtttacgcttctaacgtggttgttcccggcattgcattgaacgagacatcgcaatgtttaccaaattcactaaaaccggagcttgtgagtggtaaagtggtcttgtgtttaagaggagccggttcaagaatcggtaaaggcatggaggtaaaacgagctggaggagccggtatgattctcggaaatatcgcagctaacggcaatgaagttccttcagactctcattttgttccgactgccggggttaccccaaccgtggtcgataaaattctggagtacatcaaaaccgataaaaacccgaaggcttttatcaaaccggggaaaacggtttacaaataccaagcagctccttccatgaccgggttttctagccgcggcccaaacgttgtagaccccaacattctaaagccggatataaccgccccaggactgtacatactggctgcatggagcggagcagattcaccgagcaaaatgtcagtagatcaaagagttgcaggttataacatctactcaggaacttcaatgtcttgtcctcatgtcgctggtgcaattgctcttctcaaagccattcatcccaaatggagtagcgctgctataagatcagctcttatgaccactgcttggatgactaacgacaagaagaaaccgatccaagacactactggtttaccagcaaacccatttgcacttgggtcaggacatttcagaccaacaaaagctgcagatcccggtttagtctatgatgcatcataccgagcttaccttctctatggctgctcggttaacatcaccaatattgacccgacattcaaatgtcctagtaaaattccgcccggttataatcacaattacccgtcaatcgcggtcccgaatctcaagaagacggtgaccgttaaaagaacagttacaaatgttggaactggtaactcaacaagcacatacttattcagcgttaaaccgccatcgggtatttcggttaaggctataccgaatatattgtcctttaaccggattggtcagaagcagcggtttaaaatcgttattaaaccactgaagaaccaggtgatgaatgcgactgaaaagggtcaataccaatttggatggtttagttggacagataaagtccatgttgtgaggagtccaattgctgtttccttagcttga

SEQ ID NO: 79163 - protein, 760 aa, Arabidopsis thaliana
  peptide (1)..(760): Ceres Seq. ID no. 12649499
  misc_feature (262)..(341): Pfam Name: Subtilase family Pfam Description: Subtilase family
  misc_feature (509)..(759): Homolog of NCBI NO: 15242454 NR Description: subtilisin-like protease; protein id: At5g45640.1
  misc_feature (199)..(387): Homolog of NCBI NO: 15242454 NR Description: subtilisin-like protease; protein id: At5g45640.1
  misc_feature (72)..(199): Homolog of NCBI NO: 15242454 NR Description: subtilisin-like protease; protein id: At5g45640.1
  misc_feature (411)..(490): Homolog of NCBI NO: 15242454 NR Description: subtilisin-like protease; protein id: At5g45640.1
  misc_feature (5)..(758): Homolog of NCBI NO: 18425181 NR Description: subtilisin-like serine protease ARA12; protein At5g67360.1, supported by cDNA: gi_13430745, supported by cDNA:
  misc_feature (3)..(759): Homolog of NCBI NO: 22325457 NR Description: subtilisin-like serine protease AIR3; protein id:
  misc_feature (5)..(758): Homolog of NCBI NO: 20147211 NR Description: AT5g67360/K8K14_8 [Arabidopsis thaliana]
  misc_feature (17)..(758): Homolog of NCBI NO: 1076414 NR Description: subtilisin-like proteinase (EC 3.4.21.-),
  misc_feature (16)..(759): Homolog of NCBI NO: 11358862 NR Description: subtilisin-like proteinase AIR3, auxin-induced
  misc_feature (3)..(740): Homolog of NCBI NO: 20198252 NR Description: subtilisin-like serine protease AIR3 [Arabidopsis
MKKLTSLFPLLFLIPLLASCAEEKQVYIVYFGEHKGDKAFHEIEEHHHSYLQSVKESEEDARASLLYSYKHSINGFAAELTPDQASKLEKLAEVVSVFKSHPRKYEAHTTRSWEFVGLEEEETDSDVPRRKNDADDRFRVGRNFLKKAKHGDGIIVGVLDSGVWPESKSFNDKGMGPVPKSWKGICQTGVAFNSSHCNRDPDGHGSHTASTAVGRRVLGASALGGFAKGSASGGAPLARLAIYKACWAKPNAEKVEGNICLEEDMLAAIDDAIADGVHVISISIGTTEPFPFTQDGIAMGALHAVKRNIVVAASAGNSGPKPGTLSNLAPWIITVGASTLDRAFVGGLVLGNGYTIKTDSITAFKMDKFAPLVYASNVVVPGIALNETSQCLPNSLKPELVSGKVVLCLRGAGSRIGKGMEVKRAGGAGMILGNIAANGNEVPSDSHFVPTAGVTPTVVDKILEYIKTDKNPKAFIKPGKTVYKYQAAPSMTGFSSRGPNVVDPNILKPDITAPGLYILAAWSGADSPSKMSVDQRVAGYNIYSGTSMSCPHVAGAIALLKAIHPKWSSAAIRSALMTTAWMTNDKKKPIQDTTGLPANPFALGSGHFRPTKAADPGLVYDASYRAYLLYGCSVNITNIDPTFKCPSKIPPGYNHNYPSIAVPNLKKTVTVKRTVTNVGTGNSTSTYLFSVKPPSGISVKAIPNILSFNRIGQKQRFKIVIKPLKNQVMNATEKGQYQFGWFSWTDKVHVVRSPIAVSLA

SEQ ID NO: 79164 - protein, 586 aa, Arabidopsis thaliana
  peptide (1)..(586): Ceres Seq. ID no. 12649500
  misc_feature (88)..(167): Pfam Name: Subtilase family Pfam Description: Subtilase family
  misc_feature (335)..(585): Homolog of NCBI NO: 15242454 NR Description: subtilisin-like protease; protein id: At5g45640.1
  misc_feature (25)..(213): Homolog of NCBI NO: 15242454 NR Description: subtilisin-like protease; protein id: At5g45640.1
  misc_feature (1)..(25): Homolog of NCBI NO: 15242454 NR Description: subtilisin-like protease; protein id: At5g45640.1
  misc_feature (237)..(316): Homolog of NCBI NO: 15242454 NR Description: subtilisin-like protease; protein id: At5g45640.1
  misc_feature (1)..(584): Homolog of NCBI NO: 18425181 NR Description: subtilisin-like serine protease ARA12; protein At5g67360.1, supported by cDNA: gi_13430745, supported by cDNA:
  misc_feature (1)..(585): Homolog of NCBI NO: 22325457 NR Description: subtilisin-like serine protease AIR3; protein id:
  misc_feature (1)..(584): Homolog of NCBI NO: 20147211 NR Description: AT5g67360/K8K14_8 [Arabidopsis thaliana]
  misc_feature (1)..(584): Homolog of NCBI NO: 1076414 NR Description: subtilisin-like proteinase (EC 3.4.21.-),
  misc_feature (1)..(585): Homolog of NCBI NO: 11358862 NR Description: subtilisin-like proteinase AIR3, auxin-induced
  misc_feature (1)..(566): Homolog of NCBI NO: 20198252 NR Description: subtilisin-like serine protease AIR3 [Arabidopsis
MGPVPKSWKGICQTGVAFNSSHCNRDPDGHGSHTASTAVGRRVLGASALGGFAKGSASGGAPLARLAIYKACWAKPNAEKVEGNICLEEDMLAAIDDAIADGVHVISISIGTTEPFPFTQDGIAMGALHAVKRNIVVAASAGNSGPKPGTLSNLAPWIITVGASTLDRAFVGGLVLGNGYTIKTDSITAFKMDKFAPLVYASNVVVPGIALNETSQCLPNSLKPELVSGKVVLCLRGAGSRIGKGMEVKRAGGAGMILGNIAANGNEVPSDSHFVPTAGVTPTVVDKILEYIKTDKNPKAFIKPGKTVYKYQAAPSMTGFSSRGPNVVDPNILKPDITAPGLYILAAWSGADSPSKMSVDQRVAGYNIYSGTSMSCPHVAGAIALLKAIHPKWSSAAIRSALMTTAWMTNDKKKPIQDTTGLPANPFALGSGHFRPTKAADPGLVYDASYRAYLLYGCSVNITNIDPTFKCPSKIPPGYNHNYPSIAVPNLKKTVTVKRTVTNVGTGNSTSTYLFSVKPPSGISVKAIPNILSFNRIGQKQRFKIVIKPLKNQVMNATEKGQYQFGWFSWTDKVHVVRSPIAVSLA

SEQ ID NO: 79165 - protein, 496 aa, Arabidopsis thaliana; identical to SEQ ID NO: 48930
  peptide (1)..(496): Ceres Seq. ID no. 12649501
  misc_feature (1)..(77): Pfam Name: Subtilase family Pfam Description: Subtilase family
  misc_feature (245)..(495): Homolog of NCBI NO: 15242454 NR Description: subtilisin-like protease; protein id: At5g45640.1
  misc_feature (1)..(123): Homolog of NCBI NO: 15242454 NR Description: subtilisin-like protease; protein id: At5g45640.1
  misc_feature (147)..(226): Homolog of NCBI NO: 15242454 NR Description: subtilisin-like protease; protein id: At5g45640.1
  misc_feature (1)..(494): Homolog of NCBI NO: 18425181 NR Description: subtilisin-like serine protease ARA12; protein At5g67360.1, supported by cDNA: gi_13430745, supported by cDNA:
  misc_feature (1)..(495): Homolog of NCBI NO: 22325457 NR Description: subtilisin-like serine protease AIR3; protein id:
  misc_feature (1)..(494): Homolog of NCBI NO: 20147211 NR Description: AT5g67360/K8K14_8 [Arabidopsis thaliana]
  misc_feature (1)..(494): Homolog of NCBI NO: 1076414 NR Description: subtilisin-like proteinase (EC 3.4.21.-),
  misc_feature (1)..(495): Homolog of NCBI NO: 11358862 NR Description: subtilisin-like proteinase AIR3, auxin-induced
  misc_feature (1)..(476): Homolog of NCBI NO: 20198252 NR Description: subtilisin-like serine protease AIR3 [Arabidopsis
  misc_feature (1)..(494): Homolog of NCBI NO: 18423316 NR Description: subtilisin-like serine protease; protein id:

SEQ ID NO: 79166 - DNA, 1731 bp, Arabidopsis thaliana
  misc_feature (1)..(1731): Ceres Seq. ID no. 12649526
  misc_feature: MA Experiment ID: 20000495 Result: Up-regulated in Transcription
  misc_feature: MA Experiment 20000495 PARAMETER Experiment Name: At_Guard_Cells_P Parameter: Harvest Date Value: 8/2/2002
  misc_feature: MA Experiment 20000495 PARAMETER Experiment Name: At_Guard_Cells_P Parameter: Organism Value: A. thaliana
  misc_feature: MA Experiment 20000495 PARAMETER Experiment Name: At_Guard_Cells_P Parameter: Tissue Value: Guard Cells vs. Leaves
  misc_feature: MA Experiment ID: 20001247 Result: Down-regulated in Transcription
  misc_feature: MA Experiment 20001247 PARAMETER Experiment Name: At_Far-red-induction_P Parameter: Age (day) Value: 7
  misc_feature: MA Experiment 20001247 PARAMETER Experiment Name: At_Far-red-induction_P Parameter: Light Value: Far-red vs. White
  misc_feature: MA Experiment 20001247 PARAMETER Experiment Name: At_Far-red-induction_P Parameter: Organism Value: A. thaliana
  misc_feature: MA Experiment 20001247 PARAMETER Experiment Name: At_Far-red-induction_P Parameter: Plant Line Value: Columbia
  misc_feature: MA Experiment 20001247 PARAMETER Experiment Name: At_Far-red-induction_P Parameter: Timepoint (hr) Value: 1
  misc_feature: MA Experiment 20001247 PARAMETER Experiment Name: At_Far-red-induction_P Parameter: Tissue Value: Whole Plant
atggagatttctttgatgaagtttctgtttttaggaatctgggtttattattactctgttcttgactctgtttctgccatggatagtcttttatctcccaagggtgttaactatgaagtggctgcgttaatgtcagtgaagaacaagatgaaagatgagaaagaggttttgtctggttgggatattaactctgttgatccttgtacttggaacatggttggttgttcttctgaaggttttgtggtttctctgttacttcagaataatcagttaactggtccgattccttctgagttaggccaactctctgagcttgaaacgcttgatttatcggggaatcggtttagtggtgaaatcccagcttctttagggttcttaactcacttaaactacttgcggcttagcaggaatcttttatctgggcaagtccctcacctcgtcgctggcctctcaggtctttctttcttggatctatctttcaacaatctaagcggaccaactccgaatatatcagcaaaagattacagcttcccaagagctttgctcagatgctacacctcgacgggtttgtctgaaaaggacaatagcaaacatcacagcttagtgctctcttttgcatttggcattgttgttgcctttatcatctccctaatgtttctcttcttctgggtgctttggcatcgatcacgtctctcaagatcacacgtgcagcaagactacgaatttgaaatcggccatctgaaaaggttcagttttcgcgaaatacaaaccgcaacaagcaattttagtccaaagaacattttgggacaaggagggtttgggatggtttataaagggtatctcccaaatggaactgtggtggcagttaaaagattgaaagatccgatttatacaggagaagttcagtttcaaaccgaagtagagatgattggcttagctgttcaccgtaaccttttacgcctctttggattctgtatgaccccggaagagagaatgcttgtgtatccgtacatgccaaatggaagcgtagctgatcgtctgagagacaattatggagaaaagccgtctctagattggaatcggaggataagcattgcactcggcgcagctcgaggacttgtttacttgcacgagcaatgcaatccaaagattattcacagagacgtcaaagctgcaaatattctacttgatgagagctttgaagcaatagttggcgattttggtctagcaaagcttttagaccagagagattcacatgtcactaccgcagtccgaggaaccattggacacatcgctcccgagtacctttccactggacagtcctcagagaaaaccgatgttttcggattcggagtactaatccttgaactcataacaggtcataagatgattgatcaaggcaatggtcaagttcgaaaaggaatgatattgagctgggtaaggacattgaaagcagagaagagatttgcagagatggtggacagagatttgaagggagagtttgatgatttggtgttggaggaagtagtggaattggctttgctttgtacacagccacatccgaatctaagaccgaggatgtctcaagtgttgaaggtactagaaggtttagtggaacagtgtgaaggagggtatgaagctagagctccaagtgtctctaggaactacagtaatggtcatgaagagcagtcctttattattgaagccattgagctctctggaccacgatga

SEQ ID NO: 79167 - protein, 576 aa, Arabidopsis thaliana
  peptide (1)..(576): Ceres Seq. ID no. 12649527
  misc_feature (1)..(576): Homolog of NCBI NO: 15242500 NR Description: leucine-rich repeat transmembrane protein kinase, protein id: At5g45780.1 [Arabidopsis thaliana]
  misc_feature (11)..(576): Homolog of NCBI NO: 25404291 NR Description: probable Serine/Threonine protein kinase F8A5.31
  misc_feature (244)..(536): Homolog of NCBI NO: 25407653 NR Description: receptor-like kinase homolog [imported] -
  misc_feature (31)..(184): Homolog of NCBI NO: 25407653 NR Description: receptor-like kinase homolog [imported] -
  misc_feature (83)..(576): Homolog of NCBI NO: 15219817 NR Description: receptor-like kinase, putative; protein id: [Arabidopsis thaliana] >gi|15810511|gb|AAL07143.1| putative kinase [Arabidopsis thaliana] >gi|23297726|gb|AAN12912.1|
  misc_feature (186)..(529): Homolog of NCBI NO: 15528710 NR Description: putative receptor-like kinase [Oryza sativa
  misc_feature (31)..(87): Homolog of NCBI NO: 15528710 NR Description: putative receptor-like kinase [Oryza sativa
  misc_feature (86)..(536): Homolog of NCBI NO: 15224077 NR Description: putative LRR receptor protein kinase; protein id:
  misc_feature (86)..(536): Homolog of NCBI NO: 22329033 NR Description: receptor-like kinase homolog; protein id: supported by cDNA: gi_17979064, supported by cDNA: gi_20465456 thaliana] >gi|17979065|gb|AAL49800.1| putative receptor kinase
  misc_feature (83)..(576): Homolog of NCBI NO: 9279736 NR Description: receptor-like kinase [Arabidopsis thaliana]
MEISLMKFLFLGIWVYYYSVLDSVSAMDSLLSPKGVNYEVAALMSVKNKMKDEKEVLSGWDINSVDPCTWNMVGCSSEGFVVSLLLQNNQLTGPIPSELGQLSELETLDLSGNRFSGEIPASLGFLTHLNYLRLSRNLLSGQVPHLVAGLSGLSFLDLSFNNLSGPTPNISAKDYSFPRALLRCYTSTGLSEKDNSKHHSLVLSFAFGIVVAFIISLMFLFFWVLWHRSRLSRSHVQQDYEFEIGHLKRFSFREIQTATSNFSPKNILGQGGFGMVYKGYLPNGTVVAVKRLKDPIYTGEVQFQTEVEMIGLAVHRNLLRLFGFCMTPEERMLVYPYMPNGSVADRLRDNYGEKPSLDWNRRISIALGAARGLVYLHEQCNPKIIHRDVKAANILLDESFEAIVGDFGLAKLLDQRDSHVTTAVRGTIGHIAPEYLSTGQSSEKTDVFGFGVLILELITGHKMIDQGNGQVRKGMILSWVRTLKAEKRFAEMVDRDLKGEFDDLVLEEVVELALLCTQPHPNLRPRMSQVLKVLEGLVEQCEGGYEARAPSVSRNYSNGHEEQSFIIEAIELSGPR

SEQ ID NO: 79168 - protein, 571 aa, Arabidopsis thaliana
  peptide (1)..(571): Ceres Seq. ID no. 12649528
  misc_feature (1)..(571): Homolog of NCBI NO: 15242500 NR Description: leucine-rich repeat transmembrane protein kinase, protein id: At5g45780.1 [Arabidopsis thaliana]
  misc_feature (6)..(571): Homolog of NCBI NO: 25404291 NR Description: probable Serine/Threonine protein kinase F8A5.31
  misc_feature (239)..(531): Homolog of NCBI NO: 25407653 NR Description: receptor-like kinase homolog [imported] -
  misc_feature (26)..(179): Homolog of NCBI NO: 25407653 NR Description: receptor-like kinase homolog [imported] -
  misc_feature (78)..(571): Homolog of NCBI NO: 15219817 NR Description: receptor-like kinase, putative; protein id: [Arabidopsis thaliana] >gi|15810511|gb|AAL07143.1| putative kinase [Arabidopsis thaliana] >gi|23297726|gb|AAN12912.1|
  misc_feature (181)..(524): Homolog of NCBI NO: 15528710 NR Description: putative receptor-like kinase [Oryza sativa
  misc_feature (26)..(82): Homolog of NCBI NO: 15528710 NR Description: putative receptor-like kinase [Oryza sativa
  misc_feature (81)..(531): Homolog of NCBI NO: 15224077 NR Description: putative LRR receptor protein kinase; protein id:
  misc_feature (81)..(531): Homolog of NCBI NO: 22329033 NR Description: receptor-like kinase homolog; protein id: supported by cDNA: gi_17979064, supported by cDNA: gi_20465456 thaliana] >gi|17979065|gb|AAL49800.1| putative receptor kinase
  misc_feature (78)..(571): Homolog of NCBI NO: 9279736 NR Description: receptor-like kinase [Arabidopsis thaliana]
MKFLFLGIWVYYYSVLDSVSAMDSLLSPKGVNYEVAALMSVKNKMKDEKEVLSGWDINSVDPCTWNMVGCSSEGFVVSLLLQNNQLTGPIPSELGQLSELETLDLSGNRFSGEIPASLGFLTHLNYLRLSRNLLSGQVPHLVAGLSGLSFLDLSFNNLSGPTPNISAKDYSFPRALLRCYTSTGLSEKDNSKHHSLVLSFAFGIVVAFIISLMFLFFWVLWHRSRLSRSHVQQDYEFEIGHLKRFSFREIQTATSNFSPKNILGQGGFGMVYKGYLPNGTVVAVKRLKDPIYTGEVQFQTEVEMIGLAVHRNLLRLFGFCMTPEERMLVYPYMPNGSVADRLRDNYGEKPSLDWNRRISIALGAARGLVYLHEQCNPKIIHRDVKAANILLDESFEAIVGDFGLAKLLDQRDSHVTTAVRGTIGHIAPEYLSTGQSSEKTDVFGFGVLILELITGHKMIDQGNGQVRKGMILSWVRTLKAEKRFAEMVDRDLKGEFDDLVLEEVVELALLCTQPHPNLRPRMSQVLKVLEGLVEQCEGGYEARAPSVSRNYSNGHEEQSFIIEAIELSGPR

SEQ ID NO: 79169 - protein, 550 aa, Arabidopsis thaliana
  peptide (1)..(550): Ceres Seq. ID no. 12649529
  misc_feature (1)..(550): Homolog of NCBI NO: 15242500 NR Description: leucine-rich repeat transmembrane protein kinase, protein id: At5g45780.1 [Arabidopsis thaliana]
  misc_feature (1)..(550): Homolog of NCBI NO: 25404291 NR Description: probable Serine/Threonine protein kinase F8A5.31
  misc_feature (218)..(510): Homolog of NCBI NO: 25407653 NR Description: receptor-like kinase homolog [imported] -
  misc_feature (5)..(158): Homolog of NCBI NO: 25407653 NR Description: receptor-like kinase homolog [imported] -
  misc_feature (57)..(550): Homolog of NCBI NO: 15219817 NR Description: receptor-like kinase, putative; protein id: [Arabidopsis thaliana] >gi|15810511|gb|AAL07143.1| putative kinase [Arabidopsis thaliana] >gi|23297726|gb|AAN12912.1|
  misc_feature (160)..(503): Homolog of NCBI NO: 15528710 NR Description: putative receptor-like kinase [Oryza sativa
  misc_feature (5)..(61): Homolog of NCBI NO: 15528710 NR Description: putative receptor-like kinase [Oryza sativa
  misc_feature (60)..(510): Homolog of NCBI NO: 15224077 NR Description: putative LRR receptor protein kinase; protein id:
  misc_feature (60)..(510): Homolog of NCBI NO: 22329033 NR Description: receptor-like kinase homolog; protein id: supported by cDNA: gi_17979064, supported by cDNA: gi_20465456 thaliana] >gi|17979065|gb|AAL49800.1| putative receptor kinase
  misc_feature (57)..(550): Homolog of NCBI NO: 9279736 NR Description: receptor-like kinase [Arabidopsis thaliana]
MDSLLSPKGVNYEVAALMSVKNKMKDEKEVLSGWDINSVDPCTWNMVGCSSEGFVVSLLLQNNQLTGPIPSELGQLSELETLDLSGNRFSGEIPASLGFLTHLNYLRLSRNLLSGQVPHLVAGLSGLSFLDLSFNNLSGPTPNISAKDYSFPRALLRCYTSTGLSEKDNSKHHSLVLSFAFGIVVAFIISLMFLFFWVLWHRSRLSRSHVQQDYEFEIGHLKRFSFREIQTATSNFSPKNILGQGGFGMVYKGYLPNGTVVAVKRLKDPIYTGEVQFQTEVEMIGLAVHRNLLRLFGFCMTPEERMLVYPYMPNGSVADRLRDNYGEKPSLDWNRRISIALGAARGLVYLHEQCNPKIIHRDVKAANILLDESFEAIVGDFGLAKLLDQRDSHVTTAVRGTIGHIAPEYLSTGQSSEKTDVFGFGVLILELITGHKMIDQGNGQVRKGMILSWVRTLKAEKRFAEMVDRDLKGEFDDLVLEEVVELALLCTQPHPNLRPRMSQVLKVLEGLVEQCEGGYEARAPSVSRNYSNGHEEQSFIIEAIELSGPR

SEQ ID NO: 79170 - DNA, 2130 bp, Arabidopsis thaliana
  misc_feature (1)..(2130): Ceres Seq. ID no. 12649545
  misc_feature: MA Experiment ID: 20000185 Result: Up-regulated in Transcription
  misc_feature: MA Experiment 20000185 PARAMETER Experiment Name: At_Roots__P Parameter: Age (day) Value: 7 vs. 21
  misc_feature: MA Experiment 20000185 PARAMETER Experiment Name: At_Roots__P Parameter: Organism Value: A. thaliana
  misc_feature: MA Experiment 20000185 PARAMETER Experiment Name: At_Roots__P Parameter: Tissue Value: Roots vs. Whole Plant
  misc_feature: MA Experiment ID: 20000264 Result: Up-regulated in Transcription
  misc_feature: MA Experiment 20000264 PARAMETER Experiment Name: At_Open_Flower_P Parameter: Age (day) Value: 21
  misc_feature: MA Experiment 20000264 PARAMETER Experiment Name: At_Open_Flower_P Parameter: Plant Line Value: WS
  misc_feature: MA Experiment 20000264 PARAMETER Experiment Name: At_Open_Flower_P Parameter: Tissue Value: Open Flower vs. Whole Plant
  misc_feature: MA Experiment ID: 20000286 Result: Up-regulated in Transcription
  misc_feature: MA Experiment 20000286 PARAMETER Experiment Name: At_Open_Flower_P Parameter: Age (day) Value: 21
  misc_feature: MA Experiment 20000286 PARAMETER Experiment Name: At_Open_Flower_P Parameter: Plant Line Value: WS
  misc_feature: MA Experiment 20000286 PARAMETER Experiment Name: At_Open_Flower_P Parameter: Tissue Value: Half Open vs. Whole Plant
  misc_feature: MA Experiment ID: 20000439 Result: Up-regulated in Transcription
  misc_feature: MA Experiment 20000439 PARAMETER Experiment Name: At_Roots__P Parameter: Age (day) Value: 14 vs. 21
  misc_feature: MA Experiment 20000439 PARAMETER Experiment Name: At_Roots__P Parameter: Organism Value: A. thaliana
  misc_feature: MA Experiment 20000439 PARAMETER Experiment Name: At_Roots__P Parameter: Tissue Value: Roots vs. Whole Plant
  misc_feature: MA Experiment ID: 20000794 Result: Up-regulated in Transcription
  misc_feature: MA Experiment 20000794 PARAMETER Experiment Name: At_Petals_P Parameter: Age (day) Value: 23-25 days
  misc_feature: MA Experiment 20000794 PARAMETER Experiment Name: At_Petals_P Parameter: Plant Line Value: WS
  misc_feature: MA Experiment 20000794 PARAMETER Experiment Name: At_Petals_P Parameter: Tissue Value: Petals vs. Whole plant
  misc_feature: MA Experiment ID: 20001556 Result: Down-regulated in Transcription
  misc_feature: MA Experiment 20001556 PARAMETER Experiment Name: At_Drought_Soil_Dry_P Parameter: Age (day) Value: 26
  misc_feature: MA Experiment 20001556 PARAMETER Experiment Name: At_Drought_Soil_Dry_P Parameter: Organism Value: A. thaliana
  misc_feature: MA Experiment 20001556 PARAMETER Experiment Name: At_Drought_Soil_Dry_P Parameter: Plant Line Value: WS
  misc_feature: MA Experiment 20001556 PARAMETER Experiment Name: At_Drought_Soil_Dry_P Parameter: Post Timepoint (hr) Value: None
  misc_feature: MA Experiment 20001556 PARAMETER Experiment Name: At_Drought_Soil_Dry_P Parameter: Post-Treatment Value: None
  misc_feature: MA Experiment 20001556 PARAMETER Experiment Name: At_Drought_Soil_Dry_P Parameter: Timepoint (day) Value: 12
  misc_feature: MA Experiment 20001556 PARAMETER Experiment Name: At_Drought_Soil_Dry_P Parameter: Treatment Value: Drought vs. No Drought
  misc_feature: MA Experiment ID: 20001558 Result: Down-regulated in Transcription
  misc_feature: MA Experiment 20001558 PARAMETER Experiment Name: At_Drought_Soil_Dry_P Parameter: Age (day) Value: 27
  misc_feature: MA Experiment 20001558 PARAMETER Experiment Name: At_Drought_Soil_Dry_P Parameter: Organism Value: A. thaliana
  misc_feature: MA Experiment 20001558 PARAMETER Experiment Name: At_Drought_Soil_Dry_P Parameter: Plant Line Value: WS
  misc_feature: MA Experiment 20001558 PARAMETER Experiment Name: At_Drought_Soil_Dry_P Parameter: Post Timepoint (hr) Value: 6
  misc_feature: MA Experiment 20001558 PARAMETER Experiment Name: At_Drought_Soil_Dry_P Parameter: Post-Treatment Value: Re-Water vs. No Drought
  misc_feature: MA Experiment 20001558 PARAMETER Experiment Name: At_Drought_Soil_Dry_P Parameter: Timepoint (day) Value: 13
  misc_feature: MA Experiment 20001558 PARAMETER Experiment Name: At_Drought_Soil_Dry_P Parameter: Treatment Value: Drought vs. No Drought
  misc_feature: MA Experiment ID: 20001560 Result: Down-regulated in Transcription
  misc_feature: MA Experiment 20001560 PARAMETER Experiment Name: At_Drought_Soil_Dry_P Parameter: Age (day) Value: 28
  misc_feature: MA Experiment 20001560 PARAMETER Experiment Name: At_Drought_Soil_Dry_P Parameter: Organism Value: A. thaliana
  misc_feature: MA Experiment 20001560 PARAMETER Experiment Name: At_Drought_Soil_Dry_P Parameter: Plant Line Value: WS
  misc_feature: MA Experiment 20001560 PARAMETER Experiment Name: At_Drought_Soil_Dry_P Parameter: Post Timepoint (hr) Value: None
  misc_feature: MA Experiment 20001560 PARAMETER Experiment Name: At_Drought_Soil_Dry_P Parameter: Post-Treatment Value: None
  misc_feature: MA Experiment 20001560 PARAMETER Experiment Name: At_Drought_Soil_Dry_P Parameter: Timepoint (day) Value: 14
  misc_feature: MA Experiment 20001560 PARAMETER Experiment Name: At_Drought_Soil_Dry_P Parameter: Treatment Value: Drought vs. No Drought
atgggttgtcgatggaatccaattgggttccaattctcttgcttcatgttcttgatcattactcttcaatctcgttcttcgttgtccctcgaatccgaaggatttgtattgttgaaattccgggcaagagttgattctgatcctcatggaactcttgcaaattggaatgtttctgatcatgatcatttctgttcttggtttggtgttacgtgtgtcgacaataaagtgcagatgctgaatcttagtggttgttctttgggaggaactttagctccggagcttagtcaattgagtgaattaagatctctaatactatccaagaacaaactctctggtgacattccaaacgaatttgcgagtttcgcgaaattagagttcttggatttgcgagataataacttaaacggagtagttccacccgagctaaataaagtgttgacaccagaaaacttgttgctttctggtaacaaatttgcgggttttatgaccgtaaagttcctgagacttcaatcgctgtataaagtccagatgaacaagaatcgagagctatcttcggtttccgctgatgtcctcgactgtgtcaatagaaaacttggatactgtgtttcaaggagaagtttaataacaagaaacaaggcaaaggcattcgtattgcggattagagcaacttcaagacattacatgaaagcattttcttttatctctcaatacttttggtctgatttggtgcgaagagaatctcatgggaagaattatgtagtgaattatcacccaagtgagaacgaaactagtatcttcaaaagacgtgagttactcgaggaaacaagcaatttagcggctatgcctgcgcctgatacgcccagtccttctcctgagattataactatagtgtttcctcgaagcagcgggtcgtttccagcattaactaatgcaaagaagagaatacctccattgatccctccttcttctcctcctcctctacctaccaacaacaccatcgctagtgatccaccgaggaaattcgaagaaaaatcgaaagggtttaaggacgtttggttgtatgttgtgatcggtgttgctgctttcgtagcgatgctgataatagtagcggttatattcttcttccggaaaagagctgtgaagagtataggtccatggaagactggtttgagtggacaattgcagaaagcttttgttactggtgtacctaagctaaaccggtctgaactagaaacagcctgtgaagatttcagtaatatcattgaagcatttgatggttacactgtctataaaggaactttgtccagtggcgttgagattgcggttgcttcaaccgccattttggaaactagggaatggacaagagctatggaaatgacttaccgcagaaggattgatacaatgtcaagagtcaaccataagaactttattaatctgattggttattgcgaagaagatgaaccgtttaataggatgatggttttcgaatatgctccaaatggaactcttttcgaacatttgcatgataaggaaatggagcatcttgattggaacgcgaggacgaggataataatgggaactgcttattgtctgcaatatatgcacgagctcaatcctccaatctcacacactaaacttgtctcatcagcaatatacttaaccgatgattacgcagcaaaggtcggagaggttcctttcagcggacaaaccgggagtaaaccgagaaaaccgatgagtggtgatttagaccaatctttattgccattacctcctgaaccagagactaatgtctatagctttggagtattaatgcttgagataatctctggaaagctctcagattcagaagaagaaggatcaattctaaaatgggcgtcaaagtatctggagaatgataatttgagagatatgattgatcctacactaacaacgtataaagaagaagaacttgaagctatatgtgacgtggcacgacattgtctgaaacttgacgaaagccaaagaccaaaaatgaaatatgtggttcaacaattgaaagaagtaataaacatatctcaagaacaagcaacaccaagactctctcctctttggtgggcagagcttgagatcttatcctctgaagctacataa

SEQ ID NO: 79171 - protein, 709 aa, Arabidopsis thaliana
  peptide (1)..(709): Ceres Seq. ID no. 12649546
  misc_feature (123)..(709): Homolog of NCBI NO: 15242513 NR Description: leucine-rich repeat transmembrane protein kinase,
  misc_feature (98)..(709): Homolog of NCBI NO: 9758931 NR Description: receptor protein kinase-like protein [Arabidopsis
  misc_feature (99)..(709): Homolog of NCBI NO: 7486276 NR Description: hypothetical protein F28A21.50 - Arabidopsis (fragment) >gi|4539383|emb|CAB37449.1| putative protein
  misc_feature (99)..(709): Homolog of NCBI NO: 7268658 NR Description: putative protein (fragment) [Arabidopsis thaliana]
  misc_feature (99)..(709): Homolog of NCBI NO: 30684487 NR Description: leucine-rich repeat transmembrane protein kinase,
  misc_feature (239)..(709): Homolog of NCBI NO: 34903782 NR Description: unnamed protein product [Oryza sativa (japonica group)] >gi|7340883|dbj|BAA92973.1| unnamed protein product
  misc_feature (1)..(158): Homolog of NCBI NO: 34903782 NR Description: unnamed protein product [Oryza sativa (japonica group)] >gi|7340883|dbj|BAA92973.1| unnamed protein product
  misc_feature (1)..(246): Homolog of NCBI NO: 9758931 NR Description: receptor protein kinase-like protein [Arabidopsis
  misc_feature (103)..(199): Homolog of NCBI NO: 34903782 NR Description: unnamed protein product [Oryza sativa (japonica group)] >gi|7340883|dbj|BAA92973.1| unnamed protein product
  misc_feature (123)..(180): Homolog of NCBI NO: 34903782 NR Description: unnamed protein product [Oryza sativa (japonica group)] >gi|7340883|dbj|BAA92973.1| unnamed protein product
MGCRWNPIGFQFSCFMFLIITLQSRSSLSLESEGFVLLKFRARVDSDPHGTLANWNVSDHDHFCSWFGVTCVDNKVQMLNLSGCSLGGTLAPELSQLSELRSLILSKNKLSGDIPNEFASFAKLEFLDLRDNNLNGVVPPELNKVLTPENLLLSGNKFAGFMTVKFLRLQSLYKVQMNKNRELSSVSADVLDCVNRKLGYCVSRRSLITRNKAKAFVLRIRATSRHYMKAFSFISQYFWSDLVRRESHGKNYVVNYHPSENETSIFKRRELLEETSNLAAMPAPDTPSPSPEIITIVFPRSSGSFPALTNAKKRIPPLIPPSSPPPLPTNNTIASDPPRKFEEKSKGFKDVWLYVVIGVAAFVAMLIIVAVIFFFRKRAVKSIGPWKTGLSGQLQKAFVTGVPKLNRSELETACEDFSNIIEAFDGYTVYKGTLSSGVEIAVASTAILETREWTRAMEMTYRRRIDTMSRVNHKNFINLIGYCEEDEPFNRMMVFEYAPNGTLFEHLHDKEMEHLDWNARTRIIMGTAYCLQYMHELNPPISHTKLVSSAIYLTDDYAAKVGEVPFSGQTGSKPRKPMSGDLDQSLLPLPPEPETNVYSFGVLMLEIISGKLSDSEEEGSILKWASKYLENDNLRDMIDPTLTTYKEEELEAICDVARHCLKLDESQRPKMKYVVQQLKEVINISQEQATPRLSPLWWAELEILSSEAT

SEQ ID NO: 79172 - protein, 694 aa, Arabidopsis thaliana
  peptide (1)..(694): Ceres Seq. ID no. 12649547
  misc_feature (108)..(694): Homolog of NCBI NO: 15242513 NR Description: leucine-rich repeat transmembrane protein kinase,
  misc_feature (83)..(694): Homolog of NCBI NO: 9758931 NR Description: receptor protein kinase-like protein [Arabidopsis
  misc_feature (84)..(694): Homolog of NCBI NO: 7486276 NR Description: hypothetical protein F28A21.50 - Arabidopsis (fragment) >gi|4539383|emb|CAB37449.1| putative protein
  misc_feature (84)..(694): Homolog of NCBI NO: 7268658 NR Description: putative protein (fragment) [Arabidopsis thaliana]
  misc_feature (84)..(694): Homolog of NCBI NO: 30684487 NR Description: leucine-rich repeat transmembrane protein kinase,
  misc_feature (224)..(694): Homolog of NCBI NO: 34903782 NR Description: unnamed protein product [Oryza sativa (japonica group)] >gi|7340883|dbj|BAA92973.1| unnamed protein product
  misc_feature (1)..(143): Homolog of NCBI NO: 34903782 NR Description: unnamed protein product [Oryza sativa (japonica group)] >gi|7340883|dbj|BAA92973.1| unnamed protein product
  misc_feature (1)..(231): Homolog of NCBI NO: 9758931 NR Description: receptor protein kinase-like protein [Arabidopsis
  misc_feature (88)..(184): Homolog of NCBI NO: 34903782 NR Description: unnamed protein product [Oryza sativa (japonica group)] >gi|7340883|dbj|BAA92973.1| unnamed protein product
  misc_feature (108)..(165): Homolog of NCBI NO: 34903782 NR Description: unnamed protein product [Oryza sativa (japonica group)] >gi|7340883|dbj|BAA92973.1| unnamed protein product
MFLIITLQSRSSLSLESEGFVLLKFRARVDSDPHGTLANWNVSDHDHFCSWFGVTCVDNKVQMLNLSGCSLGGTLAPELSQLSELRSLILSKNKLSGDIPNEFASFAKLEFLDLRDNNLNGVVPPELNKVLTPENLLLSGNKFAGFMTVKFLRLQSLYKVQMNKNRELSSVSADVLDCVNRKLGYCVSRRSLITRNKAKAFVLRIRATSRHYMKAFSFISQYFWSDLVRRESHGKNYVVNYHPSENETSIFKRRELLEETSNLAAMPAPDTPSPSPEIITIVFPRSSGSFPALTNAKKRIPPLIPPSSPPPLPTNNTIASDPPRKFEEKSKGFKDVWLYVVIGVAAFVAMLIIVAVIFFFRKRAVKSIGPWKTGLSGQLQKAFVTGVPKLNRSELETACEDFSNIIEAFDGYTVYKGTLSSGVEIAVASTAILETREWTRAMEMTYRRRIDTMSRVNHKNFINLIGYCEEDEPFNRMMVFEYAPNGTLFEHLHDKEMEHLDWNARTRIIMGTAYCLQYMHELNPPISHTKLVSSAIYLTDDYAAKVGEVPFSGQTGSKPRKPMSGDLDQSLLPLPPEPETNVYSFGVLMLEIISGKLSDSEEEGSILKWASKYLENDNLRDMIDPTLTTYKEEELEAICDVARHCLKLDESQRPKMKYVVQQLKEVINISQEQATPRLSPLWWAELEILSSEAT

SEQ ID NO: 79173 - protein, 632 aa, Arabidopsis thaliana
  peptide (1)..(632): Ceres Seq. ID no. 12649548
  misc_feature (46)..(632): Homolog of NCBI NO: 15242513 NR Description: leucine-rich repeat transmembrane protein kinase,
  misc_feature (21)..(632): Homolog of NCBI NO: 9758931 NR Description: receptor protein kinase-like protein [Arabidopsis
  misc_feature (22)..(632): Homolog of NCBI NO: 7486276 NR Description: hypothetical protein F28A21.50 - Arabidopsis (fragment) >gi|4539383|emb|CAB37449.1| putative protein
  misc_feature (22)..(632): Homolog of NCBI NO: 7268658 NR Description: putative protein (fragment) [Arabidopsis thaliana]
  misc_feature (22)..(632): Homolog of NCBI NO: 30684487 NR Description: leucine-rich repeat transmembrane protein kinase,
  misc_feature (162)..(632): Homolog of NCBI NO: 34903782 NR Description: unnamed protein product [Oryza sativa (japonica group)] >gi|7340883|dbj|BAA92973.1| unnamed protein product
  misc_feature (1)..(81): Homolog of NCBI NO: 34903782 NR Description: unnamed protein product [Oryza sativa (japonica group)] >gi|7340883|dbj|BAA92973.1| unnamed protein product
  misc_feature (1)..(169): Homolog of NCBI NO: 9758931 NR Description: receptor protein kinase-like protein [Arabidopsis
  misc_feature (26)..(122): Homolog of NCBI NO: 34903782 NR Description: unnamed protein product [Oryza sativa (japonica group)] >gi|7340883|dbj|BAA92973.1| unnamed protein product
  misc_feature (46)..(103): Homolog of NCBI NO: 34903782 NR Description: unnamed protein product [Oryza sativa (japonica group)] >gi|7340883|dbj|BAA92973.1| unnamed protein product
MLNLSGCSLGGTLAPELSQLSELRSLILSKNKLSGDIPNEFASFAKLEFLDLRDNNLNGVVPPELNKVLTPENLLLSGNKFAGFMTVKFLRLQSLYKVQMNKNRELSSVSADVLDCVNRKLGYCVSRRSLITRNKAKAFVLRIRATSRHYMKAFSFISQYFWSDLVRRESHGKNYVVNYHPSENETSIFKRRELLEETSNLAAMPAPDTPSPSPEIITIVFPRSSGSFPALTNAKKRIPPLIPPSSPPPLPTNNTIASDPPRKFEEKSKGFKDVWLYVVIGVAAFVAMLIIVAVIFFFRKRAVKSIGPWKTGLSGQLQKAFVTGVPKLNRSELETACEDFSNIIEAFDGYTVYKGTLSSGVEIAVASTAILETREWTRAMEMTYRRRIDTMSRVNHKNFINLIGYCEEDEPFNRMMVFEYAPNGTLFEHLHDKEMEHLDWNARTRIIMGTAYCLQYMHELNPPISHTKLVSSAIYLTDDYAAKVGEVPFSGQTGSKPRKPMSGDLDQSLLPLPPEPETNVYSFGVLMLEIISGKLSDSEEEGSILKWASKYLENDNLRDMIDPTLTTYKEEELEAICDVARHCLKLDESQRPKMKYVVQQLKEVINISQEQATPRLSPLWWAELEILSSEAT

SEQ ID NO: 79174 - DNA, 628 bp, Arabidopsis thaliana
  misc_feature (1)..(628): Ceres Seq. ID no. 12649553
  misc_feature: MA Experiment ID: 108488 Result: Down-regulated in Transcription
  misc_feature: MA Experiment ID: 108489 Result: Up-regulated in Transcription
  misc_feature: MA Experiment ID: 20000264 Result: Up-regulated in Transcription
  misc_feature: MA Experiment 20000264 PARAMETER Experiment Name: At_Open_Flower_P Parameter: Age (day) Value: 21
  misc_feature: MA Experiment 20000264 PARAMETER Experiment Name: At_Open_Flower_P Parameter: Plant Line Value: WS
  misc_feature: MA Experiment 20000264 PARAMETER Experiment Name: At_Open_Flower_P Parameter: Tissue Value: Open Flower vs. Whole Plant
  misc_feature: MA Experiment ID: 20000794 Result: Up-regulated in Transcription
  misc_feature: MA Experiment 20000794 PARAMETER Experiment Name: At_Petals_P Parameter: Age (day) Value: 23-25 days
  misc_feature: MA Experiment 20000794 PARAMETER Experiment Name: At_Petals_P Parameter: Plant Line Value: WS
  misc_feature: MA Experiment 20000794 PARAMETER Experiment Name: At_Petals_P Parameter: Tissue Value: Petals vs. Whole plant
  misc_feature: MA Experiment ID: 20001910 Result: Up-regulated in Transcription
  misc_feature: MA Experiment 20001910 PARAMETER Experiment Name: At_Drought_Reproduction_P Parameter: Age (day) Value: 37
  misc_feature: MA Experiment 20001910 PARAMETER Experiment Name: At_Drought_Reproduction_P Parameter: Organism Value: A. thaliana
  misc_feature: MA Experiment 20001910 PARAMETER Experiment Name: At_Drought_Reproduction_P Parameter: Plant Line Value: WS
  misc_feature: MA Experiment 20001910 PARAMETER Experiment Name: At_Drought_Reproduction_P Parameter: Timepoint (day) Value: 7
  misc_feature: MA Experiment 20001910 PARAMETER Experiment Name: At_Drought_Reproduction_P Parameter: Tissue Value: Flowers
  misc_feature: MA Experiment 20001910 PARAMETER Experiment Name: At_Drought_Reproduction_P Parameter: Treatment Value: Drought vs. No Drought
ttgtcctcttctcaaacatatctcaacttattgtttgaatataaaaagagatatcaaaaagaagagaagaccaaaaacaaaacaaaaatctctaataaaaatggcttccaaagctatcttcttctctttctttgtcgtctccgccgtgtgtttgtcttctctggcaggtttcgccgccgctgatgctgacgacttcgatcgtttccagattcaaggatcagtttactgtgacacttgccgtgtccaattcgttacccgtctcagcaaattcctcgaaggcgcgaaagtgaagttggagtgcaggagcagaacaaacggaaccataacattgaccaaagaagctgttaccgacaaaacaggaagctacaaaatggaagtaaccggtgaccacgaggaagaagtttgcgagcttgttttggtccaatcaccagacagtggttgcagtgatgtcagcacagaggcttacttacgtaacgccgctaagatcagtttaacggcgaatgacggaatcgtctcccacgagacacgtattgttaaccctctcggtttcatggttcagactccattggctgattgtcctgctgctttcaaggagcttggtattgtccctgacgtaacattctaagcg

SEQ ID NO: 79175 - protein, 207 aa, Arabidopsis thaliana; identical to SEQ ID NO: 27084
  peptide (1)..(207): Ceres Seq. ID no. 12649554
  misc_feature (70)..(194): Pfam Name: Pollen proteins Ole e I family Pfam Description: Pollen proteins Ole e I family
  misc_feature (34)..(207): Homolog of NCBI NO: 18422603 NR Description: Ole e I (main olive allergen)-like protein;
  misc_feature (34)..(207): Homolog of NCBI NO: 21593871 NR Description: Ole e I (main olive allergen)-like protein
  misc_feature (3)..(204): Homolog of NCBI NO: 7486300 NR Description: hypothetical protein F28J12.250 - Arabidopsis
  misc_feature (34)..(207): Homolog of NCBI NO: 18415132 NR Description: similar to Ole e I (main olive allergen)-like
  misc_feature (51)..(207): Homolog of NCBI NO: 9758935 NR Description: Ole e I (main olive allergen)-like protein
  misc_feature (38)..(207): Homolog of NCBI NO: 15218844 NR Description: hypothetical protein; protein id: At1g29140.1
  misc_feature (93)..(207): Homolog of NCBI NO: 28393099 NR Description: unknown protein [Arabidopsis thaliana]
  misc_feature (48)..(204): Homolog of NCBI NO: 28380096 NR Description: Olee1-like protein precursor
  misc_feature (43)..(201): Homolog of NCBI NO: 22074346 NR Description: Che a 1 allergen precursor [Chenopodium album]
  misc_feature (45)..(203): Homolog of NCBI NO: 125887 NR Description: Anther specific LAT52 protein precursor

SEQ ID NO: 79176 - protein, 174 aa, Arabidopsis thaliana; identical to SEQ ID NO: 27085
  peptide (1)..(174): Ceres Seq. ID no. 12649555
  misc_feature (37)..(161): Pfam Name: Pollen proteins Ole e I family Pfam Description: Pollen proteins Ole e I family
  misc_feature (1)..(174): Homolog of NCBI NO: 18422603 NR Description: Ole e I (main olive allergen)-like protein;
  misc_feature (1)..(174): Homolog of NCBI NO: 21593871 NR Description: Ole e I (main olive allergen)-like protein
  misc_feature (1)..(171): Homolog of NCBI NO: 7486300 NR Description: hypothetical protein F28J12.250 - Arabidopsis
  misc_feature (1)..(174): Homolog of NCBI NO: 18415132 NR Description: similar to Ole e I (main olive allergen)-like
  misc_feature (18)..(174): Homolog of NCBI NO: 9758935 NR Description: Ole e I (main olive allergen)-like protein
  misc_feature (5)..(174): Homolog of NCBI NO: 15218844 NR Description: hypothetical protein; protein id: At1g29140.1
  misc_feature (60)..(174): Homolog of NCBI NO: 28393099 NR Description: unknown protein [Arabidopsis thaliana]
  misc_feature (15)..(171): Homolog of NCBI NO: 28380096 NR Description: Olee1-like protein precursor
  misc_feature (10)..(168): Homolog of NCBI NO: 22074346 NR Description: Che a 1 allergen precursor [Chenopodium album]
  misc_feature (12)..(170): Homolog of NCBI NO: 125887 NR Description: Anther specific LAT52 protein precursor

SEQ ID NO: 79177 - DNA, 606 bp, Arabidopsis thaliana
  misc_feature (1)..(606): Ceres Seq. ID no. 12649613
  misc_feature: MA Experiment ID: 108434 Result: Down-regulated in Transcription
  misc_feature: MA Experiment 108434 PARAMETER Experiment Name: At_Root_Tips_cDNA_P Parameter: Tissue Value: Root Tips
  misc_feature: MA Experiment ID: 108461 Result: Up-regulated in Transcription
  misc_feature: MA Experiment 108461 PARAMETER Experiment Name: At_Germinating_Seeds_cDNA_P Parameter: Age (day) Value: 1 vs. 0
  misc_feature: MA Experiment 108461 PARAMETER Experiment Name: At_Germinating_Seeds_cDNA_P Parameter: Tissue Value: Germinating Seeds
  misc_feature: MA Experiment ID: 108462 Result: Up-regulated in Transcription
  misc_feature: MA Experiment 108462 PARAMETER Experiment Name: At_Germinating_Seeds_cDNA_P Parameter: Age (day) Value: 2 vs. 0
  misc_feature: MA Experiment 108462 PARAMETER Experiment Name: At_Germinating_Seeds_cDNA_P Parameter: Tissue Value: Germinating Seeds
  misc_feature: MA Experiment ID: 108463 Result: Up-regulated in Transcription
  misc_feature: MA Experiment 108463 PARAMETER Experiment Name: At_Germinating_Seeds_cDNA_P Parameter: Age (day) Value: 3 vs. 0
  misc_feature: MA Experiment 108463 PARAMETER Experiment Name: At_Germinating_Seeds_cDNA_P Parameter: Tissue Value: Germinating Seeds
  misc_feature: MA Experiment ID: 108464 Result: Up-regulated in Transcription
  misc_feature: MA Experiment 108464 PARAMETER Experiment Name: At_Germinating_Seeds_cDNA_P Parameter: Age (day) Value: 4 vs. 0
  misc_feature: MA Experiment 108464 PARAMETER Experiment Name: At_Germinating_Seeds_cDNA_P Parameter: Tissue Value: Germinating Seeds
  misc_feature: MA Experiment ID: 108469 Result: Up-regulated in Transcription
  misc_feature: MA Experiment ID: 108488 Result: Down-regulated in Transcription
  misc_feature: MA Experiment ID: 108501 Result: Down-regulated in Transcription
  misc_feature: MA Experiment 108501 PARAMETER Experiment Name: At_ap2_floral_buds_cDNA_P Parameter: Plant Line Value: ap2 (Ler.)
  misc_feature: MA Experiment 108501 PARAMETER Experiment Name: At_ap2_floral_buds_cDNA_P Parameter: Tissue Value: Closed Flower
  misc_feature: MA Experiment ID: 108572 Result: Down-regulated in Transcription
  misc_feature: MA Experiment 108572 PARAMETER Experiment Name: At_Drought_cDNA_P Parameter: Timepoint (hr) Value: 1
  misc_feature: MA Experiment 108572 PARAMETER Experiment Name: At_Drought_cDNA_P Parameter: Tissue Value: Aerial
  misc_feature: MA Experiment 108572 PARAMETER Experiment Name: At_Drought_cDNA_P Parameter: Treatment Value: Drought vs. No Drought
  misc_feature: MA Experiment ID: 108668 Result: Up-regulated in Transcription
  misc_feature: MA Experiment 108668 PARAMETER Experiment Name: At_2mM_SA_cDNA_P Parameter: Plant Line Value: WS
  misc_feature: MA Experiment 108668 PARAMETER Experiment Name: At_2mM_SA_cDNA_P Parameter: Timepoint (hr) Value: 6
  misc_feature: MA Experiment 108668 PARAMETER Experiment Name: At_2mM_SA_cDNA_P Parameter: Treatment Value: 2mM SA vs. No Treatment
  misc_feature: MA Experiment ID: 20000090 Result: Up-regulated in Transcription
  misc_feature: MA Experiment ID: 20000111 Result: Down-regulated in Transcription
  misc_feature: MA Experiment 20000111 PARAMETER Experiment Name: At_42deg_Heat_cDNA_P Parameter: Temperature (deg C) Value: 42 vs. 22
  misc_feature: MA Experiment 20000111 PARAMETER Experiment Name: At_42deg_Heat_cDNA_P Parameter: Timepoint (hr) Value: 6
  misc_feature: MA Experiment 20000111 PARAMETER Experiment Name: At_42deg_Heat_cDNA_P Parameter: Tissue Value: Aerial
  misc_feature: MA Experiment ID: 20000144 Result: Down-regulated in Transcription
  misc_feature: MA Experiment 20000144 PARAMETER Experiment Name: At_42deg_Heat_cDNA_P Parameter: Temperature (deg C) Value: 42 vs. 22
  misc_feature: MA Experiment 20000144 PARAMETER Experiment Name: At_42deg_Heat_cDNA_P Parameter: Timepoint (hr) Value: 1
  misc_feature: MA Experiment 20000144 PARAMETER Experiment Name: At_42deg_Heat_cDNA_P Parameter: Tissue Value: Aerial
  misc_feature: MA Experiment ID: 20000173 Result: Down-regulated in Transcription
  misc_feature: MA Experiment 20000173 PARAMETER Experiment Name: At_42deg_Heat_P Parameter: Age (day) Value: 14
  misc_feature: MA Experiment 20000173 PARAMETER Experiment Name: At_42deg_Heat_P Parameter: Organism Value: A. thaliana
  misc_feature: MA Experiment 20000173 PARAMETER Experiment Name: At_42deg_Heat_P Parameter: Plant Line Value: WS
  misc_feature: MA Experiment 20000173 PARAMETER Experiment Name: At_42deg_Heat_P Parameter: Temperature (deg C) Value: 42 vs. 22
  misc_feature: MA Experiment 20000173 PARAMETER Experiment Name: At_42deg_Heat_P Parameter: Timepoint (hr) Value: 6
  misc_feature: MA Experiment 20000173 PARAMETER Experiment Name: At_42deg_Heat_P Parameter: Tissue Value: Aerial
  misc_feature: MA Experiment ID: 20000182 Result: Up-regulated in Transcription
  misc_feature: MA Experiment 20000182 PARAMETER Experiment Name: At_2mM_SA_P Parameter: Age (day) Value: 14
  misc_feature: MA Experiment 20000182 PARAMETER Experiment Name: At_2mM_SA_P Parameter: Organism Value: A. thaliana
  misc_feature: MA Experiment 20000182 PARAMETER Experiment Name: At_2mM_SA_P Parameter: Plant Line Value: WS
  misc_feature: MA Experiment 20000182 PARAMETER Experiment Name: At_2mM_SA_P Parameter: Timepoint (hr) Value: 6
  misc_feature: MA Experiment 20000182 PARAMETER Experiment Name: At_2mM_SA_P Parameter: Tissue Value: Aerial
  misc_feature: MA Experiment 20000182 PARAMETER Experiment Name: At_2mM_SA_P Parameter: Treatment Value: 2mM SA vs. No Treatment
  misc_feature: MA Experiment ID: 20000185 Result: Up-regulated in Transcription
  misc_feature: MA Experiment 20000185 PARAMETER Experiment Name: At_Roots__P Parameter: Age (day) Value: 7 vs. 21
  misc_feature: MA Experiment 20000185 PARAMETER Experiment Name: At_Roots__P Parameter: Organism Value: A. thaliana
  misc_feature: MA Experiment 20000185 PARAMETER Experiment Name: At_Roots__P Parameter: Tissue Value: Roots vs. Whole Plant
  misc_feature: MA Experiment ID: 20000439 Result: Up-regulated in Transcription
  misc_feature: MA Experiment 20000439 PARAMETER Experiment Name: At_Roots__P Parameter: Age (day) Value: 14 vs. 21
  misc_feature: MA Experiment 20000439 PARAMETER Experiment Name: At_Roots__P Parameter: Organism Value: A. thaliana
  misc_feature: MA Experiment 20000439 PARAMETER Experiment Name: At_Roots__P Parameter: Tissue Value: Roots vs. Whole Plant
  misc_feature: MA Experiment ID: 20001556 Result: Down-regulated in Transcription
  misc_feature: MA Experiment 20001556 PARAMETER Experiment Name: At_Drought_Soil_Dry_P Parameter: Age (day) Value: 26
  misc_feature: MA Experiment 20001556 PARAMETER Experiment Name: At_Drought_Soil_Dry_P Parameter: Organism Value: A. thaliana
  misc_feature: MA Experiment 20001556 PARAMETER Experiment Name: At_Drought_Soil_Dry_P Parameter: Plant Line Value: WS
  misc_feature: MA Experiment 20001556 PARAMETER Experiment Name: At_Drought_Soil_Dry_P Parameter: Post Timepoint (hr) Value: None
  misc_feature: MA Experiment 20001556 PARAMETER Experiment Name: At_Drought_Soil_Dry_P Parameter: Post-Treatment Value: None
  misc_feature: MA Experiment 20001556 PARAMETER Experiment Name: At_Drought_Soil_Dry_P Parameter: Timepoint (day) Value: 12
  misc_feature: MA Experiment 20001556 PARAMETER Experiment Name: At_Drought_Soil_Dry_P Parameter: Treatment Value: Drought vs. No Drought
accaccacaaatctcatcgaaatgtcgtctcaagaaacgaaatcagatcaaagagaaggagcagagatctgcaatggcgaatcaaactgcaaacagaaagccaaagagattttatcaaccatgaatctacccaaaggtcttcttcctctagacaacatgacagagatcggtcacaacaaatcaaccggttatgtctggatcaagatcaagaacaaggttcaacatcggtttaaagccattggacgaaacgtatcttacgattcggaggttactgcgatccttgagaatcgtcggatgagtcagctcacgggaatcaagagcaaagagattttgatttgggttacgatctctgagatctttgttaatcatcaagatccgactcaaatcacttttgctaatcctacgggactatcacgtactttccccgtcactgcttttgaagaagacgaatgattcatttgtcaacgctcaccatcatgatactttgcttagctaaattatcttttgttttttccttataattccttttgtttagctaagttctattttcaacatttgtatttctgcatcttttccattagagattttataaaaataataatatag

SEQ ID NO: 79178 - protein, 150 aa, Arabidopsis thaliana; identical to SEQ ID NO: 29819
  peptide (1)..(150): Ceres Seq. ID no. 12649614
  misc_feature (8)..(150): Pfam Name: Protein of unknown function, DUF538 Pfam Description: Protein of unknown function, DUF538
  misc_feature (8)..(150): Homolog of NCBI NO: 18422648 NR Description: expressed protein; protein id: At5g46230.1, by cDNA: 15495. [Arabidopsis thaliana] gene_id:MPL12.1~unknown protein [Arabidopsis thaliana]
  misc_feature (8)..(150): Homolog of NCBI NO: 34903866 NR Description: unnamed protein product [Oryza sativa (japonica group)] >gi|8096574|dbj|BAA96147.1| unnamed protein product
  misc_feature (18)..(146): Homolog of NCBI NO: 18391006 NR Description: expressed protein; protein id: At1g09310.1, by cDNA: 11073., supported by cDNA: gi_13194795, supported by gi_15028182, supported by cDNA: gi_19310812 [Arabidopsis
  misc_feature (8)..(146): Homolog of NCBI NO: 34915410 NR Description: hypothetical protein~similar to Arabidopsis
  misc_feature (8)..(146): Homolog of NCBI NO: 33146557 NR Description: unknown protein [Oryza sativa (japonica
  misc_feature (8)..(146): Homolog of NCBI NO: 34915418 NR Description: hypothetical protein~similar to Arabidopsis
  misc_feature (8)..(146): Homolog of NCBI NO: 34915422 NR Description: hypothetical protein~similar to Arabidopsis
  misc_feature (8)..(146): Homolog of NCBI NO: 34915426 NR Description: hypothetical protein~similar to Arabidopsis
  misc_feature (8)..(146): Homolog of NCBI NO: 34915376 NR Description: hypothetical protein~similar to Oryza sativa
  misc_feature (8)..(150): Homolog of NCBI NO: 34915378 NR Description: hypothetical protein~similar to Oryza sativa

SEQ ID NO: 79179 - protein, 143 aa, Arabidopsis thaliana; identical to SEQ ID NO: 29820
  peptide (1)..(143): Ceres Seq. ID no. 12649615
  misc_feature (1)..(143): Pfam Name: Protein of unknown function, DUF538 Pfam Description: Protein of unknown function, DUF538
  misc_feature (1)..(143): Homolog of NCBI NO: 18422648 NR Description: expressed protein; protein id: At5g46230.1, by cDNA: 15495. [Arabidopsis thaliana] gene_id:MPL12.1~unknown protein [Arabidopsis thaliana]
  misc_feature (1)..(143): Homolog of NCBI NO: 34903866 NR Description: unnamed protein product [Oryza sativa (japonica group)] >gi|8096574|dbj|BAA96147.1| unnamed protein product
  misc_feature (11)..(139): Homolog of NCBI NO: 18391006 NR Description: expressed protein; protein id: At1g09310.1, by cDNA: 11073., supported by cDNA: gi_13194795, supported by gi_15028182, supported by cDNA: gi_19310812 [Arabidopsis
  misc_feature (1)..(139): Homolog of NCBI NO: 34915410 NR Description: hypothetical protein~similar to Arabidopsis
  misc_feature (1)..(139): Homolog of NCBI NO: 33146557 NR Description: unknown protein [Oryza sativa (japonica
  misc_feature (1)..(139): Homolog of NCBI NO: 34915418 NR Description: hypothetical protein~similar to Arabidopsis
  misc_feature (1)..(139): Homolog of NCBI NO: 34915422 NR Description: hypothetical protein~similar to Arabidopsis
  misc_feature (1)..(139): Homolog of NCBI NO: 34915426 NR Description: hypothetical protein~similar to Arabidopsis
  misc_feature (1)..(139): Homolog of NCBI NO: 34915376 NR Description: hypothetical protein~similar to Oryza sativa
  misc_feature (1)..(143): Homolog of NCBI NO: 34915378 NR Description: hypothetical protein~similar to Oryza sativa

SEQ ID NO: 79180 - protein, 110 aa, Arabidopsis thaliana; identical to SEQ ID NO: 29821
  peptide (1)..(110): Ceres Seq. ID no. 12649616
  misc_feature (1)..(110): Pfam Name: Protein of unknown function, DUF538 Pfam Description: Protein of unknown function, DUF538
  misc_feature (1)..(110): Homolog of NCBI NO: 18422648 NR Description: expressed protein; protein id: At5g46230.1, by cDNA: 15495. [Arabidopsis thaliana] gene_id:MPL12.1~unknown protein [Arabidopsis thaliana]
  misc_feature (1)..(110): Homolog of NCBI NO: 34903866 NR Description: unnamed protein product [Oryza sativa (japonica group)] >gi|8096574|dbj|BAA96147.1| unnamed protein product
  misc_feature (1)..(106): Homolog of NCBI NO: 18391006 NR Description: expressed protein; protein id: At1g09310.1, by cDNA: 11073., supported by cDNA: gi_13194795, supported by gi_15028182, supported by cDNA: gi_19310812 [Arabidopsis
  misc_feature (1)..(106): Homolog of NCBI NO: 34915410 NR Description: hypothetical protein~similar to Arabidopsis
  misc_feature (1)..(106): Homolog of NCBI NO: 33146557 NR Description: unknown protein [Oryza sativa (japonica
  misc_feature (1)..(106): Homolog of NCBI NO: 34915418 NR Description: hypothetical protein~similar to Arabidopsis
  misc_feature (1)..(106): Homolog of NCBI NO: 34915422 NR Description: hypothetical protein~similar to Arabidopsis
  misc_feature (1)..(106): Homolog of NCBI NO: 34915426 NR Description: hypothetical protein~similar to Arabidopsis
  misc_feature (1)..(106): Homolog of NCBI NO: 34915376 NR Description: hypothetical protein~similar to Oryza sativa
  misc_feature (1)..(110): Homolog of NCBI NO: 34915378 NR Description: hypothetical protein~similar to Oryza sativa

SEQ ID NO: 79181 - DNA, 1485 bp, Arabidopsis thaliana
  misc_feature (1)..(1485): Ceres Seq. ID no. 12649648
  misc_feature: MA Experiment ID: 20000180 Result: Down-regulated in Transcription
  misc_feature: MA Experiment 20000180 PARAMETER Experiment Name: At_Germinating_Seeds_P Parameter: Age (hr) Value: 24 vs. 0
  misc_feature: MA Experiment 20000180 PARAMETER Experiment Name: At_Germinating_Seeds_P Parameter: Tissue Value: Germinating Seeds
  misc_feature: MA Experiment ID: 20000184 Result: Down-regulated in Transcription
  misc_feature: MA Experiment 20000184 PARAMETER Experiment Name: At_Shoots__P Parameter: Age (day) Value: 7
  misc_feature: MA Experiment 20000184 PARAMETER Experiment Name: At_Shoots__P Parameter: Tissue Value: Shoots vs. Whole Plant
  misc_feature: MA Experiment ID: 20000227 Result: Down-regulated in Transcription
  misc_feature: MA Experiment 20000227 PARAMETER Experiment Name: At_Root-Tips-vs-Tops_P Parameter: Tissue Value: Root Tips vs. Root Tops
atggttgcgatacccaatattaagataaagtttggtcctcaaggttctgtcagaacattccaaacgttgtctgatagttcgaagaaaattgagcatgtagtgactgaagatttatctcaatcctcggagaaatcaaagaagcgtggtgggcctaaagagctagatgaagttcaacctaagaagaagcagaggctggattgtgattggtctagtcaatgtttggcattgttacgttttttgatggagcaccgtggtggatggctctttaaggagcctgttgatcctgttaaaatggagattcctgattacttcaatgtcatacaaaagccaatggatttaggcactgtcaaatcgaaacttttgaagaatgtctacagtaatgctgatgagtttgcagcggatgttcggttaacttttgccaatgcgatgcattataatcctctgtggaatgaggttcacacgattgcaaaggagattaatgagatttttgaggttagatgggaatcactcatgaagaaaaaggttttgaggttatcctggaatgaagttagagaaggttataagagacagccagttgaacgtgattgttctagacggagcagcactggaacatcagcttcctctggggtgggattgacgaaaccagctaaagagaactccgaaaagggttctctttcgtccaagccagtgaaagtgcagagcaaaaagaatactcctgctgtgacgcctaaagcattagcaacctgtaaatgtggtaggataatttgcatatgcctcaagtcctgtagctcatttggaagtgacgtttgttcgttaacggattgtcaattaaagaacatttcaggtgcacaagcgagcgagttagatcctcaatctaatgggtctgacacttcaaagaaggagagaaatggtagtctcaagtctcagcttgataaaccttcaaacagtgatctgttgggtaatgagttgaaaacggcttttcctgctctgccgccggtacctcctgagaaagctcttcgtgctgcaatactcaaagctcaatatgcaggaaccatcataaaagctaaacacagaatagtccttggccagaataacaaagctgatctgattagaatacagatagaaaaggaacagatggaaagagcacaacgtgaagagaaagctagaattgaagccgagatgagagctgctaaggttgctgaacgaatgagggcacaagacgagttgaaacagaaacgtgagagtcaacggcttgaaatagcaaagatgaaaaaaggcttcgattttgaacggaacaaccactcgaaattgaagaaaaaattcgttaaagtctgtggctgctttagtctgacaaaagctcggttgttacttgaagagttgggtctggttttgaaaaatgattattgtccggaactggaagtgatcgggtcagaaaaatttgatgcaatgagaatggacgatcttgaggaaggagagatcctttag

SEQ ID NO: 79182 - protein, 494 aa, Arabidopsis thaliana
  peptide (1)..(494): Ceres Seq. ID no. 12649649
  misc_feature (69)..(158): Pfam Name: Bromodomain Pfam Description: Bromodomain
  misc_feature (1)..(494): Homolog of NCBI NO: 8885596 NR Description: contains similarity to kinase~gene_id:F10E10.2
  misc_feature (1)..(494): Homolog of NCBI NO: 30694987 NR Description: DNA-binding protein family [Arabidopsis thaliana]
  misc_feature (258)..(436): Homolog of NCBI NO: 11358472 NR Description: kinase-like protein - Arabidopsis thaliana
  misc_feature (72)..(173): Homolog of NCBI NO: 11358472 NR Description: kinase-like protein - Arabidopsis thaliana
  misc_feature (297)..(432): Homolog of NCBI NO: 6016737 NR Description: hypothetical protein [Arabidopsis thaliana]
  misc_feature (72)..(173): Homolog of NCBI NO: 6016737 NR Description: hypothetical protein [Arabidopsis thaliana]
  misc_feature (282)..(422): Homolog of NCBI NO: 18417335 NR Description: kinase - like protein; protein id: At5g14270.1, by cDNA: gi_16604680 [Arabidopsis thaliana]
  misc_feature (72)..(173): Homolog of NCBI NO: 18417335 NR Description: kinase - like protein; protein id: At5g14270.1, by cDNA: gi_16604680 [Arabidopsis thaliana]
  misc_feature (320)..(432): Homolog of NCBI NO: 18395937 NR Description: expressed protein; protein id: At3g01770.1, by cDNA: gi_16323116, supported by cDNA: gi_20466525 [Arabidopsis >gi|16323117|gb|AAL15293.1| AT3g01770/F28J7_10 [Arabidopsis
  misc_feature (72)..(173): Homolog of NCBI NO: 18395937 NR Description: expressed protein; protein id: At3g01770.1, by cDNA: gi_16323116, supported by cDNA: gi_20466525 [Arabidopsis >gi|16323117|gb|AAL15293.1| AT3g01770/F28J7_10 [Arabidopsis
MVAIPNIKIKFGPQGSVRTFQTLSDSSKKIEHVVTEDLSQSSEKSKKRGGPKELDEVQPKKKQRLDCDWSSQCLALLRFLMEHRGGWLFKEPVDPVKMEIPDYFNVIQKPMDLGTVKSKLLKNVYSNADEFAADVRLTFANAMHYNPLWNEVHTIAKEINEIFEVRWESLMKKKVLRLSWNEVREGYKRQPVERDCSRRSSTGTSASSGVGLTKPAKENSEKGSLSSKPVKVQSKKNTPAVTPKALATCKCGRIICICLKSCSSFGSDVCSLTDCQLKNISGAQASELDPQSNGSDTSKKERNGSLKSQLDKPSNSDLLGNELKTAFPALPPVPPEKALRAAILKAQYAGTIIKAKHRIVLGQNNKADLIRIQIEKEQMERAQREEKARIEAEMRAAKVAERMRAQDELKQKRESQRLEIAKMKKGFDFERNNHSKLKKKFVKVCGCFSLTKARLLLEELGLVLKNDYCPELEVIGSEKFDAMRMDDLEEGEIL

SEQ ID NO: 79183 - protein, 414 aa, Arabidopsis thaliana
  peptide (1)..(414): Ceres Seq. ID no. 12649650
  misc_feature (1)..(78): Pfam Name: Bromodomain Pfam Description: Bromodomain
  misc_feature (1)..(414): Homolog of NCBI NO: 8885596 NR Description: contains similarity to kinase~gene_id:F10E10.2
  misc_feature (1)..(414): Homolog of NCBI NO: 30694987 NR Description: DNA-binding protein family [Arabidopsis thaliana]
  misc_feature (178)..(356): Homolog of NCBI NO: 11358472 NR Description: kinase-like protein - Arabidopsis thaliana
  misc_feature (1)..(93): Homolog of NCBI NO: 11358472 NR Description: kinase-like protein - Arabidopsis thaliana
  misc_feature (217)..(352): Homolog of NCBI NO: 6016737 NR Description: hypothetical protein [Arabidopsis thaliana]
  misc_feature (1)..(93): Homolog of NCBI NO: 6016737 NR Description: hypothetical protein [Arabidopsis thaliana]
  misc_feature (202)..(342): Homolog of NCBI NO: 18417335 NR Description: kinase - like protein; protein id: At5g14270.1, by cDNA: gi_16604680 [Arabidopsis thaliana]
  misc_feature (1)..(93): Homolog of NCBI NO: 18417335 NR Description: kinase - like protein; protein id: At5g14270.1, by cDNA: gi_16604680 [Arabidopsis thaliana]
  misc_feature (240)..(352): Homolog of NCBI NO: 18395937 NR Description: expressed protein; protein id: At3g01770.1, by cDNA: gi_16323116, supported by cDNA: gi_20466525 [Arabidopsis >gi|16323117|gb|AAL15293.1| AT3g01770/F28J7_10 [Arabidopsis
  misc_feature (1)..(93): Homolog of NCBI NO: 18395937 NR Description: expressed protein; protein id: At3g01770.1, by cDNA: gi_16323116, supported by cDNA: gi_20466525 [Arabidopsis >gi|16323117|gb|AAL15293.1| AT3g01770/F28J7_10 [Arabidopsis
MEHRGGWLFKEPVDPVKMEIPDYFNVIQKPMDLGTVKSKLLKNVYSNADEFAADVRLTFANAMHYNPLWNEVHTIAKEINEIFEVRWESLMKKKVLRLSWNEVREGYKRQPVERDCSRRSSTGTSASSGVGLTKPAKENSEKGSLSSKPVKVQSKKNTPAVTPKALATCKCGRIICICLKSCSSFGSDVCSLTDCQLKNISGAQASELDPQSNGSDTSKKERNGSLKSQLDKPSNSDLLGNELKTAFPALPPVPPEKALRAAILKAQYAGTIIKAKHRIVLGQNNKADLIRIQIEKEQMERAQREEKARIEAEMRAAKVAERMRAQDELKQKRESQRLEIAKMKKGFDFERNNHSKLKKKFVKVCGCFSLTKARLLLEELGLVLKNDYCPELEVIGSEKFDAMRMDDLEEGEIL

SEQ ID NO: 79184 - protein, 397 aa, Arabidopsis thaliana
  peptide (1)..(397): Ceres Seq. ID no. 12649651
  misc_feature (1)..(61): Pfam Name: Bromodomain Pfam Description: Bromodomain
  misc_feature (1)..(397): Homolog of NCBI NO: 8885596 NR Description: contains similarity to kinase~gene_id:F10E10.2
  misc_feature (1)..(397): Homolog of NCBI NO: 30694987 NR Description: DNA-binding protein family [Arabidopsis thaliana]
  misc_feature (161)..(339): Homolog of NCBI NO: 11358472 NR Description: kinase-like protein - Arabidopsis thaliana
  misc_feature (1)..(76): Homolog of NCBI NO: 11358472 NR Description: kinase-like protein - Arabidopsis thaliana
  misc_feature (200)..(335): Homolog of NCBI NO: 6016737 NR Description: hypothetical protein [Arabidopsis thaliana]
  misc_feature (1)..(76): Homolog of NCBI NO: 6016737 NR Description: hypothetical protein [Arabidopsis thaliana]
  misc_feature (185)..(325): Homolog of NCBI NO: 18417335 NR Description: kinase - like protein; protein id: At5g14270.1, by cDNA: gi_16604680 [Arabidopsis thaliana]
  misc_feature (1)..(76): Homolog of NCBI NO: 18417335 NR Description: kinase - like protein; protein id: At5g14270.1, by cDNA: gi_16604680 [Arabidopsis thaliana]
  misc_feature (223)..(335): Homolog of NCBI NO: 18395937 NR Description: expressed protein; protein id: At3g01770.1, by cDNA: gi_16323116, supported by cDNA: gi_20466525 [Arabidopsis >gi|16323117|gb|AAL15293.1| AT3g01770/F28J7_10 [Arabidopsis
  misc_feature (1)..(76): Homolog of NCBI NO: 18395937 NR Description: expressed protein; protein id: At3g01770.1, by cDNA: gi_16323116, supported by cDNA: gi_20466525 [Arabidopsis >gi|16323117|gb|AAL15293.1| AT3g01770/F28J7_10 [Arabidopsis
MEIPDYFNVIQKPMDLGTVKSKLLKNVYSNADEFAADVRLTFANAMHYNPLWNEVHTIAKEINEIFEVRWESLMKKKVLRLSWNEVREGYKRQPVERDCSRRSSTGTSASSGVGLTKPAKENSEKGSLSSKPVKVQSKKNTPAVTPKALATCKCGRIICICLKSCSSFGSDVCSLTDCQLKNISGAQASELDPQSNGSDTSKKERNGSLKSQLDKPSNSDLLGNELKTAFPALPPVPPEKALRAAILKAQYAGTIIKAKHRIVLGQNNKADLIRIQIEKEQMERAQREEKARIEAEMRAAKVAERMRAQDELKQKRESQRLEIAKMKKGFDFERNNHSKLKKKFVKVCGCFSLTKARLLLEELGLVLKNDYCPELEVIGSEKFDAMRMDDLEEGEIL

SEQ ID NO: 79185 - DNA, 1008 bp, Arabidopsis thaliana
  misc_feature (1)..(1008): Ceres Seq. ID no. 12649686
  misc_feature: MA Experiment ID: 108461 Result: Up-regulated in Transcription
  misc_feature: MA Experiment 108461 PARAMETER Experiment Name: At_Germinating_Seeds_cDNA_P Parameter: Age (day) Value: 1 vs. 0
  misc_feature: MA Experiment 108461 PARAMETER Experiment Name: At_Germinating_Seeds_cDNA_P Parameter: Tissue Value: Germinating Seeds
  misc_feature: MA Experiment ID: 108462 Result: Up-regulated in Transcription
  misc_feature: MA Experiment 108462 PARAMETER Experiment Name: At_Germinating_Seeds_cDNA_P Parameter: Age (day) Value: 2 vs. 0
  misc_feature: MA Experiment 108462 PARAMETER Experiment Name: At_Germinating_Seeds_cDNA_P Parameter: Tissue Value: Germinating Seeds
  misc_feature: MA Experiment ID: 108464 Result: Up-regulated in Transcription
  misc_feature: MA Experiment 108464 PARAMETER Experiment Name: At_Germinating_Seeds_cDNA_P Parameter: Age (day) Value: 4 vs. 0
  misc_feature: MA Experiment 108464 PARAMETER Experiment Name: At_Germinating_Seeds_cDNA_P Parameter: Tissue Value: Germinating Seeds
  misc_feature: MA Experiment ID: 20000112 Result: Up-regulated in Transcription
  misc_feature: MA Experiment 20000112 PARAMETER Experiment Name: At_42deg_Heat_cDNA_P Parameter: Temperature (deg C) Value: 42 vs. 22
  misc_feature: MA Experiment 20000112 PARAMETER Experiment Name: At_42deg_Heat_cDNA_P Parameter: Timepoint (hr) Value: 2
  misc_feature: MA Experiment 20000112 PARAMETER Experiment Name: At_42deg_Heat_cDNA_P Parameter: Tissue Value: Aerial
  misc_feature: MA Experiment ID: 20000144 Result: Up-regulated in Transcription
  misc_feature: MA Experiment 20000144 PARAMETER Experiment Name: At_42deg_Heat_cDNA_P Parameter: Temperature (deg C) Value: 42 vs. 22
  misc_feature: MA Experiment 20000144 PARAMETER Experiment Name: At_42deg_Heat_cDNA_P Parameter: Timepoint (hr) Value: 1
  misc_feature: MA Experiment 20000144 PARAMETER Experiment Name: At_42deg_Heat_cDNA_P Parameter: Tissue Value: Aerial
  misc_feature: MA Experiment ID: 20000171 Result: Up-regulated in Transcription
  misc_feature: MA Experiment 20000171 PARAMETER Experiment Name: At_42deg_Heat_P Parameter: Age (day) Value: 14
  misc_feature: MA Experiment 20000171 PARAMETER Experiment Name: At_42deg_Heat_P Parameter: Organism Value: A. thaliana
  misc_feature: MA Experiment 20000171 PARAMETER Experiment Name: At_42deg_Heat_P Parameter: Plant Line Value: WS
  misc_feature: MA Experiment 20000171 PARAMETER Experiment Name: At_42deg_Heat_P Parameter: Temperature (deg C) Value: 42 vs. 22
  misc_feature: MA Experiment 20000171 PARAMETER Experiment Name: At_42deg_Heat_P Parameter: Timepoint (hr) Value: 1
  misc_feature: MA Experiment 20000171 PARAMETER Experiment Name: At_42deg_Heat_P Parameter: Tissue Value: Aerial
  misc_feature: MA Experiment ID: 20000495 Result: Up-regulated in Transcription
  misc_feature: MA Experiment 20000495 PARAMETER Experiment Name: At_Guard_Cells_P Parameter: Harvest Date Value: 8/2/2002
  misc_feature: MA Experiment 20000495 PARAMETER Experiment Name: At_Guard_Cells_P Parameter: Organism Value: A. thaliana
  misc_feature: MA Experiment 20000495 PARAMETER Experiment Name: At_Guard_Cells_P Parameter: Tissue Value: Guard Cells vs. Leaves
  misc_feature: MA Experiment ID: 20001911 Result: Down-regulated in Transcription
  misc_feature: MA Experiment 20001911 PARAMETER Experiment Name: At_Drought_Reproduction_P Parameter: Age (day) Value: 40
  misc_feature: MA Experiment 20001911 PARAMETER Experiment Name: At_Drought_Reproduction_P Parameter: Organism Value: A. thaliana
  misc_feature: MA Experiment 20001911 PARAMETER Experiment Name: At_Drought_Reproduction_P Parameter: Plant Line Value: WS
  misc_feature: MA Experiment 20001911 PARAMETER Experiment Name: At_Drought_Reproduction_P Parameter: Timepoint (day) Value: 10
  misc_feature: MA Experiment 20001911 PARAMETER Experiment Name: At_Drought_Reproduction_P Parameter: Tissue Value: Flowers
  misc_feature: MA Experiment 20001911 PARAMETER Experiment Name: At_Drought_Reproduction_P Parameter: Treatment Value: Drought vs. No Drought
atgcctttaagcaacaatgtaattggttgcataaacttcatcaccgtcctcctctccattccggtcatcggcgccggaatctggctagccataggaacagtaaactcatgcgtcaagcttcttcaatggccagtaataatcctcggagtcttaatcctcttagtgggtctcgctggtttcattggagggttttggagaatcacatggcttcttgttgtttacttaatcgccatgcttattctcattgtacttttgggttgccttgtcggatttatttacatggttaccataagaggctctggtcatccagaaccaagtagagcttatcttgagtatagtcttcaagatttctctggttggttacgtagaagagttcagagatcttataaatgggaaaggattcgtacttgtttgagtacaactaccatttgccctgaactaaatcagagatacactttggctcaagatttcttcaatgctcatcttgatcccattcaatctggttgctgcaagcccccaacaaaatgtggattcacatttgttaatcctacttattggataagtcccatagatatgtctgctgatatggattgtctaaattggagcaatgaccaaaacactttgtgttacacttgtgattcttgtaaagccggcttgctcgcaaatattaaggtagattggttaaaagcggatatctttctactcttggcgcttatcggattgattatcgtctacattatcgggtgctgcgcattccgtaatgcggaaactgaggatattttcaggaagtacaagcagggttatacttgatcaagatgagaagtttagtggcaaaactgcgaggaattttaatatttactggattcctgtattttagtttctctacgttttggcccctgtagtatgtttttgtgtgaactacctgaacattcgttgtaactggaagattatgttgtatatctatctttgatttgggtttgtgaaacttaactaattatctatttttgt

SEQ ID NO: 79186 - protein, 269 aa, Arabidopsis thaliana
  peptide (1)..(269): Ceres Seq. ID no. 12649687
  misc_feature (3)..(241): Pfam Name: Tetraspanin family Pfam Description: Tetraspanin family
  misc_feature (1)..(269): Homolog of NCBI NO: 15237490 NR Description: senescence-associated protein 5-like protein; id: At5g46700.1, supported by cDNA: gi_17979385 [Arabidopsis
  misc_feature (1)..(269): Homolog of NCBI NO: 17979386 NR Description: putative senescence-associated protein 5
  misc_feature (1)..(268): Homolog of NCBI NO: 15224802 NR Description: putative senescence-associated protein 5; protein
  misc_feature (4)..(268): Homolog of NCBI NO: 20197174 NR Description: hypothetical protein [Arabidopsis thaliana]
  misc_feature (3)..(268): Homolog of NCBI NO: 29367553 NR Description: senescence-associated protein-like protein [Oryza
  misc_feature (4)..(254): Homolog of NCBI NO: 15234374 NR Description: senescence-associated protein -like; protein id: supported by cDNA: 39831., supported by cDNA: gi_17065395, by cDNA: gi_20148628 [Arabidopsis thaliana]
  misc_feature (1)..(259): Homolog of NCBI NO: 15231187 NR Description: putative protein; protein id: At3g45600.1, by cDNA: 11427., supported by cDNA: gi_14423445 [Arabidopsis
  misc_feature (3)..(265): Homolog of NCBI NO: 3551954 NR Description: senescence-associated protein 5 [Hemerocallis
  misc_feature (5)..(256): Homolog of NCBI NO: 15238641 NR Description: senescence-associated protein - like; protein id:
  misc_feature (4)..(259): Homolog of NCBI NO: 15234743 NR Description: senescence-associated protein homolog; protein
MPLSNNVIGCINFITVLLSIPVIGAGIWLAIGTVNSCVKLLQWPVIILGVLILLVGLAGFIGGFWRITWLLVVYLIAMLILIVLLGCLVGFIYMVTIRGSGHPEPSRAYLEYSLQDFSGWLRRRVQRSYKWERIRTCLSTTTICPELNQRYTLAQDFFNAHLDPIQSGCCKPPTKCGFTFVNPTYWISPIDMSADMDCLNWSNDQNTLCYTCDSCKAGLLANIKVDWLKADIFLLLALIGLIIVYIIGCCAFRNAETEDIFRKYKQGYT

SEQ ID NO: 79187 - protein, 192 aa, Arabidopsis thaliana
  peptide (1)..(192): Ceres Seq. ID no. 12649688
  misc_feature (1)..(164): Pfam Name: Tetraspanin family Pfam Description: Tetraspanin family
  misc_feature (1)..(192): Homolog of NCBI NO: 15237490 NR Description: senescence-associated protein 5-like protein; id: At5g46700.1, supported by cDNA: gi_17979385 [Arabidopsis
  misc_feature (1)..(192): Homolog of NCBI NO: 17979386 NR Description: putative senescence-associated protein 5
  misc_feature (1)..(191): Homolog of NCBI NO: 15224802 NR Description: putative senescence-associated protein 5; protein
  misc_feature (1)..(191): Homolog of NCBI NO: 20197174 NR Description: hypothetical protein [Arabidopsis thaliana]
  misc_feature (1)..(191): Homolog of NCBI NO: 29367553 NR Description: senescence-associated protein-like protein [Oryza
  misc_feature (1)..(177): Homolog of NCBI NO: 15234374 NR Description: senescence-associated protein -like; protein id: supported by cDNA: 39831., supported by cDNA: gi_17065395, by cDNA: gi_20148628 [Arabidopsis thaliana]
  misc_feature (1)..(182): Homolog of NCBI NO: 15231187 NR Description: putative protein; protein id: At3g45600.1, by cDNA: 11427., supported by cDNA: gi_14423445 [Arabidopsis
  misc_feature (1)..(188): Homolog of NCBI NO: 3551954 NR Description: senescence-associated protein 5 [Hemerocallis
  misc_feature (1)..(179): Homolog of NCBI NO: 15238641 NR Description: senescence-associated protein - like; protein id:
  misc_feature (1)..(182): Homolog of NCBI NO: 15234743 NR Description: senescence-associated protein homolog; protein
MLILIVLLGCLVGFIYMVTIRGSGHPEPSRAYLEYSLQDFSGWLRRRVQRSYKWERIRTCLSTTTICPELNQRYTLAQDFFNAHLDPIQSGCCKPPTKCGFTFVNPTYWISPIDMSADMDCLNWSNDQNTLCYTCDSCKAGLLANIKVDWLKADIFLLLALIGLIIVYIIGCCAFRNAETEDIFRKYKQGYT

SEQ ID NO: 79188 - protein, 176 aa, Arabidopsis thaliana
  peptide (1)..(176): Ceres Seq. ID no. 12649689
  misc_feature (1)..(148): Pfam Name: Tetraspanin family Pfam Description: Tetraspanin family
  misc_feature (1)..(176): Homolog of NCBI NO: 15237490 NR Description: senescence-associated protein 5-like protein; id: At5g46700.1, supported by cDNA: gi_17979385 [Arabidopsis
  misc_feature (1)..(176): Homolog of NCBI NO: 17979386 NR Description: putative senescence-associated protein 5
  misc_feature (1)..(175): Homolog of NCBI NO: 15224802 NR Description: putative senescence-associated protein 5; protein
  misc_feature (1)..(175): Homolog of NCBI NO: 20197174 NR Description: hypothetical protein [Arabidopsis thaliana]
  misc_feature (1)..(175): Homolog of NCBI NO: 29367553 NR Description: senescence-associated protein-like protein [Oryza
  misc_feature (1)..(161): Homolog of NCBI NO: 15234374 NR Description: senescence-associated protein -like; protein id: supported by cDNA: 39831., supported by cDNA: gi_17065395, by cDNA: gi_20148628 [Arabidopsis thaliana]
  misc_feature (1)..(166): Homolog of NCBI NO: 15231187 NR Description: putative protein; protein id: At3g45600.1, by cDNA: 11427., supported by cDNA: gi_14423445 [Arabidopsis
  misc_feature (1)..(172): Homolog of NCBI NO: 3551954 NR Description: senescence-associated protein 5 [Hemerocallis
  misc_feature (1)..(163): Homolog of NCBI NO: 15238641 NR Description: senescence-associated protein - like; protein id:
  misc_feature (1)..(166): Homolog of NCBI NO: 15234743 NR Description: senescence-associated protein homolog; protein
MVTIRGSGHPEPSRAYLEYSLQDFSGWLRRRVQRSYKWERIRTCLSTTTICPELNQRYTLAQDFFNAHLDPIQSGCCKPPTKCGFTFVNPTYWISPIDMSADMDCLNWSNDQNTLCYTCDSCKAGLLANIKVDWLKADIFLLLALIGLIIVYIIGCCAFRNAETEDIFRKYKQGYT

SEQ ID NO: 79189 - DNA, 1326 bp, Arabidopsis thaliana
  misc_feature (1)..(1326): Ceres Seq. ID no. 12649730
  misc_feature: MA Experiment ID: 20000440 Result: Up-regulated in Transcription
  misc_feature: MA Experiment 20000440 PARAMETER Experiment Name: At_Closed-Flower__Sub_P Parameter: Tissue Value: Closed Flower vs. Whole Plant
atgaaattcaaattctcgttcccagaagaaactgagcttcgaagaaacgtttacactagtagttccggtgaagaaaacagagtcgtcgttgattctcgtcatgtttctcaacagatcctcactgtccgatctactaactccactttacagagtaaaccggaaaaactaaaccggagaaatttggtggaacaaggattagcgaaagcaagagcatcgattttagaagcttcttcgaatgttaacactacattgttcaaatctgatcttccaaactcagaaatttatcgtaatccatcagctttatatcggagttacttagaaatggagaagaggtttaaggtgtatgtatacgaagaaggcgagccaccgctagttcacgatggaccgtgtaagagtgtttacgcggttgaagggagattcataactgagatggagaaaagaaggactaagtttcgtacttatgatcctaaccaagcttatgtttacttcttgccatttagtgttacttggctggttcgatacttatacgaaggcaattctgatgctaagcctttgaaaacatttgtttccgattatatcagattagtatctactaatcatcctttttggaatcgaactaatggtgctgatcacttcatgcttacttgtcacgattggggacctctgacttcacaagctaatagagatttgttcaacacttcgattcgagttatgtgtaatgctaattcatcagaagggtttaatcctactaaagatgtgactcttcctgagatcaaactctatggtggtgaagttgatcacaaactcaggttatctaaaaccttatccgcttctccgcggccttacctcgggttcttcgcaggcggtgtccacggtccggttagaccgattcttttaaaacactggaaacagcgtgacctggatatgcctgtttatgaataccttcctaaacacttaaactactatgatttcatgagaagttcaaagttctgtttttgtcccagtgggtatgaggtagctagtcctcgagtcatcgaagccatctactctgagtgtatccccgtcattctctcggttaacttcgtgttaccattcactgatgttcttcgttgggagactttctctgtactggtcgacgtttcagagattccgaggttgaaggagattctcatgtcgatctccaatgagaaatatgaatggcttaaaagtaacttgaggtatgtgaggagacatttcgagcttaacgatcctcctcagagatttgatgcatttcacttgactcttcattccatttggttacgtagacttaacttgaagcttacgtaa

SEQ ID NO: 79190 - protein, 441 aa, Arabidopsis thaliana
  peptide (1)..(441): Ceres Seq. ID no. 12649731
  misc_feature (114)..(398): Pfam Name: Exostosin family Pfam Description: Exostosin family
  misc_feature (108)..(441): Homolog of NCBI NO: 15239388 NR Description: Exostosin family; protein id: At5g25310.1
  misc_feature (44)..(440): Homolog of NCBI NO: 34394611 NR Description: putative pectin-glucuronyltransferase [Oryza
  misc_feature (20)..(440): Homolog of NCBI NO: 15237526 NR Description: putative protein; protein id: At5g03800.1
  misc_feature (41)..(440): Homolog of NCBI NO: 9758008 NR Description: contains similarity to limonene
  misc_feature (92)..(440): Homolog of NCBI NO: 38345576 NR Description: OSJNBa0027H06.12 [Oryza sativa (japonica
  misc_feature (58)..(440): Homolog of NCBI NO: 15231488 NR Description: Exostosin family; protein id: At3g07620.1 thaliana] >gi|6466945|gb|AAF13080.1|AC009176_7 hypothetical
  misc_feature (76)..(240): Homolog of NCBI NO: 34898460 NR Description: Similar to Arabidopsis thaliana DNA chromosome 4,
  misc_feature (321)..(440): Homolog of NCBI NO: 34898460 NR Description: Similar to Arabidopsis thaliana DNA chromosome 4,
  misc_feature (219)..(316): Homolog of NCBI NO: 34898460 NR Description: Similar to Arabidopsis thaliana DNA chromosome 4,
  misc_feature (108)..(440): Homolog of NCBI NO: 15238967 NR Description: Exostosin family; protein id: At5g11130.1 thaliana] >gi|8953375|emb|CAB96648.1| putative protein
MKFKFSFPEETELRRNVYTSSSGEENRVVVDSRHVSQQILTVRSTNSTLQSKPEKLNRRNLVEQGLAKARASILEASSNVNTTLFKSDLPNSEIYRNPSALYRSYLEMEKRFKVYVYEEGEPPLVHDGPCKSVYAVEGRFITEMEKRRTKFRTYDPNQAYVYFLPFSVTWLVRYLYEGNSDAKPLKTFVSDYIRLVSTNHPFWNRTNGADHFMLTCHDWGPLTSQANRDLFNTSIRVMCNANSSEGFNPTKDVTLPEIKLYGGEVDHKLRLSKTLSASPRPYLGFFAGGVHGPVRPILLKHWKQRDLDMPVYEYLPKHLNYYDFMRSSKFCFCPSGYEVASPRVIEAIYSECIPVILSVNFVLPFTDVLRWETFSVLVDVSEIPRLKEILMSISNEKYEWLKSNLRYVRRHFELNDPPQRFDAFHLTLHSIWLRRLNLKLT

SEQ ID NO: 79191 - protein, 334 aa, Arabidopsis thaliana; identical to SEQ ID NO: 72786
  peptide (1)..(334): Ceres Seq. ID no. 12649732
  misc_feature (7)..(291): Pfam Name: Exostosin family Pfam Description: Exostosin family
  misc_feature (1)..(334): Homolog of NCBI NO: 15239388 NR Description: Exostosin family; protein id: At5g25310.1
  misc_feature (1)..(333): Homolog of NCBI NO: 34394611 NR Description: putative pectin-glucuronyltransferase [Oryza
  misc_feature (1)..(333): Homolog of NCBI NO: 15237526 NR Description: putative protein; protein id: At5g03800.1
  misc_feature (1)..(333): Homolog of NCBI NO: 9758008 NR Description: contains similarity to limonene
  misc_feature (1)..(333): Homolog of NCBI NO: 38345576 NR Description: OSJNBa0027H06.12 [Oryza sativa (japonica
  misc_feature (1)..(333): Homolog of NCBI NO: 15231488 NR Description: Exostosin family; protein id: At3g07620.1 thaliana] >gi|6466945|gb|AAF13080.1|AC009176_7 hypothetical
  misc_feature (1)..(133): Homolog of NCBI NO: 34898460 NR Description: Similar to Arabidopsis thaliana DNA chromosome 4,
  misc_feature (214)..(333): Homolog of NCBI NO: 34898460 NR Description: Similar to Arabidopsis thaliana DNA chromosome 4,
  misc_feature (112)..(209): Homolog of NCBI NO: 34898460 NR Description: Similar to Arabidopsis thaliana DNA chromosome 4,
  misc_feature (1)..(333): Homolog of NCBI NO: 15238967 NR Description: Exostosin family; protein id: At5g11130.1 thaliana] >gi|8953375|emb|CAB96648.1| putative protein

SEQ ID NO: 79192 - protein, 298 aa, Arabidopsis thaliana; identical to SEQ ID NO: 72787
  peptide (1)..(298): Ceres Seq. ID no. 12649733
  misc_feature (1)..(255): Pfam Name: Exostosin family Pfam Description: Exostosin family
  misc_feature (1)..(298): Homolog of NCBI NO: 15239388 NR Description: Exostosin family; protein id: At5g25310.1
  misc_feature (1)..(297): Homolog of NCBI NO: 34394611 NR Description: putative pectin-glucuronyltransferase [Oryza
  misc_feature (1)..(297): Homolog of NCBI NO: 15237526 NR Description: putative protein; protein id: At5g03800.1
  misc_feature (1)..(297): Homolog of NCBI NO: 9758008 NR Description: contains similarity to limonene
  misc_feature (1)..(297): Homolog of NCBI NO: 38345576 NR Description: OSJNBa0027H06.12 [Oryza sativa (japonica
  misc_feature (1)..(297): Homolog of NCBI NO: 15231488 NR Description: Exostosin family; protein id: At3g07620.1 thaliana] >gi|6466945|gb|AAF13080.1|AC009176_7 hypothetical
  misc_feature (1)..(97): Homolog of NCBI NO: 34898460 NR Description: Similar to Arabidopsis thaliana DNA chromosome 4,
  misc_feature (178)..(297): Homolog of NCBI NO: 34898460 NR Description: Similar to Arabidopsis thaliana DNA chromosome 4,
  misc_feature (76)..(173): Homolog of NCBI NO: 34898460 NR Description: Similar to Arabidopsis thaliana DNA chromosome 4,
  misc_feature (1)..(297): Homolog of NCBI NO: 15238967 NR Description: Exostosin family; protein id: At5g11130.1 thaliana] >gi|8953375|emb|CAB96648.1| putative protein

SEQ ID NO: 79193 - DNA, 1173 bp, Arabidopsis thaliana
  misc_feature (1)..(1173): Ceres Seq. ID no. 12649764
  misc_feature: MA Experiment ID: 108434 Result: Down-regulated in Transcription
  misc_feature: MA Experiment 108434 PARAMETER Experiment Name: At_Root_Tips_cDNA_P Parameter: Tissue Value: Root Tips
  misc_feature: MA Experiment ID: 108463 Result: Up-regulated in Transcription
  misc_feature: MA Experiment 108463 PARAMETER Experiment Name: At_Germinating_Seeds_cDNA_P Parameter: Age (day) Value: 3 vs. 0
  misc_feature: MA Experiment 108463 PARAMETER Experiment Name: At_Germinating_Seeds_cDNA_P Parameter: Tissue Value: Germinating Seeds
  misc_feature: MA Experiment ID: 108464 Result: Up-regulated in Transcription
  misc_feature: MA Experiment 108464 PARAMETER Experiment Name: At_Germinating_Seeds_cDNA_P Parameter: Age (day) Value: 4 vs. 0
  misc_feature: MA Experiment 108464 PARAMETER Experiment Name: At_Germinating_Seeds_cDNA_P Parameter: Tissue Value: Germinating Seeds
  misc_feature: MA Experiment ID: 108469 Result: Up-regulated in Transcription
  misc_feature: MA Experiment ID: 108501 Result: Down-regulated in Transcription
  misc_feature: MA Experiment 108501 PARAMETER Experiment Name: At_ap2_floral_buds_cDNA_P Parameter: Plant Line Value: ap2 (Ler.)
  misc_feature: MA Experiment 108501 PARAMETER Experiment Name: At_ap2_floral_buds_cDNA_P Parameter: Tissue Value: Closed Flower
  misc_feature: MA Experiment ID: 108573 Result: Down-regulated in Transcription
  misc_feature: MA Experiment 108573 PARAMETER Experiment Name: At_Drought_cDNA_P Parameter: Timepoint (hr) Value: 6
  misc_feature: MA Experiment 108573 PARAMETER Experiment Name: At_Drought_cDNA_P Parameter: Tissue Value: Aerial
  misc_feature: MA Experiment 108573 PARAMETER Experiment Name: At_Drought_cDNA_P Parameter: Treatment Value: Drought vs. No Drought
  misc_feature: MA Experiment ID: 108585 Result: Up-regulated in Transcription
  misc_feature: MA Experiment 108585 PARAMETER Experiment Name: At_5mM_NaNP_cDNA_P Parameter: Timepoint (hr) Value: 6
  misc_feature: MA Experiment 108585 PARAMETER Experiment Name: At_5mM_NaNP_cDNA_P Parameter: Tissue Value: Aerial
  misc_feature: MA Experiment 108585 PARAMETER Experiment Name: At_5mM_NaNP_cDNA_P Parameter: Treatment Value: null
  misc_feature: MA Experiment ID: 108595 Result: Down-regulated in Transcription
  misc_feature: MA Experiment 108595 PARAMETER Experiment Name: At_Ler-pi_Ovule_cDNA_P Parameter: Plant Line Value: null
  misc_feature: MA Experiment ID: 108668 Result: Up-regulated in Transcription
  misc_feature: MA Experiment 108668 PARAMETER Experiment Name: At_2mM_SA_cDNA_P Parameter: Plant Line Value: WS
  misc_feature: MA Experiment 108668 PARAMETER Experiment Name: At_2mM_SA_cDNA_P Parameter: Timepoint (hr) Value: 6
  misc_feature: MA Experiment 108668 PARAMETER Experiment Name: At_2mM_SA_cDNA_P Parameter: Treatment Value: 2mM SA vs. No Treatment
  misc_feature: MA Experiment ID: 20000090 Result: Up-regulated in Transcription
  misc_feature: MA Experiment ID: 20000182 Result: Up-regulated in Transcription
  misc_feature: MA Experiment 20000182 PARAMETER Experiment Name: At_2mM_SA_P Parameter: Age (day) Value: 14
  misc_feature: MA Experiment 20000182 PARAMETER Experiment Name: At_2mM_SA_P Parameter: Organism Value: A. thaliana
  misc_feature: MA Experiment 20000182 PARAMETER Experiment Name: At_2mM_SA_P Parameter: Plant Line Value: WS
  misc_feature: MA Experiment 20000182 PARAMETER Experiment Name: At_2mM_SA_P Parameter: Timepoint (hr) Value: 6
  misc_feature: MA Experiment 20000182 PARAMETER Experiment Name: At_2mM_SA_P Parameter: Tissue Value: Aerial
  misc_feature: MA Experiment 20000182 PARAMETER Experiment Name: At_2mM_SA_P Parameter: Treatment Value: 2mM SA vs. No Treatment
  misc_feature: MA Experiment ID: 20000234 Result: Down-regulated in Transcription
  misc_feature: MA Experiment 20000234 PARAMETER Experiment Name: At_Siliques_P Parameter: Age (day) Value: 21
  misc_feature: MA Experiment 20000234 PARAMETER Experiment Name: At_Siliques_P Parameter: Organism Value: A. thaliana
  misc_feature: MA Experiment 20000234 PARAMETER Experiment Name: At_Siliques_P Parameter: Plant Line Value: WS
  misc_feature: MA Experiment 20000234 PARAMETER Experiment Name: At_Siliques_P Parameter: Tissue Value: Less Than 5mm Siliques vs. Whole Plant
  misc_feature: MA Experiment ID: 20000235 Result: Down-regulated in Transcription
  misc_feature: MA Experiment 20000235 PARAMETER Experiment Name: At_Siliques_P Parameter: Age (day) Value: 21
  misc_feature: MA Experiment 20000235 PARAMETER Experiment Name: At_Siliques_P Parameter: Organism Value: A. thaliana
  misc_feature: MA Experiment 20000235 PARAMETER Experiment Name: At_Siliques_P Parameter: Plant Line Value: WS
  misc_feature: MA Experiment 20000235 PARAMETER Experiment Name: At_Siliques_P Parameter: Tissue Value: 5-10mm Siliques vs. Whole Plant
  misc_feature: MA Experiment ID: 20000286 Result: Down-regulated in Transcription
  misc_feature: MA Experiment 20000286 PARAMETER Experiment Name: At_Open_Flower_P Parameter: Age (day) Value: 21
  misc_feature: MA Experiment 20000286 PARAMETER Experiment Name: At_Open_Flower_P Parameter: Plant Line Value: WS
  misc_feature: MA Experiment 20000286 PARAMETER Experiment Name: At_Open_Flower_P Parameter: Tissue Value: Half Open vs. Whole Plant
  misc_feature: MA Experiment ID: 20000438 Result: Down-regulated in Transcription
  misc_feature: MA Experiment 20000438 PARAMETER Experiment Name: At_Shoots__P Parameter: Age (day) Value: 14
  misc_feature: MA Experiment 20000438 PARAMETER Experiment Name: At_Shoots__P Parameter: Tissue Value: Shoots vs. Whole Plant
gaactctagtgttaagatttagcagagagtatccgaatgggaaattgtctctcagcttcgacacttcccaccgaaccaaatgctcccaaatcagtggaggagggtgtgaaagtcttcacggtggcagatctgaagaaagcgactaatgatttcggaaaccagatggaactaggagagagcttgggatacatcaatcccaaaacgttatctccggccaagaaaggtgttggcatggccgtcgcggtcaagaaaatttacttagccaatgaacaagcttttcaagattggcttgttgacgtagagtttctacgacataactctcatccaagcttggtgaagctaattggctactgttatgatcgtgatatgttgtttattgtttctgaatactttccaaatggaagcttaggaagttacatcagtagagatagtcgtccaaagtcattgccgtgggagacacgacttaagatatccataggagcggctcagtgtcttgccttcttgcactctaggaagcaagccggtctataccgcagatatctcactgcttcgaaaatcctgctcgactcggacttcaacgcaagagtttcctattttggaaagccaaaagtttctctcgatgaattggtatacaccatcgggttttcaaatgtagcacctagatatcaatacccacctcccgaatacatactctcagggatgtcgaacatggcgggcgatgtgtatagctttggtgttatactacttaaaatgttaactggtttaggaaaagacctcacaatctcagcaaagcgagaaataaaaaataaaaagtacaacattgtggagatgatcgatccagatttgaagaatagctatccacttgaagcgggaagacttatgtgcgagcttattaaacaatgcctagaggtagacccgaagatgcgaccaaccatgcaagaagtgctagataatctgaatgctatagctcagatttgaggagaaactatataagggttactaatgctgaaaacattgtttcactataagacagttataacatagtcaatgtatgcatttgtatacaataactcgtatatgacgagaagtattaagaaacaagacctaattctccattcttatccatcactcaagaacagagctatatgctaatcaactttgaacctttacact

SEQ ID NO: 79194 - protein, 313 aa, Arabidopsis thaliana; identical to SEQ ID NO: 21363
  peptide (1)..(313): Ceres Seq. ID no. 12649765
  misc_feature (1)..(313): Homolog of NCBI NO: 22327062 NR Description: putative protein kinase; protein id: At5g25440.1, by cDNA: gi_20466369 [Arabidopsis thaliana] putative protein kinase [Arabidopsis thaliana]
  misc_feature (6)..(313): Homolog of NCBI NO: 15239047 NR Description: putative protein; protein id: At5g11410.1 thaliana] >gi|8953403|emb|CAB96676.1| putative protein
  misc_feature (14)..(313): Homolog of NCBI NO: 25287650 NR Description: hypothetical protein F15M4.14 [imported] -
  misc_feature (26)..(313): Homolog of NCBI NO: 30699159 NR Description: protein kinase, putative [Arabidopsis thaliana]
  misc_feature (7)..(313): Homolog of NCBI NO: 38345396 NR Description: OSJNBa0017B10.2 [Oryza sativa (japonica
  misc_feature (3)..(313): Homolog of NCBI NO: 15242204 NR Description: serine/threonine specific protein kinase -like; id: At5g15080.1, supported by cDNA: gi_17064887 [Arabidopsis
  misc_feature (8)..(310): Homolog of NCBI NO: 37534182 NR Description: putative serine /threonine kinase similar to NAK
  misc_feature (6)..(310): Homolog of NCBI NO: 28804505 NR Description: serine/threonine protein kinase [Aster tripolium]
  misc_feature (24)..(310): Homolog of NCBI NO: 7434285 NR Description: probable serine/threonine-specific protein kinase
  misc_feature (24)..(310): Homolog of NCBI NO: 30690422 NR Description: protein kinase family [Arabidopsis thaliana] putative protein kinase [Arabidopsis thaliana]

SEQ ID NO: 79195 - protein, 271 aa, Arabidopsis thaliana; identical to SEQ ID NO: 21364
  peptide (1)..(271): Ceres Seq. ID no. 12649766
  misc_feature (1)..(271): Homolog of NCBI NO: 22327062 NR Description: putative protein kinase; protein id: At5g25440.1, by cDNA: gi_20466369 [Arabidopsis thaliana] putative protein kinase [Arabidopsis thaliana]
  misc_feature (1)..(271): Homolog of NCBI NO: 15239047 NR Description: putative protein; protein id: At5g11410.1 thaliana] >gi|8953403|emb|CAB96676.1| putative protein
  misc_feature (1)..(271): Homolog of NCBI NO: 25287650 NR Description: hypothetical protein F15M4.14 [imported] -
  misc_feature (1)..(271): Homolog of NCBI NO: 30699159 NR Description: protein kinase, putative [Arabidopsis thaliana]
  misc_feature (1)..(271): Homolog of NCBI NO: 38345396 NR Description: OSJNBa0017B10.2 [Oryza sativa (japonica
  misc_feature (1)..(271): Homolog of NCBI NO: 15242204 NR Description: serine/threonine specific protein kinase -like; id: At5g15080.1, supported by cDNA: gi_17064887 [Arabidopsis
  misc_feature (1)..(268): Homolog of NCBI NO: 37534182 NR Description: putative serine /threonine kinase similar to NAK
  misc_feature (1)..(268): Homolog of NCBI NO: 28804505 NR Description: serine/threonine protein kinase [Aster tripolium]
  misc_feature (1)..(268): Homolog of NCBI NO: 7434285 NR Description: probable serine/threonine-specific protein kinase
  misc_feature (1)..(268): Homolog of NCBI NO: 25287611 NR Description: protein kinase-like protein [imported] -

SEQ ID NO: 79196 - protein, 248 aa, Arabidopsis thaliana; identical to SEQ ID NO: 21365
  peptide (1)..(248): Ceres Seq. ID no. 12649767
  misc_feature (1)..(248): Homolog of NCBI NO: 22327062 NR Description: putative protein kinase; protein id: At5g25440.1, by cDNA: gi_20466369 [Arabidopsis thaliana] putative protein kinase [Arabidopsis thaliana]
  misc_feature (1)..(248): Homolog of NCBI NO: 15239047 NR Description: putative protein; protein id: At5g11410.1 thaliana] >gi|8953403|emb|CAB96676.1| putative protein
  misc_feature (1)..(248): Homolog of NCBI NO: 25287650 NR Description: hypothetical protein F15M4.14 [imported] -
  misc_feature (1)..(248): Homolog of NCBI NO: 30699159 NR Description: protein kinase, putative [Arabidopsis thaliana]
  misc_feature (1)..(248): Homolog of NCBI NO: 38345396 NR Description: OSJNBa0017B10.2 [Oryza sativa (japonica
  misc_feature (1)..(248): Homolog of NCBI NO: 15242204 NR Description: serine/threonine specific protein kinase -like; id: At5g15080.1, supported by cDNA: gi_17064887 [Arabidopsis
  misc_feature (1)..(245): Homolog of NCBI NO: 37534182 NR Description: putative serine /threonine kinase similar to NAK
  misc_feature (1)..(245): Homolog of NCBI NO: 28804505 NR Description: serine/threonine protein kinase [Aster tripolium]
  misc_feature (1)..(245): Homolog of NCBI NO: 7434285 NR Description: probable serine/threonine-specific protein kinase
  misc_feature (1)..(245): Homolog of NCBI NO: 25287611 NR Description: protein kinase-like protein [imported] -

SEQ ID NO: 79197 - DNA, 1020 bp, Arabidopsis thaliana
  misc_feature (1)..(1020): Ceres Seq. ID no. 12649784
  misc_feature: MA Experiment ID: 20000264 Result: Up-regulated in Transcription
  misc_feature: MA Experiment 20000264 PARAMETER Experiment Name: At_Open_Flower_P Parameter: Age (day) Value: 21
  misc_feature: MA Experiment 20000264 PARAMETER Experiment Name: At_Open_Flower_P Parameter: Plant Line Value: WS
  misc_feature: MA Experiment 20000264 PARAMETER Experiment Name: At_Open_Flower_P Parameter: Tissue Value: Open Flower vs. Whole Plant
  misc_feature: MA Experiment ID: 20000265 Result: Up-regulated in Transcription
  misc_feature: MA Experiment 20000265 PARAMETER Experiment Name: At_Open_Flower_P Parameter: Age (day) Value: 21
  misc_feature: MA Experiment 20000265 PARAMETER Experiment Name: At_Open_Flower_P Parameter: Plant Line Value: WS
  misc_feature: MA Experiment 20000265 PARAMETER Experiment Name: At_Open_Flower_P Parameter: Tissue Value: Closed Flower vs. Whole Plant
  misc_feature: MA Experiment ID: 20000794 Result: Up-regulated in Transcription
  misc_feature: MA Experiment 20000794 PARAMETER Experiment Name: At_Petals_P Parameter: Age (day) Value: 23-25 days
  misc_feature: MA Experiment 20000794 PARAMETER Experiment Name: At_Petals_P Parameter: Plant Line Value: WS
  misc_feature: MA Experiment 20000794 PARAMETER Experiment Name: At_Petals_P Parameter: Tissue Value: Petals vs. Whole plant
  misc_feature: MA Experiment ID: 20001910 Result: Up-regulated in Transcription
  misc_feature: MA Experiment 20001910 PARAMETER Experiment Name: At_Drought_Reproduction_P Parameter: Age (day) Value: 37
  misc_feature: MA Experiment 20001910 PARAMETER Experiment Name: At_Drought_Reproduction_P Parameter: Organism Value: A. thaliana
  misc_feature: MA Experiment 20001910 PARAMETER Experiment Name: At_Drought_Reproduction_P Parameter: Plant Line Value: WS
  misc_feature: MA Experiment 20001910 PARAMETER Experiment Name: At_Drought_Reproduction_P Parameter: Timepoint (day) Value: 7
  misc_feature: MA Experiment 20001910 PARAMETER Experiment Name: At_Drought_Reproduction_P Parameter: Tissue Value: Flowers
  misc_feature: MA Experiment 20001910 PARAMETER Experiment Name: At_Drought_Reproduction_P Parameter: Treatment Value: Drought vs. No Drought
atgggtttggattattacgatatattgaaagtgaataggaacgcaacagaggatgatctaaagaaatcttacagaaaattggctatgaaatggcatcctgacaaaaaccctaacaccaaaacagaagctgaagccaagtttaagcaaatctctgaggcttatgaggttttgagtgatccgcagaagcgagcggtgtatgatcaatacggggaagaaggattaagcgatatgccacctcccgggagcacgggaaacaatggaagagcgggaggttttaaccctagaaatgcggaagatatatttgcagagttctttggaagtagtccatttggatttggttcagctggtggtcctggaaggtcaatgaggtttcaatcagacggtggaggaggaatgtttggcgggtttggtggtggaaacaacggtagcgaaaacaatatattcagaacttacagtgaaggcactcctgcgcctaagaaacctccaccggttgagagtaaattgccttgtagccttgaagagttgtattctggatcaactaggaaaatgaagatctctagatccattgttgatgctaatgggagacaagcgcaagagacagagattttgacgattgttgtgaaaccaggatggaaaaaagggacaaagataaagtttccagacaaaggaaatgagcaagtgaatcagttaccagctgatttggtgtttgtaatagacgagaaaccacatgatttgttcacgagagatgggaatgatctcatcacaagcagaagagtaacgcttgcagaagctataggaggaacaactgtgaatatcaacaccctcgatgggcggaatctacccgttggtgtcgcggaaatcgtgagtcccgggtatgagtttgtggttcctggagaagggatgccaatagctaaagaaccaagaaacaaaggtgatcttaagattaagttcgatgttcagtttcccgcaagattgacaacggagcagaaatccgctctcaagcgggtcttagcgggttga

SEQ ID NO: 79198 - protein, 339 aa, Arabidopsis thaliana
  peptide (1)..(339): Ceres Seq. ID no. 12649785
  misc_feature (215)..(337): Pfam Name: DnaJ C terminal region Pfam Description: DnaJ C terminal region
  misc_feature (1)..(339): Homolog of NCBI NO: 15239455 NR Description: heat-shock protein - like; protein id:
  misc_feature (1)..(339): Homolog of NCBI NO: 34905276 NR Description: putative heat shock protein [Oryza sativa
  misc_feature (1)..(337): Homolog of NCBI NO: 6179940 NR Description: DnaJ-like protein [Nicotiana tabacum]
  misc_feature (1)..(337): Homolog of NCBI NO: 15235310 NR Description: heat-shock protein; protein id: At4g28480.1, by cDNA: gi_14596114, supported by cDNA: gi_20148388 [Arabidopsis
  misc_feature (1)..(337): Homolog of NCBI NO: 15225377 NR Description: putative heat shock protein; protein id: supported by cDNA: 25528., supported by cDNA: gi_15982894 thaliana] >gi|25296018|pir||G84590 probable heat shock protein
  misc_feature (1)..(337): Homolog of NCBI NO: 11863723 NR Description: DnaJ like protein [Lycopersicon esculentum]
  misc_feature (1)..(338): Homolog of NCBI NO: 15240968 NR Description: heat shock protein 40-like; protein id: supported by cDNA: 114622. [Arabidopsis thaliana]
  misc_feature (1)..(339): Homolog of NCBI NO: 15218515 NR Description: putative heat-shock protein; protein id: supported by cDNA: 37036., supported by cDNA: gi_13430679
  misc_feature (1)..(339): Homolog of NCBI NO: 21593202 NR Description: putative heat-shock protein [Arabidopsis thaliana]
  misc_feature (1)..(337): Homolog of NCBI NO: 34904486 NR Description: putative heat shock protein 40 [Oryza sativa
MGLDYYDILKVNRNATEDDLKKSYRKLAMKWHPDKNPNTKTEAEAKFKQISEAYEVLSDPQKRAVYDQYGEEGLSDMPPPGSTGNNGRAGGFNPRNAEDIFAEFFGSSPFGFGSAGGPGRSMRFQSDGGGGMFGGFGGGNNGSENNIFRTYSEGTPAPKKPPPVESKLPCSLEELYSGSTRKMKISRSIVDANGRQAQETEILTIVVKPGWKKGTKIKFPDKGNEQVNQLPADLVFVIDEKPHDLFTRDGNDLITSRRVTLAEAIGGTTVNINTLDGRNLPVGVAEIVSPGYEFVVPGEGMPIAKEPRNKGDLKIKFDVQFPARLTTEQKSALKRVLAG

SEQ ID NO: 79199 - protein, 311 aa, Arabidopsis thaliana
  peptide (1)..(311): Ceres Seq. ID no. 12649786
  misc_feature (187)..(309): Pfam Name: DnaJ C terminal region Pfam Description: DnaJ C terminal region
  misc_feature (1)..(311): Homolog of NCBI NO: 15239455 NR Description: heat-shock protein - like; protein id:
  misc_feature (1)..(311): Homolog of NCBI NO: 34905276 NR Description: putative heat shock protein [Oryza sativa
  misc_feature (1)..(309): Homolog of NCBI NO: 6179940 NR Description: DnaJ-like protein [Nicotiana tabacum]
  misc_feature (1)..(309): Homolog of NCBI NO: 15235310 NR Description: heat-shock protein; protein id: At4g28480.1, by cDNA: gi_14596114, supported by cDNA: gi_20148388 [Arabidopsis
  misc_feature (1)..(309): Homolog of NCBI NO: 15225377 NR Description: putative heat shock protein; protein id: supported by cDNA: 25528., supported by cDNA: gi_15982894 thaliana] >gi|25296018|pir||G84590 probable heat shock protein
  misc_feature (1)..(309): Homolog of NCBI NO: 11863723 NR Description: DnaJ like protein [Lycopersicon esculentum]
  misc_feature (1)..(310): Homolog of NCBI NO: 15240968 NR Description: heat shock protein 40-like; protein id: supported by cDNA: 114622. [Arabidopsis thaliana]
  misc_feature (1)..(311): Homolog of NCBI NO: 15218515 NR Description: putative heat-shock protein; protein id: supported by cDNA: 37036., supported by cDNA: gi_13430679
  misc_feature (1)..(311): Homolog of NCBI NO: 21593202 NR Description: putative heat-shock protein [Arabidopsis thaliana]
  misc_feature (1)..(309): Homolog of NCBI NO: 34904486 NR Description: putative heat shock protein 40 [Oryza sativa
MKWHPDKNPNTKTEAEAKFKQISEAYEVLSDPQKRAVYDQYGEEGLSDMPPPGSTGNNGRAGGFNPRNAEDIFAEFFGSSPFGFGSAGGPGRSMRFQSDGGGGMFGGFGGGNNGSENNIFRTYSEGTPAPKKPPPVESKLPCSLEELYSGSTRKMKISRSIVDANGRQAQETEILTIVVKPGWKKGTKIKFPDKGNEQVNQLPADLVFVIDEKPHDLFTRDGNDLITSRRVTLAEAIGGTTVNINTLDGRNLPVGVAEIVSPGYEFVVPGEGMPIAKEPRNKGDLKIKFDVQFPARLTTEQKSALKRVLAG

SEQ ID NO: 79200 - protein, 263 aa, Arabidopsis thaliana
  peptide (1)..(263): Ceres Seq. ID no. 12649787
  misc_feature (139)..(261): Pfam Name: DnaJ C terminal region Pfam Description: DnaJ C terminal region
  misc_feature (1)..(263): Homolog of NCBI NO: 15239455 NR Description: heat-shock protein - like; protein id:
  misc_feature (1)..(263): Homolog of NCBI NO: 34905276 NR Description: putative heat shock protein [Oryza sativa
  misc_feature (1)..(261): Homolog of NCBI NO: 6179940 NR Description: DnaJ-like protein [Nicotiana tabacum]
  misc_feature (1)..(261): Homolog of NCBI NO: 15235310 NR Description: heat-shock protein; protein id: At4g28480.1, by cDNA: gi_14596114, supported by cDNA: gi_20148388 [Arabidopsis
  misc_feature (1)..(261): Homolog of NCBI NO: 15225377 NR Description: putative heat shock protein; protein id: supported by cDNA: 25528., supported by cDNA: gi_15982894 thaliana] >gi|25296018|pir||G84590 probable heat shock protein
  misc_feature (1)..(261): Homolog of NCBI NO: 11863723 NR Description: DnaJ like protein [Lycopersicon esculentum]
  misc_feature (1)..(262): Homolog of NCBI NO: 15240968 NR Description: heat shock protein 40-like; protein id: supported by cDNA: 114622. [Arabidopsis thaliana]
  misc_feature (1)..(263): Homolog of NCBI NO: 15218515 NR Description: putative heat-shock protein; protein id: supported by cDNA: 37036., supported by cDNA: gi_13430679
  misc_feature (1)..(263): Homolog of NCBI NO: 21593202 NR Description: putative heat-shock protein [Arabidopsis thaliana]
  misc_feature (1)..(261): Homolog of NCBI NO: 34904486 NR Description: putative heat shock protein 40 [Oryza sativa
MPPPGSTGNNGRAGGFNPRNAEDIFAEFFGSSPFGFGSAGGPGRSMRFQSDGGGGMFGGFGGGNNGSENNIFRTYSEGTPAPKKPPPVESKLPCSLEELYSGSTRKMKISRSIVDANGRQAQETEILTIVVKPGWKKGTKIKFPDKGNEQVNQLPADLVFVIDEKPHDLFTRDGNDLITSRRVTLAEAIGGTTVNINTLDGRNLPVGVAEIVSPGYEFVVPGEGMPIAKEPRNKGDLKIKFDVQFPARLTTEQKSALKRVLAG

SEQ ID NO: 79201 - DNA, 1805 bp, Arabidopsis thaliana
  misc_feature (1)..(1805): Ceres Seq. ID no. 12649850
  misc_feature: MA Experiment ID: 108434 Result: Down-regulated in Transcription
  misc_feature: MA Experiment 108434 PARAMETER Experiment Name: At_Root_Tips_cDNA_P Parameter: Tissue Value: Root Tips
  misc_feature: MA Experiment ID: 108461 Result: Up-regulated in Transcription
  misc_feature: MA Experiment 108461 PARAMETER Experiment Name: At_Germinating_Seeds_cDNA_P Parameter: Age (day) Value: 1 vs. 0
  misc_feature: MA Experiment 108461 PARAMETER Experiment Name: At_Germinating_Seeds_cDNA_P Parameter: Tissue Value: Germinating Seeds
  misc_feature: MA Experiment ID: 108462 Result: Up-regulated in Transcription
  misc_feature: MA Experiment 108462 PARAMETER Experiment Name: At_Germinating_Seeds_cDNA_P Parameter: Age (day) Value: 2 vs. 0
  misc_feature: MA Experiment 108462 PARAMETER Experiment Name: At_Germinating_Seeds_cDNA_P Parameter: Tissue Value: Germinating Seeds
  misc_feature: MA Experiment ID: 108463 Result: Up-regulated in Transcription
  misc_feature: MA Experiment 108463 PARAMETER Experiment Name: At_Germinating_Seeds_cDNA_P Parameter: Age (day) Value: 3 vs. 0
  misc_feature: MA Experiment 108463 PARAMETER Experiment Name: At_Germinating_Seeds_cDNA_P Parameter: Tissue Value: Germinating Seeds
  misc_feature: MA Experiment ID: 108577 Result: Down-regulated in Transcription
  misc_feature: MA Experiment 108577 PARAMETER Experiment Name: At_42deg_Heat_cDNA_P Parameter: Temperature (deg C) Value: 42 vs. 22
  misc_feature: MA Experiment 108577 PARAMETER Experiment Name: At_42deg_Heat_cDNA_P Parameter: Timepoint (hr) Value: 6
  misc_feature: MA Experiment 108577 PARAMETER Experiment Name: At_42deg_Heat_cDNA_P Parameter: Tissue Value: Aerial
  misc_feature: MA Experiment ID: 20000180 Result: Up-regulated in Transcription
  misc_feature: MA Experiment 20000180 PARAMETER Experiment Name: At_Germinating_Seeds_P Parameter: Age (hr) Value: 24 vs. 0
  misc_feature: MA Experiment 20000180 PARAMETER Experiment Name: At_Germinating_Seeds_P Parameter: Tissue Value: Germinating Seeds
  misc_feature: MA Experiment ID: 20000185 Result: Down-regulated in Transcription
  misc_feature: MA Experiment 20000185 PARAMETER Experiment Name: At_Roots__P Parameter: Age (day) Value: 7 vs. 21
  misc_feature: MA Experiment 20000185 PARAMETER Experiment Name: At_Roots__P Parameter: Organism Value: A. thaliana
  misc_feature: MA Experiment 20000185 PARAMETER Experiment Name: At_Roots__P Parameter: Tissue Value: Roots vs. Whole Plant
  misc_feature: MA Experiment ID: 20000224 Result: Up-regulated in Transcription
  misc_feature: MA Experiment ID: 20000234 Result: Up-regulated in Transcription
  misc_feature: MA Experiment 20000234 PARAMETER Experiment Name: At_Siliques_P Parameter: Age (day) Value: 21
  misc_feature: MA Experiment 20000234 PARAMETER Experiment Name: At_Siliques_P Parameter: Organism Value: A. thaliana
  misc_feature: MA Experiment 20000234 PARAMETER Experiment Name: At_Siliques_P Parameter: Plant Line Value: WS
  misc_feature: MA Experiment 20000234 PARAMETER Experiment Name: At_Siliques_P Parameter: Tissue Value: Less Than 5mm Siliques vs. Whole Plant
  misc_feature: MA Experiment ID: 20000235 Result: Up-regulated in Transcription
  misc_feature: MA Experiment 20000235 PARAMETER Experiment Name: At_Siliques_P Parameter: Age (day) Value: 21
  misc_feature: MA Experiment 20000235 PARAMETER Experiment Name: At_Siliques_P Parameter: Organism Value: A. thaliana
  misc_feature: MA Experiment 20000235 PARAMETER Experiment Name: At_Siliques_P Parameter: Plant Line Value: WS
  misc_feature: MA Experiment 20000235 PARAMETER Experiment Name: At_Siliques_P Parameter: Tissue Value: 5-10mm Siliques vs. Whole Plant
  misc_feature: MA Experiment ID: 20000265 Result: Up-regulated in Transcription
  misc_feature: MA Experiment 20000265 PARAMETER Experiment Name: At_Open_Flower_P Parameter: Age (day) Value: 21
  misc_feature: MA Experiment 20000265 PARAMETER Experiment Name: At_Open_Flower_P Parameter: Plant Line Value: WS
  misc_feature: MA Experiment 20000265 PARAMETER Experiment Name: At_Open_Flower_P Parameter: Tissue Value: Closed Flower vs. Whole Plant
  misc_feature: MA Experiment ID: 20000439 Result: Down-regulated in Transcription
  misc_feature: MA Experiment 20000439 PARAMETER Experiment Name: At_Roots__P Parameter: Age (day) Value: 14 vs. 21
  misc_feature: MA Experiment 20000439 PARAMETER Experiment Name: At_Roots__P Parameter: Organism Value: A. thaliana
  misc_feature: MA Experiment 20000439 PARAMETER Experiment Name: At_Roots__P Parameter: Tissue Value: Roots vs. Whole Plant
  misc_feature: MA Experiment ID: 20000573 Result: Down-regulated in Transcription
  misc_feature: MA Experiment 20000573 PARAMETER Experiment Name: At_100uM_ABA_Mutants__P Parameter: Organism Value: A. thaliana
  misc_feature: MA Experiment 20000573 PARAMETER Experiment Name: At_100uM_ABA_Mutants__P Parameter: Plant Line Value: CS22 vs. Ler wt
  misc_feature: MA Experiment 20000573 PARAMETER Experiment Name: At_100uM_ABA_Mutants__P Parameter: Timepoint (hr) Value: N/A
  misc_feature: MA Experiment 20000573 PARAMETER Experiment Name: At_100uM_ABA_Mutants__P Parameter: Tissue Value: Whole Plant
  misc_feature: MA Experiment 20000573 PARAMETER Experiment Name: At_100uM_ABA_Mutants__P Parameter: Treatment Value: None
  misc_feature: MA Experiment ID: 20000574 Result: Down-regulated in Transcription
  misc_feature: MA Experiment 20000574 PARAMETER Experiment Name: At_100uM_ABA_Mutants__P Parameter: Organism Value: A. thaliana
  misc_feature: MA Experiment 20000574 PARAMETER Experiment Name: At_100uM_ABA_Mutants__P Parameter: Plant Line Value: CS23 vs. Ler wt
  misc_feature: MA Experiment 20000574 PARAMETER Experiment Name: At_100uM_ABA_Mutants__P Parameter: Timepoint (hr) Value: N/A
  misc_feature: MA Experiment 20000574 PARAMETER Experiment Name: At_100uM_ABA_Mutants__P Parameter: Tissue Value: Whole Plant
  misc_feature: MA Experiment 20000574 PARAMETER Experiment Name: At_100uM_ABA_Mutants__P Parameter: Treatment Value: None
  misc_feature: MA Experiment ID: 20000794 Result: Up-regulated in Transcription
  misc_feature: MA Experiment 20000794 PARAMETER Experiment Name: At_Petals_P Parameter: Age (day) Value: 23-25 days
  misc_feature: MA Experiment 20000794 PARAMETER Experiment Name: At_Petals_P Parameter: Plant Line Value: WS
  misc_feature: MA Experiment 20000794 PARAMETER Experiment Name: At_Petals_P Parameter: Tissue Value: Petals vs. Whole plant
  misc_feature: MA Experiment ID: 20001451 Result: Down-regulated in Transcription
  misc_feature: MA Experiment 20001451 PARAMETER Experiment Name: At_Far-red-induction_P Parameter: Age (day) Value: 7
  misc_feature: MA Experiment 20001451 PARAMETER Experiment Name: At_Far-red-induction_P Parameter: Light Value: Far-red vs. White
  misc_feature: MA Experiment 20001451 PARAMETER Experiment Name: At_Far-red-induction_P Parameter: Organism Value: A. thaliana
  misc_feature: MA Experiment 20001451 PARAMETER Experiment Name: At_Far-red-induction_P Parameter: Plant Line Value: Columbia
  misc_feature: MA Experiment 20001451 PARAMETER Experiment Name: At_Far-red-induction_P Parameter: Timepoint (hr) Value: 24
  misc_feature: MA Experiment 20001451 PARAMETER Experiment Name: At_Far-red-induction_P Parameter: Tissue Value: Whole Plant
  misc_feature: MA Experiment ID: 20001557 Result: Down-regulated in Transcription
  misc_feature: MA Experiment 20001557 PARAMETER Experiment Name: At_Drought_Soil_Dry_P Parameter: Age (day) Value: 27
  misc_feature: MA Experiment 20001557 PARAMETER Experiment Name: At_Drought_Soil_Dry_P Parameter: Organism Value: A. thaliana
  misc_feature: MA Experiment 20001557 PARAMETER Experiment Name: At_Drought_Soil_Dry_P Parameter: Plant Line Value: WS
  misc_feature: MA Experiment 20001557 PARAMETER Experiment Name: At_Drought_Soil_Dry_P Parameter: Post Timepoint (hr) Value: 3
  misc_feature: MA Experiment 20001557 PARAMETER Experiment Name: At_Drought_Soil_Dry_P Parameter: Post-Treatment Value: Re-Water vs. No Drought
  misc_feature: MA Experiment 20001557 PARAMETER Experiment Name: At_Drought_Soil_Dry_P Parameter: Timepoint (day) Value: 13
  misc_feature: MA Experiment 20001557 PARAMETER Experiment Name: At_Drought_Soil_Dry_P Parameter: Treatment Value: Drought vs. No Drought
  misc_feature: MA Experiment ID: 20001558 Result: Down-regulated in Transcription
  misc_feature: MA Experiment 20001558 PARAMETER Experiment Name: At_Drought_Soil_Dry_P Parameter: Age (day) Value: 27
  misc_feature: MA Experiment 20001558 PARAMETER Experiment Name: At_Drought_Soil_Dry_P Parameter: Organism Value: A. thaliana
  misc_feature: MA Experiment 20001558 PARAMETER Experiment Name: At_Drought_Soil_Dry_P Parameter: Plant Line Value: WS
  misc_feature: MA Experiment 20001558 PARAMETER Experiment Name: At_Drought_Soil_Dry_P Parameter: Post Timepoint (hr) Value: 6
  misc_feature: MA Experiment 20001558 PARAMETER Experiment Name: At_Drought_Soil_Dry_P Parameter: Post-Treatment Value: Re-Water vs. No Drought
  misc_feature: MA Experiment 20001558 PARAMETER Experiment Name: At_Drought_Soil_Dry_P Parameter: Timepoint (day) Value: 13
  misc_feature: MA Experiment 20001558 PARAMETER Experiment Name: At_Drought_Soil_Dry_P Parameter: Treatment Value: Drought vs. No Drought
  misc_feature: MA Experiment ID: 20001560 Result: Down-regulated in Transcription
  misc_feature: MA Experiment 20001560 PARAMETER Experiment Name: At_Drought_Soil_Dry_P Parameter: Age (day) Value: 28
  misc_feature: MA Experiment 20001560 PARAMETER Experiment Name: At_Drought_Soil_Dry_P Parameter: Organism Value: A. thaliana
  misc_feature: MA Experiment 20001560 PARAMETER Experiment Name: At_Drought_Soil_Dry_P Parameter: Plant Line Value: WS
  misc_feature: MA Experiment 20001560 PARAMETER Experiment Name: At_Drought_Soil_Dry_P Parameter: Post Timepoint (hr) Value: None
  misc_feature: MA Experiment 20001560 PARAMETER Experiment Name: At_Drought_Soil_Dry_P Parameter: Post-Treatment Value: None
  misc_feature: MA Experiment 20001560 PARAMETER Experiment Name: At_Drought_Soil_Dry_P Parameter: Timepoint (day) Value: 14
  misc_feature: MA Experiment 20001560 PARAMETER Experiment Name: At_Drought_Soil_Dry_P Parameter: Treatment Value: Drought vs. No Drought
  misc_feature: MA Experiment ID: 20001757 Result: Up-regulated in Transcription
  misc_feature: MA Experiment 20001757 PARAMETER Experiment Name: At_50mM_NH4NO3_L-to-H_P Parameter: Timepoint (hr) Value: 6
  misc_feature: MA Experiment 20001757 PARAMETER Experiment Name: At_50mM_NH4NO3_L-to-H_P Parameter: Tissue Value: Leaf
  misc_feature: MA Experiment 20001757 PARAMETER Experiment Name: At_50mM_NH4NO3_L-to-H_P Parameter: Treatment Value: 50mM NH4NO3 vs 100mM Mannitol
  misc_feature: MA Experiment ID: 20001904 Result: Down-regulated in Transcription
  misc_feature: MA Experiment 20001904 PARAMETER Experiment Name: At_Drought_Reproduction_P Parameter: Age (day) Value: 37
  misc_feature: MA Experiment 20001904 PARAMETER Experiment Name: At_Drought_Reproduction_P Parameter: Organism Value: A. thaliana
  misc_feature: MA Experiment 20001904 PARAMETER Experiment Name: At_Drought_Reproduction_P Parameter: Plant Line Value: WS
  misc_feature: MA Experiment 20001904 PARAMETER Experiment Name: At_Drought_Reproduction_P Parameter: Timepoint (day) Value: 7
  misc_feature: MA Experiment 20001904 PARAMETER Experiment Name: At_Drought_Reproduction_P Parameter: Tissue Value: Rosettes
  misc_feature: MA Experiment 20001904 PARAMETER Experiment Name: At_Drought_Reproduction_P Parameter: Treatment Value: Drought vs. No Drought
  misc_feature: MA Experiment ID: 20001905 Result: Down-regulated in Transcription
  misc_feature: MA Experiment 20001905 PARAMETER Experiment Name: At_Drought_Reproduction_P Parameter: Age (day) Value: 40
  misc_feature: MA Experiment 20001905 PARAMETER Experiment Name: At_Drought_Reproduction_P Parameter: Organism Value: A. thaliana
  misc_feature: MA Experiment 20001905 PARAMETER Experiment Name: At_Drought_Reproduction_P Parameter: Plant Line Value: WS
  misc_feature: MA Experiment 20001905 PARAMETER Experiment Name: At_Drought_Reproduction_P Parameter: Timepoint (day) Value: 10
  misc_feature: MA Experiment 20001905 PARAMETER Experiment Name: At_Drought_Reproduction_P Parameter: Tissue Value: Rosettes
  misc_feature: MA Experiment 20001905 PARAMETER Experiment Name: At_Drought_Reproduction_P Parameter: Treatment Value: Drought vs. No Drought
  misc_feature: MA Experiment ID: 20001906 Result: Down-regulated in Transcription
  misc_feature: MA Experiment 20001906 PARAMETER Experiment Name: At_Drought_Reproduction_P Parameter: Age (day) Value: 35
  misc_feature: MA Experiment 20001906 PARAMETER Experiment Name: At_Drought_Reproduction_P Parameter: Organism Value: A. thaliana
  misc_feature: MA Experiment 20001906 PARAMETER Experiment Name: At_Drought_Reproduction_P Parameter: Plant Line Value: WS
  misc_feature: MA Experiment 20001906 PARAMETER Experiment Name: At_Drought_Reproduction_P Parameter: Timepoint (day) Value: 5
  misc_feature: MA Experiment 20001906 PARAMETER Experiment Name: At_Drought_Reproduction_P Parameter: Tissue Value: Siliques
  misc_feature: MA Experiment 20001906 PARAMETER Experiment Name: At_Drought_Reproduction_P Parameter: Treatment Value: Drought vs. No Drought
  misc_feature: MA Experiment ID: 20001908 Result: Down-regulated in Transcription
  misc_feature: MA Experiment 20001908 PARAMETER Experiment Name: At_Drought_Reproduction_P Parameter: Age (day) Value: 40
  misc_feature: MA Experiment 20001908 PARAMETER Experiment Name: At_Drought_Reproduction_P Parameter: Organism Value: A. thaliana
  misc_feature: MA Experiment 20001908 PARAMETER Experiment Name: At_Drought_Reproduction_P Parameter: Plant Line Value: WS
  misc_feature: MA Experiment 20001908 PARAMETER Experiment Name: At_Drought_Reproduction_P Parameter: Timepoint (day) Value: 10
  misc_feature: MA Experiment 20001908 PARAMETER Experiment Name: At_Drought_Reproduction_P Parameter: Tissue Value: Siliques
  misc_feature: MA Experiment 20001908 PARAMETER Experiment Name: At_Drought_Reproduction_P Parameter: Treatment Value: Drought vs. No Drought
gcaacacaaaaacatacacactactaataaaccatgaagcttcttatgctcgcctttgtttttctattagctttggcgacttgtaaaggtgacgagtttgtttgtgaagagaacgagccattcacatgtaaccaaactaaacttttcaacagtggcaatttcgaaaaaggcttcatcttcggtgttgcatcttctgcttaccaggtggaaggcggtagaggccgtggacttaacgtttgggatagcttcactcaccgattcccagagaaaggtggagctgatttgggaaatggagacactacttgtgactcatatactctttggcagaaagatatagacgtgatggacgagctcaactctactggctacagattctccattgcgtggtcaagactccttccaaaaggaaagaggagcaggggagtgaacccaggagctattaagtactacaacggtctcatagatggcctcgtcgcaaagaatatgacgccctttgttaccctctttcattgggaccttcctcaaacactacaagatgaatataacggtttcttgaacaaaacgatcgtagacgatttcaaggattacgcggatctatgtttcgagttatttggtgatagggtaaagaactggatcaccatcaaccagctatacacagtgcctactagaggatatgcattgggaacagatgcacccggtcgatgttctcctaagattgacgttagatgtcccggcggaaattcgtcaacagaaccctatattgttgcacataaccagcttcttgctcatgcagcggccgttgatgtttacaggacgaaatataaggatgaccaaaaaggtatgattggaccagtgatgataactagatggtttcttccatttgatcatagtcaagagagcaaagatgcaactgagcgggctaaaatatttttccatggatggttcatggggcctctaacagaaggtaaatacccagacatcatgagggaatatgttggtgatcggcttccagagttcagtgaaacagaagccgcacttgtaaagggttcatatgattttcttggtctcaactattacgtcactcaatacgcccaaaataatcagacgattgttccttcggacgtacacactgccttgatggactcacgcacaactctcacatctaaaaatgcaactggtcatgctcctggtccaccgttcaatgcagccagttactactacccaaaaggcatttactacgtaatggattacttcaaaaccacttacggtgaccctttaatatatgtcactgagaatggatttagtaccccaggtgatgaggactttgagaaggctactgccgattacaagcggattgattatctctgtagtcatctctgtttcctcagtaaagtcatcaaggagaagaatgtcaacgtgaaaggatattttgcttggtctcttggggataattacgaattctgtaacggatttaccgtcagattcggactaagttacgttgatttcgcaaatatcactggtgatagagacctcaaagcatctggcaaatggttccagaagttcataaacgttaccgacgaagactctacgaaccaagatctactccgctcaagcgtctcctccaagaaccgtgatcggaagagtcttgcagatgcatgaaatatccaatccactatatgtccaccaagatcatcttcatgtttcctctttctacttgctccatagataaggagctttttctaccatatgtattaaaataaaatcctaataaaagatgatcaataataataaagactttgtttact

SEQ ID NO: 79202 - protein, 541 aa, Arabidopsis thaliana; identical to SEQ ID NO: 23715
  peptide (1)..(541): Ceres Seq. ID no. 12649851
  misc_feature (1)..(541): Homolog of NCBI NO: 30690085 NR Description: glycosyl hydrolase family 1, myrosinase precursor thaliana] >gi|585536|sp|P37702|MYRO_ARATH Myrosinase precursor
  misc_feature (1)..(541): Homolog of NCBI NO: 16648811 NR Description: AT5g26000/T1N24_7 [Arabidopsis thaliana]
  misc_feature (1)..(541): Homolog of NCBI NO: 15809938 NR Description: AT5g26000/T1N24_7 [Arabidopsis thaliana]
  misc_feature (1)..(456): Homolog of NCBI NO: 30690089 NR Description: glycosyl hydrolase family 1, myrosinase precursor
  misc_feature (1)..(538): Homolog of NCBI NO: 18420974 NR Description: glycosyl hydrolase family 1; protein id: supported by cDNA: gi_13507564, supported by cDNA: gi_21280812 thaliana] >gi|13507565|gb|AAK28645.1|AF360348_1 putative
  misc_feature (1)..(538): Homolog of NCBI NO: 1362007 NR Description: thioglucosidase (EC 3.2.1.147) 2 - Arabidopsis >gi|871992|emb|CAA55787.1| thioglucosidase [Arabidopsis thaliana]
  misc_feature (1)..(541): Homolog of NCBI NO: 127733 NR Description: Myrosinase precursor (Sinigrinase)
  misc_feature (1)..(538): Homolog of NCBI NO: 13605680 NR Description: AT5g25980/T1N24_18 [Arabidopsis thaliana]
  misc_feature (2)..(538): Homolog of NCBI NO: 27261134 NR Description: carboxypeptidase Y/myrosinase fusion protein
  misc_feature (1)..(541): Homolog of NCBI NO: 11034736 NR Description: myrosinase [Raphanus sativus]

SEQ ID NO: 79203 - protein, 537 aa, Arabidopsis thaliana; identical to SEQ ID NO: 23716
  peptide (1)..(537): Ceres Seq. ID no. 12649852
  misc_feature (1)..(537): Homolog of NCBI NO: 30690085 NR Description: glycosyl hydrolase family 1, myrosinase precursor thaliana] >gi|585536|sp|P37702|MYRO_ARATH Myrosinase precursor
  misc_feature (1)..(537): Homolog of NCBI NO: 16648811 NR Description: AT5g26000/T1N24_7 [Arabidopsis thaliana]
  misc_feature (1)..(537): Homolog of NCBI NO: 15809938 NR Description: AT5g26000/T1N24_7 [Arabidopsis thaliana]
  misc_feature (1)..(452): Homolog of NCBI NO: 30690089 NR Description: glycosyl hydrolase family 1, myrosinase precursor
  misc_feature (1)..(534): Homolog of NCBI NO: 18420974 NR Description: glycosyl hydrolase family 1; protein id: supported by cDNA: gi_13507564, supported by cDNA: gi_21280812 thaliana] >gi|13507565|gb|AAK28645.1|AF360348_1 putative
  misc_feature (1)..(534): Homolog of NCBI NO: 1362007 NR Description: thioglucosidase (EC 3.2.1.147) 2 - Arabidopsis >gi|871992|emb|CAA55787.1| thioglucosidase [Arabidopsis thaliana]
  misc_feature (1)..(537): Homolog of NCBI NO: 127733 NR Description: Myrosinase precursor (Sinigrinase)
  misc_feature (1)..(534): Homolog of NCBI NO: 13605680 NR Description: AT5g25980/T1N24_18 [Arabidopsis thaliana]
  misc_feature (1)..(534): Homolog of NCBI NO: 27261134 NR Description: carboxypeptidase Y/myrosinase fusion protein
  misc_feature (1)..(537): Homolog of NCBI NO: 11034736 NR Description: myrosinase [Raphanus sativus]

SEQ ID NO: 79204 - protein, 438 aa, Arabidopsis thaliana; identical to SEQ ID NO: 23717
  peptide (1)..(438): Ceres Seq. ID no. 12649853
  misc_feature (1)..(438): Homolog of NCBI NO: 30690085 NR Description: glycosyl hydrolase family 1, myrosinase precursor thaliana] >gi|585536|sp|P37702|MYRO_ARATH Myrosinase precursor
  misc_feature (1)..(438): Homolog of NCBI NO: 16648811 NR Description: AT5g26000/T1N24_7 [Arabidopsis thaliana]
  misc_feature (1)..(438): Homolog of NCBI NO: 15809938 NR Description: AT5g26000/T1N24_7 [Arabidopsis thaliana]
  misc_feature (1)..(353): Homolog of NCBI NO: 30690089 NR Description: glycosyl hydrolase family 1, myrosinase precursor
  misc_feature (1)..(435): Homolog of NCBI NO: 18420974 NR Description: glycosyl hydrolase family 1; protein id: supported by cDNA: gi_13507564, supported by cDNA: gi_21280812 thaliana] >gi|13507565|gb|AAK28645.1|AF360348_1 putative
  misc_feature (1)..(435): Homolog of NCBI NO: 1362007 NR Description: thioglucosidase (EC 3.2.1.147) 2 - Arabidopsis >gi|871992|emb|CAA55787.1| thioglucosidase [Arabidopsis thaliana]
  misc_feature (1)..(438): Homolog of NCBI NO: 127733 NR Description: Myrosinase precursor (Sinigrinase)
  misc_feature (1)..(435): Homolog of NCBI NO: 13605680 NR Description: AT5g25980/T1N24_18 [Arabidopsis thaliana]
  misc_feature (1)..(435): Homolog of NCBI NO: 27261134 NR Description: carboxypeptidase Y/myrosinase fusion protein
  misc_feature (1)..(438): Homolog of NCBI NO: 11034736 NR Description: myrosinase [Raphanus sativus]

SEQ ID NO: 79205 - DNA, 1483 bp, Arabidopsis thaliana
  misc_feature (1)..(1483): Ceres Seq. ID no. 12649903
  misc_feature: MA Experiment ID: 108434 Result: Up-regulated in Transcription
  misc_feature: MA Experiment 108434 PARAMETER Experiment Name: At_Root_Tips_cDNA_P Parameter: Tissue Value: Root Tips
  misc_feature: MA Experiment ID: 108435 Result: Up-regulated in Transcription
  misc_feature: MA Experiment 108435 PARAMETER Experiment Name: At_stm_Mutants_cDNA_P Parameter: Plant Line Value: wt Landsburg vs stm
  misc_feature: MA Experiment 108435 PARAMETER Experiment Name: At_stm_Mutants_cDNA_P Parameter: Tissue Value: Shoot Apical Meristem Region
  misc_feature: MA Experiment ID: 108462 Result: Down-regulated in Transcription
  misc_feature: MA Experiment 108462 PARAMETER Experiment Name: At_Germinating_Seeds_cDNA_P Parameter: Age (day) Value: 2 vs. 0
  misc_feature: MA Experiment 108462 PARAMETER Experiment Name: At_Germinating_Seeds_cDNA_P Parameter: Tissue Value: Germinating Seeds
  misc_feature: MA Experiment ID: 108463 Result: Down-regulated in Transcription
  misc_feature: MA Experiment 108463 PARAMETER Experiment Name: At_Germinating_Seeds_cDNA_P Parameter: Age (day) Value: 3 vs. 0
  misc_feature: MA Experiment 108463 PARAMETER Experiment Name: At_Germinating_Seeds_cDNA_P Parameter: Tissue Value: Germinating Seeds
  misc_feature: MA Experiment ID: 108464 Result: Down-regulated in Transcription
  misc_feature: MA Experiment 108464 PARAMETER Experiment Name: At_Germinating_Seeds_cDNA_P Parameter: Age (day) Value: 4 vs. 0
  misc_feature: MA Experiment 108464 PARAMETER Experiment Name: At_Germinating_Seeds_cDNA_P Parameter: Tissue Value: Germinating Seeds
  misc_feature: MA Experiment ID: 108469 Result: Up-regulated in Transcription
  misc_feature: MA Experiment ID: 108576 Result: Up-regulated in Transcription
  misc_feature: MA Experiment 108576 PARAMETER Experiment Name: At_42deg_Heat_cDNA_P Parameter: Temperature (deg C) Value: 42 vs. 22
  misc_feature: MA Experiment 108576 PARAMETER Experiment Name: At_42deg_Heat_cDNA_P Parameter: Timepoint (hr) Value: 1
  misc_feature: MA Experiment 108576 PARAMETER Experiment Name: At_42deg_Heat_cDNA_P Parameter: Tissue Value: Aerial
  misc_feature: MA Experiment ID: 108577 Result: Up-regulated in Transcription
  misc_feature: MA Experiment 108577 PARAMETER Experiment Name: At_42deg_Heat_cDNA_P Parameter: Temperature (deg C) Value: 42 vs. 22
  misc_feature: MA Experiment 108577 PARAMETER Experiment Name: At_42deg_Heat_cDNA_P Parameter: Timepoint (hr) Value: 6
  misc_feature: MA Experiment 108577 PARAMETER Experiment Name: At_42deg_Heat_cDNA_P Parameter: Tissue Value: Aerial
  misc_feature: MA Experiment ID: 108585 Result: Up-regulated in Transcription
  misc_feature: MA Experiment 108585 PARAMETER Experiment Name: At_5mM_NaNP_cDNA_P Parameter: Timepoint (hr) Value: 6
  misc_feature: MA Experiment 108585 PARAMETER Experiment Name: At_5mM_NaNP_cDNA_P Parameter: Tissue Value: Aerial
  misc_feature: MA Experiment 108585 PARAMETER Experiment Name: At_5mM_NaNP_cDNA_P Parameter: Treatment Value: null
  misc_feature: MA Experiment ID: 108668 Result: Up-regulated in Transcription
  misc_feature: MA Experiment 108668 PARAMETER Experiment Name: At_2mM_SA_cDNA_P Parameter: Plant Line Value: WS
  misc_feature: MA Experiment 108668 PARAMETER Experiment Name: At_2mM_SA_cDNA_P Parameter: Timepoint (hr) Value: 6
  misc_feature: MA Experiment 108668 PARAMETER Experiment Name: At_2mM_SA_cDNA_P Parameter: Treatment Value: 2mM SA vs. No Treatment
  misc_feature: MA Experiment ID: 20000093 Result: Up-regulated in Transcription
  misc_feature: MA Experiment 20000093 PARAMETER Experiment Name: At_42deg_Heat_cDNA_P Parameter: Temperature (deg C) Value: 42 vs. 22
  misc_feature: MA Experiment 20000093 PARAMETER Experiment Name: At_42deg_Heat_cDNA_P Parameter: Timepoint (hr) Value: 0.5
  misc_feature: MA Experiment 20000093 PARAMETER Experiment Name: At_42deg_Heat_cDNA_P Parameter: Tissue Value: Aerial
  misc_feature: MA Experiment ID: 20000111 Result: Up-regulated in Transcription
  misc_feature: MA Experiment 20000111 PARAMETER Experiment Name: At_42deg_Heat_cDNA_P Parameter: Temperature (deg C) Value: 42 vs. 22
  misc_feature: MA Experiment 20000111 PARAMETER Experiment Name: At_42deg_Heat_cDNA_P Parameter: Timepoint (hr) Value: 6
  misc_feature: MA Experiment 20000111 PARAMETER Experiment Name: At_42deg_Heat_cDNA_P Parameter: Tissue Value: Aerial
  misc_feature: MA Experiment ID: 20000112 Result: Up-regulated in Transcription
  misc_feature: MA Experiment 20000112 PARAMETER Experiment Name: At_42deg_Heat_cDNA_P Parameter: Temperature (deg C) Value: 42 vs. 22
  misc_feature: MA Experiment 20000112 PARAMETER Experiment Name: At_42deg_Heat_cDNA_P Parameter: Timepoint (hr) Value: 2
  misc_feature: MA Experiment 20000112 PARAMETER Experiment Name: At_42deg_Heat_cDNA_P Parameter: Tissue Value: Aerial
  misc_feature: MA Experiment ID: 20000113 Result: Up-regulated in Transcription
  misc_feature: MA Experiment 20000113 PARAMETER Experiment Name: At_42deg_Heat_cDNA_P Parameter: Temperature (deg C) Value: 42 vs. 22
  misc_feature: MA Experiment 20000113 PARAMETER Experiment Name: At_42deg_Heat_cDNA_P Parameter: Timepoint (hr) Value: 8
  misc_feature: MA Experiment 20000113 PARAMETER Experiment Name: At_42deg_Heat_cDNA_P Parameter: Tissue Value: Aerial
  misc_feature: MA Experiment ID: 20000144 Result: Up-regulated in Transcription
  misc_feature: MA Experiment 20000144 PARAMETER Experiment Name: At_42deg_Heat_cDNA_P Parameter: Temperature (deg C) Value: 42 vs. 22
  misc_feature: MA Experiment 20000144 PARAMETER Experiment Name: At_42deg_Heat_cDNA_P Parameter: Timepoint (hr) Value: 1
  misc_feature: MA Experiment 20000144 PARAMETER Experiment Name: At_42deg_Heat_cDNA_P Parameter: Tissue Value: Aerial
  misc_feature: MA Experiment ID: 20000171 Result: Up-regulated in Transcription
  misc_feature: MA Experiment 20000171 PARAMETER Experiment Name: At_42deg_Heat_P Parameter: Age (day) Value: 14
  misc_feature: MA Experiment 20000171 PARAMETER Experiment Name: At_42deg_Heat_P Parameter: Organism Value: A. thaliana
  misc_feature: MA Experiment 20000171 PARAMETER Experiment Name: At_42deg_Heat_P Parameter: Plant Line Value: WS
  misc_feature: MA Experiment 20000171 PARAMETER Experiment Name: At_42deg_Heat_P Parameter: Temperature (deg C) Value: 42 vs. 22
  misc_feature: MA Experiment 20000171 PARAMETER Experiment Name: At_42deg_Heat_P Parameter: Timepoint (hr) Value: 1
  misc_feature: MA Experiment 20000171 PARAMETER Experiment Name: At_42deg_Heat_P Parameter: Tissue Value: Aerial
  misc_feature: MA Experiment ID: 20000173 Result: Up-regulated in Transcription
  misc_feature: MA Experiment 20000173 PARAMETER Experiment Name: At_42deg_Heat_P Parameter: Age (day) Value: 14
  misc_feature: MA Experiment 20000173 PARAMETER Experiment Name: At_42deg_Heat_P Parameter: Organism Value: A. thaliana
  misc_feature: MA Experiment 20000173 PARAMETER Experiment Name: At_42deg_Heat_P Parameter: Plant Line Value: WS
  misc_feature: MA Experiment 20000173 PARAMETER Experiment Name: At_42deg_Heat_P Parameter: Temperature (deg C) Value: 42 vs. 22
  misc_feature: MA Experiment 20000173 PARAMETER Experiment Name: At_42deg_Heat_P Parameter: Timepoint (hr) Value: 6
  misc_feature: MA Experiment 20000173 PARAMETER Experiment Name: At_42deg_Heat_P Parameter: Tissue Value: Aerial
  misc_feature: MA Experiment ID: 20000182 Result: Up-regulated in Transcription
  misc_feature: MA Experiment 20000182 PARAMETER Experiment Name: At_2mM_SA_P Parameter: Age (day) Value: 14
  misc_feature: MA Experiment 20000182 PARAMETER Experiment Name: At_2mM_SA_P Parameter: Organism Value: A. thaliana
  misc_feature: MA Experiment 20000182 PARAMETER Experiment Name: At_2mM_SA_P Parameter: Plant Line Value: WS
  misc_feature: MA Experiment 20000182 PARAMETER Experiment Name: At_2mM_SA_P Parameter: Timepoint (hr) Value: 6
  misc_feature: MA Experiment 20000182 PARAMETER Experiment Name: At_2mM_SA_P Parameter: Tissue Value: Aerial
  misc_feature: MA Experiment 20000182 PARAMETER Experiment Name: At_2mM_SA_P Parameter: Treatment Value: 2mM SA vs. No Treatment
  misc_feature: MA Experiment ID: 20000443 Result: Up-regulated in Transcription
  misc_feature: MA Experiment 20000443 PARAMETER Experiment Name: At_1uM_BR-BRZ__P Parameter: Tissue Value: Shoot Apices
  misc_feature: MA Experiment 20000443 PARAMETER Experiment Name: At_1uM_BR-BRZ__P Parameter: Treatment Value: 1uM BRZ vs. No Treatment
  misc_feature: MA Experiment ID: 20001248 Result: Down-regulated in Transcription
  misc_feature: MA Experiment 20001248 PARAMETER Experiment Name: At_Far-red-induction_P Parameter: Age (day) Value: 7
  misc_feature: MA Experiment 20001248 PARAMETER Experiment Name: At_Far-red-induction_P Parameter: Light Value: Far-red vs. White
  misc_feature: MA Experiment 20001248 PARAMETER Experiment Name: At_Far-red-induction_P Parameter: Organism Value: A. thaliana
  misc_feature: MA Experiment 20001248 PARAMETER Experiment Name: At_Far-red-induction_P Parameter: Plant Line Value: Columbia
  misc_feature: MA Experiment 20001248 PARAMETER Experiment Name: At_Far-red-induction_P Parameter: Timepoint (hr) Value: 4
  misc_feature: MA Experiment 20001248 PARAMETER Experiment Name: At_Far-red-induction_P Parameter: Tissue Value: Whole Plant
  misc_feature: MA Experiment ID: 20001450 Result: Down-regulated in Transcription
  misc_feature: MA Experiment 20001450 PARAMETER Experiment Name: At_Far-red-induction_P Parameter: Age (day) Value: 7
  misc_feature: MA Experiment 20001450 PARAMETER Experiment Name: At_Far-red-induction_P Parameter: Light Value: Far-red vs. White
  misc_feature: MA Experiment 20001450 PARAMETER Experiment Name: At_Far-red-induction_P Parameter: Organism Value: A. thaliana
  misc_feature: MA Experiment 20001450 PARAMETER Experiment Name: At_Far-red-induction_P Parameter: Plant Line Value: Columbia
  misc_feature: MA Experiment 20001450 PARAMETER Experiment Name: At_Far-red-induction_P Parameter: Timepoint (hr) Value: 8
  misc_feature: MA Experiment 20001450 PARAMETER Experiment Name: At_Far-red-induction_P Parameter: Tissue Value: Whole Plant
  misc_feature: MA Experiment ID: 20001557 Result: Up-regulated in Transcription
  misc_feature: MA Experiment 20001557 PARAMETER Experiment Name: At_Drought_Soil_Dry_P Parameter: Age (day) Value: 27
  misc_feature: MA Experiment 20001557 PARAMETER Experiment Name: At_Drought_Soil_Dry_P Parameter: Organism Value: A. thaliana
  misc_feature: MA Experiment 20001557 PARAMETER Experiment Name: At_Drought_Soil_Dry_P Parameter: Plant Line Value: WS
  misc_feature: MA Experiment 20001557 PARAMETER Experiment Name: At_Drought_Soil_Dry_P Parameter: Post Timepoint (hr) Value: 3
  misc_feature: MA Experiment 20001557 PARAMETER Experiment Name: At_Drought_Soil_Dry_P Parameter: Post-Treatment Value: Re-Water vs. No Drought
  misc_feature: MA Experiment 20001557 PARAMETER Experiment Name: At_Drought_Soil_Dry_P Parameter: Timepoint (day) Value: 13
  misc_feature: MA Experiment 20001557 PARAMETER Experiment Name: At_Drought_Soil_Dry_P Parameter: Treatment Value: Drought vs. No Drought
acaacattctccttctccttctcctcgtgaagacttttctctctgtttattttttttagggttttcgtaagaacagagcaaaaaacatgtttggaagaggaccttcaaggaagagcgataacacaaagttctacgagatccttggtgttcctaagaccgcagcaccagaagatctcaagaaagcttataagaaagccgctatcaaaaaccatcctgataagggtggtgatcccgaaaagtttaaagagttagcacaggcttatgaagttttaagtgatcctgagaagcgtgagatctatgatcaatatggggaagatgcactcaaggaaggaatgggtggtggaggtggtggacacgatccatttgatatcttctcttccttctttggtagtggtggacacccattcggaagtcatagccggggaaggaggcagaggcgtggtgaagatgttgttcatcccttgaaggtttccttagaggatgtttatctcggaacaacaaagaagctctcactttctaggaaggctttgtgctcaaagtgtaacggcaagggttcaaagtctggagcttcaatgaaatgtggtggctgtcaaggttcgggaatgaagatctcgatcaggcagtttggacctggaatgatgcagcaggtgcagcatgcttgtaatgattgcaaaggcacaggagagaccatcaatgatcgggacaggtgtccacaatgcaaaggagagaaggttgtctctgagaagaaggtgcttgaagtaaatgtggagaagggaatgcaacacaatcagaagatcacattcagtggacaagccgatgaagcgcctgatactgtcaccggagatatagtgtttgtcattcagcagaaggagcacccaaagttcaaaagaaagggtgaggatctctttgtggagcacaccatctctctaaccgaggccttgtgtggcttccagtttgtcttgacccatttggacaaaagacagcttctcatcaaatccaagcccggagaggtcgtcaaacctgattcatacaaggcgataagtgatgagggaatgccaatataccaaaggccgttcatgaagggtaagctatacattcacttcacggttgaattcccggaatcgctgagcccggatcagacaaaggccattgaagcagttttgccaaagccaaccaaggcagctataagcgatatggaaatagacgactgcgaagagacgactctgcatgatgtgaacattgaggatgagatgaaaaggaaggcgcaagctcaaagagaggcttatgatgacgatgaggaagatcacccaggcggtgctcagcgtgtgcaatgtgcccagcagtgatcaacatgcgcatcttagtgatctccaatatttgcttctgtcttttctccttttcattgtattatttttgggtctttttatagactttgccaattcagtgggaagaacctcgtcctaattcaaatccttgttacacc

SEQ ID NO: 79206 - protein, 419 aa, Arabidopsis thaliana; identical to SEQ ID NO: 26877
  peptide (1)..(419): Ceres Seq. ID no. 12649904
  misc_feature (235)..(359): Pfam Name: DnaJ C terminal region Pfam Description: DnaJ C terminal region
  misc_feature (1)..(419): Homolog of NCBI NO: 18420428 NR Description: Expressed protein; protein id: At5g22060.1, by cDNA: gi_535587 [Arabidopsis thaliana] DnaJ protein homolog ATJ2 >gi|13374865|emb|CAC34499.1| DNAJ
  misc_feature (1)..(419): Homolog of NCBI NO: 535588 NR Description: putative [Arabidopsis thaliana]
  misc_feature (1)..(419): Homolog of NCBI NO: 15229874 NR Description: dnaJ protein homolog atj3; protein id: supported by cDNA: 40976., supported by cDNA: gi_14334827, by cDNA: gi_15010707, supported by cDNA: gi_1872162, supported by
  misc_feature (1)..(419): Homolog of NCBI NO: 2129577 NR Description: dnaJ protein homolog atj3 - Arabidopsis thaliana
  misc_feature (1)..(419): Homolog of NCBI NO: 15010708 NR Description: AT3g44110/F26G5_60 [Arabidopsis thaliana]

SEQ ID NO: 79207 - protein, 337 aa, Arabidopsis thaliana; identical to SEQ ID NO: 26878
  peptide (1)..(337): Ceres Seq. ID no. 12649905
  misc_feature (153)..(277): Pfam Name: DnaJ C terminal region Pfam Description: DnaJ C terminal region
  misc_feature (1)..(337): Homolog of NCBI NO: 18420428 NR Description: Expressed protein; protein id: At5g22060.1, by cDNA: gi_535587 [Arabidopsis thaliana] DnaJ protein homolog ATJ2 >gi|13374865|emb|CAC34499.1| DNAJ
  misc_feature (1)..(337): Homolog of NCBI NO: 535588 NR Description: putative [Arabidopsis thaliana]
  misc_feature (1)..(337): Homolog of NCBI NO: 15229874 NR Description: dnaJ protein homolog atj3; protein id: supported by cDNA: 40976., supported by cDNA: gi_14334827, by cDNA: gi_15010707, supported by cDNA: gi_1872162, supported by
  misc_feature (1)..(337): Homolog of NCBI NO: 2129577 NR Description: dnaJ protein homolog atj3 - Arabidopsis thaliana
  misc_feature (1)..(337): Homolog of NCBI NO: 15010708 NR Description: AT3g44110/F26G5_60 [Arabidopsis thaliana]

SEQ ID NO: 79208 - protein, 257 aa, Arabidopsis thaliana; identical to SEQ ID NO: 26879
  peptide (1)..(257): Ceres Seq. ID no. 12649906
  misc_feature (73)..(197): Pfam Name: DnaJ C terminal region Pfam Description: DnaJ C terminal region
  misc_feature (1)..(257): Homolog of NCBI NO: 18420428 NR Description: Expressed protein; protein id: At5g22060.1, by cDNA: gi_535587 [Arabidopsis thaliana] DnaJ protein homolog ATJ2 >gi|13374865|emb|CAC34499.1| DNAJ
  misc_feature (1)..(257): Homolog of NCBI NO: 535588 NR Description: putative [Arabidopsis thaliana]
  misc_feature (1)..(257): Homolog of NCBI NO: 15229874 NR Description: dnaJ protein homolog atj3; protein id: supported by cDNA: 40976., supported by cDNA: gi_14334827, by cDNA: gi_15010707, supported by cDNA: gi_1872162, supported by
  misc_feature (1)..(257): Homolog of NCBI NO: 2129577 NR Description: dnaJ protein homolog atj3 - Arabidopsis thaliana
  misc_feature (1)..(257): Homolog of NCBI NO: 15010708 NR Description: AT3g44110/F26G5_60 [Arabidopsis thaliana]

SEQ ID NO: 79209 - DNA, 1410 bp, Arabidopsis thaliana
  misc_feature (1)..(1410): Ceres Seq. ID no. 12650066
  misc_feature: MA Experiment ID: 20000171 Result: Down-regulated in Transcription
  misc_feature: MA Experiment 20000171 PARAMETER Experiment Name: At_42deg_Heat_P Parameter: Age (day) Value: 14
  misc_feature: MA Experiment 20000171 PARAMETER Experiment Name: At_42deg_Heat_P Parameter: Organism Value: A. thaliana
  misc_feature: MA Experiment 20000171 PARAMETER Experiment Name: At_42deg_Heat_P Parameter: Plant Line Value: WS
  misc_feature: MA Experiment 20000171 PARAMETER Experiment Name: At_42deg_Heat_P Parameter: Temperature (deg C) Value: 42 vs. 22
  misc_feature: MA Experiment 20000171 PARAMETER Experiment Name: At_42deg_Heat_P Parameter: Timepoint (hr) Value: 1
  misc_feature: MA Experiment 20000171 PARAMETER Experiment Name: At_42deg_Heat_P Parameter: Tissue Value: Aerial
  misc_feature: MA Experiment ID: 20000184 Result: Down-regulated in Transcription
  misc_feature: MA Experiment 20000184 PARAMETER Experiment Name: At_Shoots__P Parameter: Age (day) Value: 7
  misc_feature: MA Experiment 20000184 PARAMETER Experiment Name: At_Shoots__P Parameter: Tissue Value: Shoots vs. Whole Plant
  misc_feature: MA Experiment ID: 20000234 Result: Down-regulated in Transcription
  misc_feature: MA Experiment 20000234 PARAMETER Experiment Name: At_Siliques_P Parameter: Age (day) Value: 21
  misc_feature: MA Experiment 20000234 PARAMETER Experiment Name: At_Siliques_P Parameter: Organism Value: A. thaliana
  misc_feature: MA Experiment 20000234 PARAMETER Experiment Name: At_Siliques_P Parameter: Plant Line Value: WS
  misc_feature: MA Experiment 20000234 PARAMETER Experiment Name: At_Siliques_P Parameter: Tissue Value: Less Than 5mm Siliques vs. Whole Plant
  misc_feature: MA Experiment ID: 20000235 Result: Down-regulated in Transcription
  misc_feature: MA Experiment 20000235 PARAMETER Experiment Name: At_Siliques_P Parameter: Age (day) Value: 21
  misc_feature: MA Experiment 20000235 PARAMETER Experiment Name: At_Siliques_P Parameter: Organism Value: A. thaliana
  misc_feature: MA Experiment 20000235 PARAMETER Experiment Name: At_Siliques_P Parameter: Plant Line Value: WS
  misc_feature: MA Experiment 20000235 PARAMETER Experiment Name: At_Siliques_P Parameter: Tissue Value: 5-10mm Siliques vs. Whole Plant
  misc_feature: MA Experiment ID: 20000264 Result: Down-regulated in Transcription
  misc_feature: MA Experiment 20000264 PARAMETER Experiment Name: At_Open_Flower_P Parameter: Age (day) Value: 21
  misc_feature: MA Experiment 20000264 PARAMETER Experiment Name: At_Open_Flower_P Parameter: Plant Line Value: WS
  misc_feature: MA Experiment 20000264 PARAMETER Experiment Name: At_Open_Flower_P Parameter: Tissue Value: Open Flower vs. Whole Plant
  misc_feature: MA Experiment ID: 20000265 Result: Down-regulated in Transcription
  misc_feature: MA Experiment 20000265 PARAMETER Experiment Name: At_Open_Flower_P Parameter: Age (day) Value: 21
  misc_feature: MA Experiment 20000265 PARAMETER Experiment Name: At_Open_Flower_P Parameter: Plant Line Value: WS
  misc_feature: MA Experiment 20000265 PARAMETER Experiment Name: At_Open_Flower_P Parameter: Tissue Value: Closed Flower vs. Whole Plant
  misc_feature: MA Experiment ID: 20000268 Result: Down-regulated in Transcription
  misc_feature: MA Experiment 20000268 PARAMETER Experiment Name: At_100mM_NaCl__P Parameter: Age (day) Value: 14
  misc_feature: MA Experiment 20000268 PARAMETER Experiment Name: At_100mM_NaCl__P Parameter: Organism Value: A. thaliana
  misc_feature: MA Experiment 20000268 PARAMETER Experiment Name: At_100mM_NaCl__P Parameter: Plant Line Value: WS
  misc_feature: MA Experiment 20000268 PARAMETER Experiment Name: At_100mM_NaCl__P Parameter: Timepoint (hr) Value: 6
  misc_feature: MA Experiment 20000268 PARAMETER Experiment Name: At_100mM_NaCl__P Parameter: Tissue Value: Whole Plant
  misc_feature: MA Experiment 20000268 PARAMETER Experiment Name: At_100mM_NaCl__P Parameter: Treatment Value: 100mM NaCl vs. No Treatment
  misc_feature: MA Experiment ID: 20000437 Result: Down-regulated in Transcription
  misc_feature: MA Experiment 20000437 PARAMETER Experiment Name: At_Drought_P Parameter: Age (day) Value: 8
  misc_feature: MA Experiment 20000437 PARAMETER Experiment Name: At_Drought_P Parameter: Organism Value: A. thaliana
  misc_feature: MA Experiment 20000437 PARAMETER Experiment Name: At_Drought_P Parameter: Plant Line Value: WS
  misc_feature: MA Experiment 20000437 PARAMETER Experiment Name: At_Drought_P Parameter: Timepoint (hr) Value: 24
  misc_feature: MA Experiment 20000437 PARAMETER Experiment Name: At_Drought_P Parameter: Tissue Value: Whole Plant
  misc_feature: MA Experiment 20000437 PARAMETER Experiment Name: At_Drought_P Parameter: Treatment Value: Drought vs. No Drought
  misc_feature: MA Experiment ID: 20000439 Result: Down-regulated in Transcription
  misc_feature: MA Experiment 20000439 PARAMETER Experiment Name: At_Roots__P Parameter: Age (day) Value: 14 vs. 21
  misc_feature: MA Experiment 20000439 PARAMETER Experiment Name: At_Roots__P Parameter: Organism Value: A. thaliana
  misc_feature: MA Experiment 20000439 PARAMETER Experiment Name: At_Roots__P Parameter: Tissue Value: Roots vs. Whole Plant
  misc_feature: MA Experiment ID: 20001247 Result: Up-regulated in Transcription
  misc_feature: MA Experiment 20001247 PARAMETER Experiment Name: At_Far-red-induction_P Parameter: Age (day) Value: 7
  misc_feature: MA Experiment 20001247 PARAMETER Experiment Name: At_Far-red-induction_P Parameter: Light Value: Far-red vs. White
  misc_feature: MA Experiment 20001247 PARAMETER Experiment Name: At_Far-red-induction_P Parameter: Organism Value: A. thaliana
  misc_feature: MA Experiment 20001247 PARAMETER Experiment Name: At_Far-red-induction_P Parameter: Plant Line Value: Columbia
  misc_feature: MA Experiment 20001247 PARAMETER Experiment Name: At_Far-red-induction_P Parameter: Timepoint (hr) Value: 1
  misc_feature: MA Experiment 20001247 PARAMETER Experiment Name: At_Far-red-induction_P Parameter: Tissue Value: Whole Plant
  misc_feature: MA Experiment ID: 20001248 Result: Up-regulated in Transcription
  misc_feature: MA Experiment 20001248 PARAMETER Experiment Name: At_Far-red-induction_P Parameter: Age (day) Value: 7
  misc_feature: MA Experiment 20001248 PARAMETER Experiment Name: At_Far-red-induction_P Parameter: Light Value: Far-red vs. White
  misc_feature: MA Experiment 20001248 PARAMETER Experiment Name: At_Far-red-induction_P Parameter: Organism Value: A. thaliana
  misc_feature: MA Experiment 20001248 PARAMETER Experiment Name: At_Far-red-induction_P Parameter: Plant Line Value: Columbia
  misc_feature: MA Experiment 20001248 PARAMETER Experiment Name: At_Far-red-induction_P Parameter: Timepoint (hr) Value: 4
  misc_feature: MA Experiment 20001248 PARAMETER Experiment Name: At_Far-red-induction_P Parameter: Tissue Value: Whole Plant
  misc_feature: MA Experiment ID: 20001450 Result: Up-regulated in Transcription
  misc_feature: MA Experiment 20001450 PARAMETER Experiment Name: At_Far-red-induction_P Parameter: Age (day) Value: 7
  misc_feature: MA Experiment 20001450 PARAMETER Experiment Name: At_Far-red-induction_P Parameter: Light Value: Far-red vs. White
  misc_feature: MA Experiment 20001450 PARAMETER Experiment Name: At_Far-red-induction_P Parameter: Organism Value: A. thaliana
  misc_feature: MA Experiment 20001450 PARAMETER Experiment Name: At_Far-red-induction_P Parameter: Plant Line Value: Columbia
  misc_feature: MA Experiment 20001450 PARAMETER Experiment Name: At_Far-red-induction_P Parameter: Timepoint (hr) Value: 8
  misc_feature: MA Experiment 20001450 PARAMETER Experiment Name: At_Far-red-induction_P Parameter: Tissue Value: Whole Plant
  misc_feature: MA Experiment ID: 20001451 Result: Up-regulated in Transcription
  misc_feature: MA Experiment 20001451 PARAMETER Experiment Name: At_Far-red-induction_P Parameter: Age (day) Value: 7
  misc_feature: MA Experiment 20001451 PARAMETER Experiment Name: At_Far-red-induction_P Parameter: Light Value: Far-red vs. White
  misc_feature: MA Experiment 20001451 PARAMETER Experiment Name: At_Far-red-induction_P Parameter: Organism Value: A. thaliana
  misc_feature: MA Experiment 20001451 PARAMETER Experiment Name: At_Far-red-induction_P Parameter: Plant Line Value: Columbia
  misc_feature: MA Experiment 20001451 PARAMETER Experiment Name: At_Far-red-induction_P Parameter: Timepoint (hr) Value: 24
  misc_feature: MA Experiment 20001451 PARAMETER Experiment Name: At_Far-red-induction_P Parameter: Tissue Value: Whole Plant
  misc_feature: MA Experiment ID: 20001554 Result: Down-regulated in Transcription
  misc_feature: MA Experiment 20001554 PARAMETER Experiment Name: At_Drought_Soil_Dry_P Parameter: Age (day) Value: 21
  misc_feature: MA Experiment 20001554 PARAMETER Experiment Name: At_Drought_Soil_Dry_P Parameter: Organism Value: A. thaliana
  misc_feature: MA Experiment 20001554 PARAMETER Experiment Name: At_Drought_Soil_Dry_P Parameter: Plant Line Value: WS
  misc_feature: MA Experiment 20001554 PARAMETER Experiment Name: At_Drought_Soil_Dry_P Parameter: Post Timepoint (hr) Value: None
  misc_feature: MA Experiment 20001554 PARAMETER Experiment Name: At_Drought_Soil_Dry_P Parameter: Post-Treatment Value: None
  misc_feature: MA Experiment 20001554 PARAMETER Experiment Name: At_Drought_Soil_Dry_P Parameter: Timepoint (day) Value: 7
  misc_feature: MA Experiment 20001554 PARAMETER Experiment Name: At_Drought_Soil_Dry_P Parameter: Treatment Value: Drought vs. No Drought
  misc_feature: MA Experiment ID: 20001556 Result: Down-regulated in Transcription
  misc_feature: MA Experiment 20001556 PARAMETER Experiment Name: At_Drought_Soil_Dry_P Parameter: Age (day) Value: 26
  misc_feature: MA Experiment 20001556 PARAMETER Experiment Name: At_Drought_Soil_Dry_P Parameter: Organism Value: A. thaliana
  misc_feature: MA Experiment 20001556 PARAMETER Experiment Name: At_Drought_Soil_Dry_P Parameter: Plant Line Value: WS
  misc_feature: MA Experiment 20001556 PARAMETER Experiment Name: At_Drought_Soil_Dry_P Parameter: Post Timepoint (hr) Value: None
  misc_feature: MA Experiment 20001556 PARAMETER Experiment Name: At_Drought_Soil_Dry_P Parameter: Post-Treatment Value: None
  misc_feature: MA Experiment 20001556 PARAMETER Experiment Name: At_Drought_Soil_Dry_P Parameter: Timepoint (day) Value: 12
  misc_feature: MA Experiment 20001556 PARAMETER Experiment Name: At_Drought_Soil_Dry_P Parameter: Treatment Value: Drought vs. No Drought
  misc_feature: MA Experiment ID: 20001904 Result: Down-regulated in Transcription
  misc_feature: MA Experiment 20001904 PARAMETER Experiment Name: At_Drought_Reproduction_P Parameter: Age (day) Value: 37
  misc_feature: MA Experiment 20001904 PARAMETER Experiment Name: At_Drought_Reproduction_P Parameter: Organism Value: A. thaliana
  misc_feature: MA Experiment 20001904 PARAMETER Experiment Name: At_Drought_Reproduction_P Parameter: Plant Line Value: WS
  misc_feature: MA Experiment 20001904 PARAMETER Experiment Name: At_Drought_Reproduction_P Parameter: Timepoint (day) Value: 7
  misc_feature: MA Experiment 20001904 PARAMETER Experiment Name: At_Drought_Reproduction_P Parameter: Tissue Value: Rosettes
  misc_feature: MA Experiment 20001904 PARAMETER Experiment Name: At_Drought_Reproduction_P Parameter: Treatment Value: Drought vs. No Drought
atgtctaagaactcaaacgttgaagagaatggaggagcaaagccaatctgtgaagctttgaggagattcaaaaggtcgaggcttgtgttcgagccgtctttaggagtgttggggtttttcttggttggggtctgtttggtttgcagttttttcttctttgattacagaagcgttgctaaaagctatggcctttcggataaatctgagagattcgtttggctcaagtttgacaatatcagcagcagcagcagtagtagtagtaatagttcaaagagagttgggtttctggaagagagtggaagtgggtgtgatgtgttcgatggagattgggtttgggacgagtcttatccattgtatcaatccaaagattgcagatttctcgatgaagggtttaggtgtagtgactttggaaggtctgatttgttctatactcagtggcgttggcaacctagacactgtaatttgcccagatttgatgcaaaactgatgctggagaaactccgggacaagcggcttgtgtttgttggcgattcaataggaagaaaccagtgggagtctctactttgtctactatcttctgcagtcaagaacgagagcttgatttatgaaataaatggaagtccgatcacaaagcacaaagggttcttggtgttcaaatttgaggagtacaattgcacagtggagtactacagatctccatttttggttcctcaaagcagaccaccgattggatcacctggaaaggtcaagacaagtttgaaactggacactatggattggacttcaagcaaatggagagatgctgacgttttagtgctcaatactggacactggtggaacgaggggaaaactactagaacgggatgttactttcaagaaggagaagaagtaaaattgaagatgaatgtagatgatgcttataagcgagctctgaataccgttgtgaaatggatacataccgagctcgattcaaacaaaactcaagtcttctttcgcactttcgcccccgtgcatttcaggggaggagattggaaaacaggaggaacatgtcatatggagacattaccagagattggaacctcattggcttcatcagagacctgggaacagttaaagatcctcagagatgtgttgtcacataactcaaacagatcagagactgttaaagtgaaactgttgaacataacggcaatggctgctcaaagaaaagatggtcacccatcactctactatctcggtccgcatggtcctgcaccgcttcatcgccaagactgtagccactggtgccttcccggtgttcctgacacgtggaacgagctcttctatgcattatttatgaaacaagaagctccttcttcttctaaaagagttgaagaagcgaacagtacaggaaatgttacaatgtcgtga

SEQ ID NO: 79210 - protein, 469 aa, Arabidopsis thaliana
  peptide (1)..(469): Ceres Seq. ID no. 12650067
  misc_feature (278)..(445): Pfam Name: Arabidopsis proteins of unknown function Pfam Description: Arabidopsis proteins of unknown function
  misc_feature (1)..(469): Homolog of NCBI NO: 6862912 NR Description: unknown protein [Arabidopsis thaliana]
  misc_feature (1)..(340): Homolog of NCBI NO: 18397465 NR Description: expressed protein; protein id: At3g06080.1, by cDNA: gi_16648934 [Arabidopsis thaliana]
  misc_feature (1)..(467): Homolog of NCBI NO: 15239660 NR Description: putative protein; protein id: At5g19160.1
  misc_feature (57)..(448): Homolog of NCBI NO: 23617116 NR Description: leaf senescence related protein-like [Oryza
  misc_feature (90)..(443): Homolog of NCBI NO: 9759321 NR Description: gb|AAF00670.1~gene_id:MBL20.11~strong similarity
  misc_feature (90)..(443): Homolog of NCBI NO: 18415139 NR Description: putative protein; protein id: At5g06230.1, by cDNA: gi_13605530 [Arabidopsis thaliana] AT5g06230/MBL20_11 [Arabidopsis thaliana]
  misc_feature (103)..(443): Homolog of NCBI NO: 15229797 NR Description: hypothetical protein; protein id: At3g11570.1
  misc_feature (74)..(442): Homolog of NCBI NO: 15228743 NR Description: putative protein; protein id: At3g62390.1, by cDNA: 126100. [Arabidopsis thaliana] >gi|11357988|pir||T48031
  misc_feature (57)..(447): Homolog of NCBI NO: 22330347 NR Description: hypothetical protein; protein id: At1g60790.1, by cDNA: gi_17979148 [Arabidopsis thaliana] unknown protein [Arabidopsis thaliana]
  misc_feature (98)..(448): Homolog of NCBI NO: 15242021 NR Description: putative protein; protein id: At5g20590.1,
MSKNSNVEENGGAKPICEALRRFKRSRLVFEPSLGVLGFFLVGVCLVCSFFFFDYRSVAKSYGLSDKSERFVWLKFDNISSSSSSSSNSSKRVGFLEESGSGCDVFDGDWVWDESYPLYQSKDCRFLDEGFRCSDFGRSDLFYTQWRWQPRHCNLPRFDAKLMLEKLRDKRLVFVGDSIGRNQWESLLCLLSSAVKNESLIYEINGSPITKHKGFLVFKFEEYNCTVEYYRSPFLVPQSRPPIGSPGKVKTSLKLDTMDWTSSKWRDADVLVLNTGHWWNEGKTTRTGCYFQEGEEVKLKMNVDDAYKRALNTVVKWIHTELDSNKTQVFFRTFAPVHFRGGDWKTGGTCHMETLPEIGTSLASSETWEQLKILRDVLSHNSNRSETVKVKLLNITAMAAQRKDGHPSLYYLGPHGPAPLHRQDCSHWCLPGVPDTWNELFYALFMKQEAPSSSKRVEEANSTGNVTMS

SEQ ID NO: 79211 - protein, 307 aa, Arabidopsis thaliana
  peptide (1)..(307): Ceres Seq. ID no. 12650068
  misc_feature (116)..(283): Pfam Name: Arabidopsis proteins of unknown function Pfam Description: Arabidopsis proteins of unknown function
  misc_feature (1)..(307): Homolog of NCBI NO: 6862912 NR Description: unknown protein [Arabidopsis thaliana]
  misc_feature (1)..(178): Homolog of NCBI NO: 18397465 NR Description: expressed protein; protein id: At3g06080.1, by cDNA: gi_16648934 [Arabidopsis thaliana]
  misc_feature (1)..(305): Homolog of NCBI NO: 15239660 NR Description: putative protein; protein id: At5g19160.1
  misc_feature (1)..(286): Homolog of NCBI NO: 23617116 NR Description: leaf senescence related protein-like [Oryza
  misc_feature (1)..(281): Homolog of NCBI NO: 9759321 NR Description: gb|AAF00670.1~gene_id:MBL20.11~strong similarity
  misc_feature (1)..(281): Homolog of NCBI NO: 18415139 NR Description: putative protein; protein id: At5g06230.1, by cDNA: gi_13605530 [Arabidopsis thaliana] AT5g06230/MBL20_11 [Arabidopsis thaliana]
  misc_feature (1)..(281): Homolog of NCBI NO: 15229797 NR Description: hypothetical protein; protein id: At3g11570.1
  misc_feature (1)..(280): Homolog of NCBI NO: 15228743 NR Description: putative protein; protein id: At3g62390.1, by cDNA: 126100. [Arabidopsis thaliana] >gi|11357988|pir||T48031
  misc_feature (1)..(285): Homolog of NCBI NO: 22330347 NR Description: hypothetical protein; protein id: At1g60790.1, by cDNA: gi_17979148 [Arabidopsis thaliana] unknown protein [Arabidopsis thaliana]
  misc_feature (1)..(286): Homolog of NCBI NO: 15242021 NR Description: putative protein; protein id: At5g20590.1,
MLEKLRDKRLVFVGDSIGRNQWESLLCLLSSAVKNESLIYEINGSPITKHKGFLVFKFEEYNCTVEYYRSPFLVPQSRPPIGSPGKVKTSLKLDTMDWTSSKWRDADVLVLNTGHWWNEGKTTRTGCYFQEGEEVKLKMNVDDAYKRALNTVVKWIHTELDSNKTQVFFRTFAPVHFRGGDWKTGGTCHMETLPEIGTSLASSETWEQLKILRDVLSHNSNRSETVKVKLLNITAMAAQRKDGHPSLYYLGPHGPAPLHRQDCSHWCLPGVPDTWNELFYALFMKQEAPSSSKRVEEANSTGNVTMS

SEQ ID NO: 79212 - DNA, 748 bp, Arabidopsis thaliana
  misc_feature (1)..(748): Ceres Seq. ID no. 12650069
  misc_feature: MA Experiment ID: 108434 Result: Up-regulated in Transcription
  misc_feature: MA Experiment 108434 PARAMETER Experiment Name: At_Root_Tips_cDNA_P Parameter: Tissue Value: Root Tips
  misc_feature: MA Experiment ID: 108461 Result: Up-regulated in Transcription
  misc_feature: MA Experiment 108461 PARAMETER Experiment Name: At_Germinating_Seeds_cDNA_P Parameter: Age (day) Value: 1 vs. 0
  misc_feature: MA Experiment 108461 PARAMETER Experiment Name: At_Germinating_Seeds_cDNA_P Parameter: Tissue Value: Germinating Seeds
  misc_feature: MA Experiment ID: 108462 Result: Up-regulated in Transcription
  misc_feature: MA Experiment 108462 PARAMETER Experiment Name: At_Germinating_Seeds_cDNA_P Parameter: Age (day) Value: 2 vs. 0
  misc_feature: MA Experiment 108462 PARAMETER Experiment Name: At_Germinating_Seeds_cDNA_P Parameter: Tissue Value: Germinating Seeds
  misc_feature: MA Experiment ID: 108464 Result: Up-regulated in Transcription
  misc_feature: MA Experiment 108464 PARAMETER Experiment Name: At_Germinating_Seeds_cDNA_P Parameter: Age (day) Value: 4 vs. 0
  misc_feature: MA Experiment 108464 PARAMETER Experiment Name: At_Germinating_Seeds_cDNA_P Parameter: Tissue Value: Germinating Seeds
  misc_feature: MA Experiment ID: 108473 Result: Down-regulated in Transcription
  misc_feature: MA Experiment 108473 PARAMETER Experiment Name: At_Drought_Flowers_cDNA_P Parameter: Timepoint (hr) Value: 7 d
  misc_feature: MA Experiment 108473 PARAMETER Experiment Name: At_Drought_Flowers_cDNA_P Parameter: Tissue Value: Flower
  misc_feature: MA Experiment 108473 PARAMETER Experiment Name: At_Drought_Flowers_cDNA_P Parameter: Treatment Value: Drought vs. No Drought
  misc_feature: MA Experiment ID: 108561 Result: Down-regulated in Transcription
  misc_feature: MA Experiment 108561 PARAMETER Experiment Name: At_100uM_ABA_cDNA_P Parameter: Timepoint (hr) Value: 6
  misc_feature: MA Experiment 108561 PARAMETER Experiment Name: At_100uM_ABA_cDNA_P Parameter: Tissue Value: Aerial
  misc_feature: MA Experiment 108561 PARAMETER Experiment Name: At_100uM_ABA_cDNA_P Parameter: Treatment Value: 100uM ABA vs. No Treatment
  misc_feature: MA Experiment ID: 108569 Result: Up-regulated in Transcription
  misc_feature: MA Experiment 108569 PARAMETER Experiment Name: At_0.001%_MeJA__cDNA_P Parameter: Timepoint (hr) Value: 6
  misc_feature: MA Experiment 108569 PARAMETER Experiment Name: At_0.001%_MeJA__cDNA_P Parameter: Tissue Value: Aerial
  misc_feature: MA Experiment 108569 PARAMETER Experiment Name: At_0.001%_MeJA__cDNA_P Parameter: Treatment Value: 0.001% MeJA vs. No Treatment
  misc_feature: MA Experiment ID: 108577 Result: Down-regulated in Transcription
  misc_feature: MA Experiment 108577 PARAMETER Experiment Name: At_42deg_Heat_cDNA_P Parameter: Temperature (deg C) Value: 42 vs. 22
  misc_feature: MA Experiment 108577 PARAMETER Experiment Name: At_42deg_Heat_cDNA_P Parameter: Timepoint (hr) Value: 6
  misc_feature: MA Experiment 108577 PARAMETER Experiment Name: At_42deg_Heat_cDNA_P Parameter: Tissue Value: Aerial
  misc_feature: MA Experiment ID: 108579 Result: Up-regulated in Transcription
  misc_feature: MA Experiment 108579 PARAMETER Experiment Name: At_4deg_Cold_cDNA_P Parameter: Temperature (deg C) Value: 4 vs. 22
  misc_feature: MA Experiment 108579 PARAMETER Experiment Name: At_4deg_Cold_cDNA_P Parameter: Timepoint (hr) Value: 6
  misc_feature: MA Experiment 108579 PARAMETER Experiment Name: At_4deg_Cold_cDNA_P Parameter: Tissue Value: Aerial
  misc_feature: MA Experiment ID: 108595 Result: Up-regulated in Transcription
  misc_feature: MA Experiment 108595 PARAMETER Experiment Name: At_Ler-pi_Ovule_cDNA_P Parameter: Plant Line Value: null
  misc_feature: MA Experiment ID: 20000093 Result: Down-regulated in Transcription
  misc_feature: MA Experiment 20000093 PARAMETER Experiment Name: At_42deg_Heat_cDNA_P Parameter: Temperature (deg C) Value: 42 vs. 22
  misc_feature: MA Experiment 20000093 PARAMETER Experiment Name: At_42deg_Heat_cDNA_P Parameter: Timepoint (hr) Value: 0.5
  misc_feature: MA Experiment 20000093 PARAMETER Experiment Name: At_42deg_Heat_cDNA_P Parameter: Tissue Value: Aerial
  misc_feature: MA Experiment ID: 20000117 Result: Down-regulated in Transcription
  misc_feature: MA Experiment 20000117 PARAMETER Experiment Name: At_100uM_ABA_Mutants_cDNA_P Parameter: Plant Line Value: Columbia
  misc_feature: MA Experiment 20000117 PARAMETER Experiment Name: At_100uM_ABA_Mutants_cDNA_P Parameter: Timepoint (hr) Value: 6
  misc_feature: MA Experiment 20000117 PARAMETER Experiment Name: At_100uM_ABA_Mutants_cDNA_P Parameter: Tissue Value: Aerial
  misc_feature: MA Experiment 20000117 PARAMETER Experiment Name: At_100uM_ABA_Mutants_cDNA_P Parameter: Treatment Value: 100uM ABA vs. No Treatment
  misc_feature: MA Experiment ID: 20000180 Result: Up-regulated in Transcription
  misc_feature: MA Experiment 20000180 PARAMETER Experiment Name: At_Germinating_Seeds_P Parameter: Age (hr) Value: 24 vs. 0
  misc_feature: MA Experiment 20000180 PARAMETER Experiment Name: At_Germinating_Seeds_P Parameter: Tissue Value: Germinating Seeds
  misc_feature: MA Experiment ID: 20000185 Result: Up-regulated in Transcription
  misc_feature: MA Experiment 20000185 PARAMETER Experiment Name: At_Roots__P Parameter: Age (day) Value: 7 vs. 21
  misc_feature: MA Experiment 20000185 PARAMETER Experiment Name: At_Roots__P Parameter: Organism Value: A. thaliana
  misc_feature: MA Experiment 20000185 PARAMETER Experiment Name: At_Roots__P Parameter: Tissue Value: Roots vs. Whole Plant
  misc_feature: MA Experiment ID: 20000224 Result: Up-regulated in Transcription
  misc_feature: MA Experiment ID: 20000234 Result: Up-regulated in Transcription
  misc_feature: MA Experiment 20000234 PARAMETER Experiment Name: At_Siliques_P Parameter: Age (day) Value: 21
  misc_feature: MA Experiment 20000234 PARAMETER Experiment Name: At_Siliques_P Parameter: Organism Value: A. thaliana
  misc_feature: MA Experiment 20000234 PARAMETER Experiment Name: At_Siliques_P Parameter: Plant Line Value: WS
  misc_feature: MA Experiment 20000234 PARAMETER Experiment Name: At_Siliques_P Parameter: Tissue Value: Less Than 5mm Siliques vs. Whole Plant
  misc_feature: MA Experiment ID: 20000264 Result: Up-regulated in Transcription
  misc_feature: MA Experiment 20000264 PARAMETER Experiment Name: At_Open_Flower_P Parameter: Age (day) Value: 21
  misc_feature: MA Experiment 20000264 PARAMETER Experiment Name: At_Open_Flower_P Parameter: Plant Line Value: WS
  misc_feature: MA Experiment 20000264 PARAMETER Experiment Name: At_Open_Flower_P Parameter: Tissue Value: Open Flower vs. Whole Plant
  misc_feature: MA Experiment ID: 20000265 Result: Up-regulated in Transcription
  misc_feature: MA Experiment 20000265 PARAMETER Experiment Name: At_Open_Flower_P Parameter: Age (day) Value: 21
  misc_feature: MA Experiment 20000265 PARAMETER Experiment Name: At_Open_Flower_P Parameter: Plant Line Value: WS
  misc_feature: MA Experiment 20000265 PARAMETER Experiment Name: At_Open_Flower_P Parameter: Tissue Value: Closed Flower vs. Whole Plant
  misc_feature: MA Experiment ID: 20000438 Result: Down-regulated in Transcription
  misc_feature: MA Experiment 20000438 PARAMETER Experiment Name: At_Shoots__P Parameter: Age (day) Value: 14
  misc_feature: MA Experiment 20000438 PARAMETER Experiment Name: At_Shoots__P Parameter: Tissue Value: Shoots vs. Whole Plant
  misc_feature: MA Experiment ID: 20000439 Result: Up-regulated in Transcription
  misc_feature: MA Experiment 20000439 PARAMETER Experiment Name: At_Roots__P Parameter: Age (day) Value: 14 vs. 21
  misc_feature: MA Experiment 20000439 PARAMETER Experiment Name: At_Roots__P Parameter: Organism Value: A. thaliana
  misc_feature: MA Experiment 20000439 PARAMETER Experiment Name: At_Roots__P Parameter: Tissue Value: Roots vs. Whole Plant
  misc_feature: MA Experiment ID: 20000441 Result: Down-regulated in Transcription
  misc_feature: MA Experiment 20000441 PARAMETER Experiment Name: At_1uM_BR-BRZ__P Parameter: Tissue Value: Shoot Apices
  misc_feature: MA Experiment 20000441 PARAMETER Experiment Name: At_1uM_BR-BRZ__P Parameter: Treatment Value: 1uM BR vs. No Treatment
  misc_feature: MA Experiment ID: 20000443 Result: Down-regulated in Transcription
  misc_feature: MA Experiment 20000443 PARAMETER Experiment Name: At_1uM_BR-BRZ__P Parameter: Tissue Value: Shoot Apices
  misc_feature: MA Experiment 20000443 PARAMETER Experiment Name: At_1uM_BR-BRZ__P Parameter: Treatment Value: 1uM BRZ vs. No Treatment
  misc_feature: MA Experiment ID: 20000495 Result: Up-regulated in Transcription
  misc_feature: MA Experiment 20000495 PARAMETER Experiment Name: At_Guard_Cells_P Parameter: Harvest Date Value: 8/2/2002
  misc_feature: MA Experiment 20000495 PARAMETER Experiment Name: At_Guard_Cells_P Parameter: Organism Value: A. thaliana
  misc_feature: MA Experiment 20000495 PARAMETER Experiment Name: At_Guard_Cells_P Parameter: Tissue Value: Guard Cells vs. Leaves
  misc_feature: MA Experiment ID: 20000527 Result: Down-regulated in Transcription
  misc_feature: MA Experiment 20000527 PARAMETER Experiment Name: At_10percent_PEG_P Parameter: Age (day) Value: 20
  misc_feature: MA Experiment 20000527 PARAMETER Experiment Name: At_10percent_PEG_P Parameter: Organism Value: A. thaliana
  misc_feature: MA Experiment 20000527 PARAMETER Experiment Name: At_10percent_PEG_P Parameter: Plant Line Value: WS
  misc_feature: MA Experiment 20000527 PARAMETER Experiment Name: At_10percent_PEG_P Parameter: Timepoint (day) Value: 20
  misc_feature: MA Experiment 20000527 PARAMETER Experiment Name: At_10percent_PEG_P Parameter: Tissue Value: Whole Plant
  misc_feature: MA Experiment 20000527 PARAMETER Experiment Name: At_10percent_PEG_P Parameter: Treatment Value: 10percent PEG vs. No Treatment
  misc_feature: MA Experiment ID: 20000794 Result: Down-regulated in Transcription
  misc_feature: MA Experiment 20000794 PARAMETER Experiment Name: At_Petals_P Parameter: Age (day) Value: 23-25 days
  misc_feature: MA Experiment 20000794 PARAMETER Experiment Name: At_Petals_P Parameter: Plant Line Value: WS
  misc_feature: MA Experiment 20000794 PARAMETER Experiment Name: At_Petals_P Parameter: Tissue Value: Petals vs. Whole plant
  misc_feature: MA Experiment ID: 20001248 Result: Down-regulated in Transcription
  misc_feature: MA Experiment 20001248 PARAMETER Experiment Name: At_Far-red-induction_P Parameter: Age (day) Value: 7
  misc_feature: MA Experiment 20001248 PARAMETER Experiment Name: At_Far-red-induction_P Parameter: Light Value: Far-red vs. White
  misc_feature: MA Experiment 20001248 PARAMETER Experiment Name: At_Far-red-induction_P Parameter: Organism Value: A. thaliana
  misc_feature: MA Experiment 20001248 PARAMETER Experiment Name: At_Far-red-induction_P Parameter: Plant Line Value: Columbia
  misc_feature: MA Experiment 20001248 PARAMETER Experiment Name: At_Far-red-induction_P Parameter: Timepoint (hr) Value: 4
  misc_feature: MA Experiment 20001248 PARAMETER Experiment Name: At_Far-red-induction_P Parameter: Tissue Value: Whole Plant
  misc_feature: MA Experiment ID: 20001450 Result: Down-regulated in Transcription
  misc_feature: MA Experiment 20001450 PARAMETER Experiment Name: At_Far-red-induction_P Parameter: Age (day) Value: 7
  misc_feature: MA Experiment 20001450 PARAMETER Experiment Name: At_Far-red-induction_P Parameter: Light Value: Far-red vs. White
  misc_feature: MA Experiment 20001450 PARAMETER Experiment Name: At_Far-red-induction_P Parameter: Organism Value: A. thaliana
  misc_feature: MA Experiment 20001450 PARAMETER Experiment Name: At_Far-red-induction_P Parameter: Plant Line Value: Columbia
  misc_feature: MA Experiment 20001450 PARAMETER Experiment Name: At_Far-red-induction_P Parameter: Timepoint (hr) Value: 8
  misc_feature: MA Experiment 20001450 PARAMETER Experiment Name: At_Far-red-induction_P Parameter: Tissue Value: Whole Plant
  misc_feature: MA Experiment ID: 20001451 Result: Down-regulated in Transcription
  misc_feature: MA Experiment 20001451 PARAMETER Experiment Name: At_Far-red-induction_P Parameter: Age (day) Value: 7
  misc_feature: MA Experiment 20001451 PARAMETER Experiment Name: At_Far-red-induction_P Parameter: Light Value: Far-red vs. White
  misc_feature: MA Experiment 20001451 PARAMETER Experiment Name: At_Far-red-induction_P Parameter: Organism Value: A. thaliana
  misc_feature: MA Experiment 20001451 PARAMETER Experiment Name: At_Far-red-induction_P Parameter: Plant Line Value: Columbia
  misc_feature: MA Experiment 20001451 PARAMETER Experiment Name: At_Far-red-induction_P Parameter: Timepoint (hr) Value: 24
  misc_feature: MA Experiment 20001451 PARAMETER Experiment Name: At_Far-red-induction_P Parameter: Tissue Value: Whole Plant
  misc_feature: MA Experiment ID: 20001911 Result: Down-regulated in Transcription
  misc_feature: MA Experiment 20001911 PARAMETER Experiment Name: At_Drought_Reproduction_P Parameter: Age (day) Value: 40
  misc_feature: MA Experiment 20001911 PARAMETER Experiment Name: At_Drought_Reproduction_P Parameter: Organism Value: A. thaliana
  misc_feature: MA Experiment 20001911 PARAMETER Experiment Name: At_Drought_Reproduction_P Parameter: Plant Line Value: WS
  misc_feature: MA Experiment 20001911 PARAMETER Experiment Name: At_Drought_Reproduction_P Parameter: Timepoint (day) Value: 10
  misc_feature: MA Experiment 20001911 PARAMETER Experiment Name: At_Drought_Reproduction_P Parameter: Tissue Value: Flowers
  misc_feature: MA Experiment 20001911 PARAMETER Experiment Name: At_Drought_Reproduction_P Parameter: Treatment Value: Drought vs. No Drought
actctcctttctcaattaatataagccaatcaccatcaaaatatcatttgagaactctagaaacctgcttcaatggcgatcgacaagcttccacttcttctctttctctccatactcctctgcctcaatcgccctgttcttagcgacaccgatgaagaggacattcttctcacaggaatcaacagctacagaacaacacagaatctaacaatcttaagcaagaacgaaaacgcagaatgcctagctgacgaaatcgcagaccaattcaagaacaaaccttgtaccaacgacactggctcagccacagtacctggaactgagccacagttcgcaaactaccctcagattctagcaaaatgccacttgaacgtctcagacacgagagacggctcgattatgcctgcatgtgttcctcgtttagaatcaaacctcgtcctcacaaacttcaccaagtcacaatactcaatgagtttgaacgattccaagtttacagggattggtattggtaaagaagatgattggatcgttgtagtcctcactaccaacacaccagaaggaagctattctacagctactcctacaaaacaagagtctaatggcttcacctttggtattggtctcgttagttatttagtcattttcatgtactcttccttttgtttctttctcttttgagatatcaaatgttttgatgagttatcaaacactctttcctttagactatcaagaataaattttgttaaagatt

SEQ ID NO: 79213 - protein, 200 aa, Arabidopsis thaliana
  peptide (1)..(200): Ceres Seq. ID no. 12650070
  misc_feature (1)..(200): Homolog of NCBI NO: 18397452 NR Description: Expressed protein; protein id: At3g06035.1,
  misc_feature (1)..(200): Homolog of NCBI NO: 21594024 NR Description: unknown [Arabidopsis thaliana]
  misc_feature (1)..(200): Homolog of NCBI NO: 15239687 NR Description: putative protein; protein id: At5g19250.1
  misc_feature (1)..(106): Homolog of NCBI NO: 24417290 NR Description: unknown [Arabidopsis thaliana]
  misc_feature (1)..(200): Homolog of NCBI NO: 24417436 NR Description: unknown [Arabidopsis thaliana]
  misc_feature (1)..(192): Homolog of NCBI NO: 34395876 NR Description: Putative GPI-anchored protein At5g19240 precursor
  misc_feature (1)..(192): Homolog of NCBI NO: 15239686 NR Description: putative protein; protein id: At5g19240.1
  misc_feature (1)..(200): Homolog of NCBI NO: 15239685 NR Description: putative protein; protein id: At5g19230.1 thaliana] >gi|27311585|gb|AAO00758.1| putative protein
  misc_feature (5)..(169): Homolog of NCBI NO: 34904816 NR Description: contains ESTs to Arabidopsis thaliana AY088405.1~unknown protein [Oryza sativa
  misc_feature (1)..(187): Homolog of NCBI NO: 18405086 NR Description: expressed protein; protein id: At1g54860.1, by cDNA: 1530. [Arabidopsis thaliana] >gi|3776578|gb|AAC64895.1| gb|F13915 and gb|F13916 come from this gene. [Arabidopsis
MAIDKLPLLLFLSILLCLNRPVLSDTDEEDILLTGINSYRTTQNLTILSKNENAECLADEIADQFKNKPCTNDTGSATVPGTEPQFANYPQILAKCHLNVSDTRDGSIMPACVPRLESNLVLTNFTKSQYSMSLNDSKFTGIGIGKEDDWIVVVLTTNTPEGSYSTATPTKQESNGFTFGIGLVSYLVIFMYSSFCFFLF

SEQ ID NO: 79214 - DNA, 811 bp, Arabidopsis thaliana
  misc_feature (1)..(811): Ceres Seq. ID no. 12650071
  misc_feature: MA Experiment ID: 108595 Result: Down-regulated in Transcription
  misc_feature: MA Experiment 108595 PARAMETER Experiment Name: At_Ler-pi_Ovule_cDNA_P Parameter: Plant Line Value: null
actatacagtaatcgaaggaaccaagaaacggtctcaatcttattttcagcgatggcgatgtcaattctaaagctaagaaatttatcggcactaagatcggcggcaaatagtgcccggatcggagtttcatcgaggggtttctcaaagctcgcggaaggcactgacataacctcggcggcgcctggcgtttctctccagaaagctcgcagctgggacgaaggtgtttcctccaaattctccaccacgccattgtcagatatcttcaaggggaagaaagtcgtcatctttggtcttcctggggcttacacgggagtttgttcacagcagcatgtgcctagctacaagagccacattgataagtttaaagccaaaggcattgattctgtcatctgtgtctctgttaatgatccctttgctatcaatggttgggcagagaagcttggtgccaaagatgcaattgagttttatggagattttgatgggaaatttcacaaaagcttggggctagacaaggatctctctgctgcattgctcgggccacggtctgagagatggtcggcttatgtagaagacgggaaggttaaggcggtgaatgtggaagaagcaccgtctgacttcaaggttacaggggcagaagtcatcttaggacagatctaaaaagtatttccagagttgctgtttcttctgagttgcaactgataataagtttgatccgaacatgtctcaaggatcagaccaagtaacagcttcacttcttttgttttgtttccacagtttcagtttaaataaaacttatgtgtcttgccgttt

SEQ ID NO: 79215 - protein, 218 aa, Arabidopsis thaliana; identical to SEQ ID NO: 29695
  peptide (1)..(218): Ceres Seq. ID no. 12650072
  misc_feature (18)..(218): Homolog of NCBI NO: 18397457 NR Description: expressed protein; protein id: At3g06050.1, by cDNA: 14986., supported by cDNA: gi_15450354, supported by gi_20466102 [Arabidopsis thaliana]
  misc_feature (18)..(218): Homolog of NCBI NO: 21553531 NR Description: unknown [Arabidopsis thaliana]
  misc_feature (20)..(218): Homolog of NCBI NO: 7658343 NR Description: unknown protein; 13384-11892 [Arabidopsis
  misc_feature (18)..(218): Homolog of NCBI NO: 34903114 NR Description: unnamed protein product [Oryza sativa (japonica group)] >gi|6630684|dbj|BAA88530.1| unnamed protein product
  misc_feature (86)..(218): Homolog of NCBI NO: 17987739 NR Description: THIOL PEROXIDASE [Brucella melitensis]
  misc_feature (86)..(218): Homolog of NCBI NO: 23501379 NR Description: ahpC/TSA family protein [Brucella suis 1330]
  misc_feature (62)..(218): Homolog of NCBI NO: 15888122 NR Description: AGR_C_1423p [Agrobacterium tumefaciens] peroxiredoxin [Agrobacterium tumefaciens str. C58 (U.
  misc_feature (83)..(218): Homolog of NCBI NO: 16127624 NR Description: AhpC/TSA family protein [Caulobacter crescentus
  misc_feature (85)..(218): Homolog of NCBI NO: 13476239 NR Description: peroxiredoxin-like protein [Mesorhizobium loti]
  misc_feature (86)..(218): Homolog of NCBI NO: 27376428 NR Description: peroxiredoxin [Bradyrhizobium japonicum]

SEQ ID NO: 79216 - protein, 201 aa, Arabidopsis thaliana; identical to SEQ ID NO: 29696
  peptide (1)..(201): Ceres Seq. ID no. 12650073
  misc_feature (1)..(201): Homolog of NCBI NO: 18397457 NR Description: expressed protein; protein id: At3g06050.1, by cDNA: 14986., supported by cDNA: gi_15450354, supported by gi_20466102 [Arabidopsis thaliana]
  misc_feature (1)..(201): Homolog of NCBI NO: 21553531 NR Description: unknown [Arabidopsis thaliana]
  misc_feature (3)..(201): Homolog of NCBI NO: 7658343 NR Description: unknown protein; 13384-11892 [Arabidopsis
  misc_feature (1)..(201): Homolog of NCBI NO: 34903114 NR Description: unnamed protein product [Oryza sativa (japonica group)] >gi|6630684|dbj|BAA88530.1| unnamed protein product
  misc_feature (69)..(201): Homolog of NCBI NO: 17987739 NR Description: THIOL PEROXIDASE [Brucella melitensis]
  misc_feature (69)..(201): Homolog of NCBI NO: 23501379 NR Description: ahpC/TSA family protein [Brucella suis 1330]
  misc_feature (45)..(201): Homolog of NCBI NO: 15888122 NR Description: AGR_C_1423p [Agrobacterium tumefaciens] peroxiredoxin [Agrobacterium tumefaciens str. C58 (U.
  misc_feature (66)..(201): Homolog of NCBI NO: 16127624 NR Description: AhpC/TSA family protein [Caulobacter crescentus
  misc_feature (68)..(201): Homolog of NCBI NO: 13476239 NR Description: peroxiredoxin-like protein [Mesorhizobium loti]
  misc_feature (69)..(201): Homolog of NCBI NO: 27376428 NR Description: peroxiredoxin [Bradyrhizobium japonicum]

SEQ ID NO: 79217 - protein, 199 aa, Arabidopsis thaliana; identical to SEQ ID NO: 29697
  peptide (1)..(199): Ceres Seq. ID no. 12650074
  misc_feature (1)..(199): Homolog of NCBI NO: 18397457 NR Description: expressed protein; protein id: At3g06050.1, by cDNA: 14986., supported by cDNA: gi_15450354, supported by gi_20466102 [Arabidopsis thaliana]
  misc_feature (1)..(199): Homolog of NCBI NO: 21553531 NR Description: unknown [Arabidopsis thaliana]
  misc_feature (1)..(199): Homolog of NCBI NO: 7658343 NR Description: unknown protein; 13384-11892 [Arabidopsis
  misc_feature (1)..(199): Homolog of NCBI NO: 34903114 NR Description: unnamed protein product [Oryza sativa (japonica group)] >gi|6630684|dbj|BAA88530.1| unnamed protein product
  misc_feature (67)..(199): Homolog of NCBI NO: 17987739 NR Description: THIOL PEROXIDASE [Brucella melitensis]
  misc_feature (67)..(199): Homolog of NCBI NO: 23501379 NR Description: ahpC/TSA family protein [Brucella suis 1330]
  misc_feature (43)..(199): Homolog of NCBI NO: 15888122 NR Description: AGR_C_1423p [Agrobacterium tumefaciens] peroxiredoxin [Agrobacterium tumefaciens str. C58 (U.
  misc_feature (64)..(199): Homolog of NCBI NO: 16127624 NR Description: AhpC/TSA family protein [Caulobacter crescentus
  misc_feature (66)..(199): Homolog of NCBI NO: 13476239 NR Description: peroxiredoxin-like protein [Mesorhizobium loti]
  misc_feature (67)..(199): Homolog of NCBI NO: 27376428 NR Description: peroxiredoxin [Bradyrhizobium japonicum]

SEQ ID NO: 79218 - DNA, 1806 bp, Arabidopsis thaliana
  misc_feature (1)..(1806): Ceres Seq. ID no. 12650116
  misc_feature: MA Experiment ID: 20001451 Result: Down-regulated in Transcription
  misc_feature: MA Experiment 20001451 PARAMETER Experiment Name: At_Far-red-induction_P Parameter: Age (day) Value: 7
  misc_feature: MA Experiment 20001451 PARAMETER Experiment Name: At_Far-red-induction_P Parameter: Light Value: Far-red vs. White
  misc_feature: MA Experiment 20001451 PARAMETER Experiment Name: At_Far-red-induction_P Parameter: Organism Value: A. thaliana
  misc_feature: MA Experiment 20001451 PARAMETER Experiment Name: At_Far-red-induction_P Parameter: Plant Line Value: Columbia
  misc_feature: MA Experiment 20001451 PARAMETER Experiment Name: At_Far-red-induction_P Parameter: Timepoint (hr) Value: 24
  misc_feature: MA Experiment 20001451 PARAMETER Experiment Name: At_Far-red-induction_P Parameter: Tissue Value: Whole Plant
atggcagcttcttcaactaatgctcgtctcaccaaccctcctcgtctactctccaaaccccgactttcacctacctccgtcgccaatctccgttttccagccgccgatttctccactcgcttctttgccgattcttcgtccccgcggctaaggagtgtaccgtttccggtggtattttccgatcaaaggcgccggcgaagcatggaacctagcaatgtctatgtggcttcaaattccacggaaatggagatcggaagtcatgatatcgtgaagaatccgagcttgatctgtgctccagtgatggcggattcaatagacaagatggtgattgaaacgagtaaagcccatgaattgggtgcagacttggttgaaattcgattagattggctaaaggacttcaatcctcttgaggatctaaaaaccattattaagaaatctcctctacccactttattcacctacagaccaaaatgggaaggtggtcagtatgaaggtgatgaaaatgagagacgggatgtgcttcgtctggccatggagttgggagctgattatattgatgttgaacttcaggtggcaagtgagttcatcaaatctattgacggaaagaagcctggaaagttcaaagtaattgtttcatcgcacaactatcagaataccccttctgttgaggaccttgatggccttgttgcaagaatacaacagactggagccgacattgttaagattgctactactgctgtggacattgcagatgttgctcgcatgttccatataacctcaaaagctcaagttcccacaattggacttgttatgggtgaaagaggtttgatgtctcggattctttgttcgaaatttggtggttatttgacctttggcaccttagattctagtaaagtttctgcgccaggtcaaccaacgatcaaggatctgttggatctttacaactttagaagaattggtcctgacacaaaggtatatggaattattggcaagcctgtcagccacagcaaatcacctattgttcacaatcaagctttcaaatcagttgattttaatggagtatatgtccacctgttagttgataatcttgtaagctttcttcaagcatactcatcctctgatttcgctggattcagctgtacaattccgcacaaagaagctgcattgcaatgttgtgatgaagttgatccattggcaaagtctataggagctgtgaacactatactaaggagaaaaagtgacggaaagttgttgggttacaacacagattgtattggttccatttctgctattgaggatggcctacgaagtgatccaagcagtgtaccttcttcttcttcgccattggccagtaaaacagtggtggttattggtgctggtggagcaggcaaggctcttgcttatggtgcaaaagaaaagggggccaaagttgtaattgctaatcgaacttacgaacgagcactagaactcgcagaagcaataggaggcaaagcgttatctctgacagatttagataactatcacccagaagatggcatggttttggcaaacacaacatctatgggtatgcaaccaaatgttgaggagactccaatttctaaggatgcattgaagcactatgcactggtctttgatgcggtatacactccgagaatcaccagactgttgagggaagcagaagaaagtggagccataactgtctcagggtcagagatgtttgtcaggcaggcttacgagcagtttgagatcttcaccggtttacccgctccaaaggaactctactggcaaataatgtcaaagtactga

SEQ ID NO: 79219 - protein, 601 aa, Arabidopsis thaliana
  peptide (1)..(601): Ceres Seq. ID no. 12650117
  misc_feature (341)..(587): Pfam Name: Shikimate / quinate 5-dehydrogenase Pfam Description: Shikimate / quinate 5-dehydrogenase
  misc_feature (1)..(601): Homolog of NCBI NO: 15230703 NR Description: dehydroquinate dehydratase/shikimate putative; protein id: At3g06350.1 [Arabidopsis thaliana] putative dehydroquinase shikimate dehydrogenase [Arabidopsis
  misc_feature (156)..(601): Homolog of NCBI NO: 7436862 NR Description: 3-dehydroquinate dehydratase (EC 4.2.1.10) /
  misc_feature (91)..(154): Homolog of NCBI NO: 7436862 NR Description: 3-dehydroquinate dehydratase (EC 4.2.1.10) /
  misc_feature (75)..(591): Homolog of NCBI NO: 629688 NR Description: 3-dehydroquinate dehydratase (EC 4.2.1.10) /
  misc_feature (154)..(601): Homolog of NCBI NO: 34914824 NR Description: putative 3-dehydroquinate dehydratase [Oryza
  misc_feature (94)..(155): Homolog of NCBI NO: 34914824 NR Description: putative 3-dehydroquinate dehydratase [Oryza
  misc_feature (94)..(585): Homolog of NCBI NO: 34914828 NR Description: putative 3-dehydroquinate dehydratase / shikimate
  misc_feature (90)..(410): Homolog of NCBI NO: 7488788 NR Description: 3-dehydroquinate dehydratase (EC 4.2.1.10) /
  misc_feature (324)..(586): Homolog of NCBI NO: 21402380 NR Description: Shikimate_DH, Shikimate / quinate 5-dehydrogenase
  misc_feature (324)..(586): Homolog of NCBI NO: 30022412 NR Description: Shikimate 5-dehydrogenase [Bacillus cereus ATCC
MAASSTNARLTNPPRLLSKPRLSPTSVANLRFPAADFSTRFFADSSSPRLRSVPFPVVFSDQRRRRSMEPSNVYVASNSTEMEIGSHDIVKNPSLICAPVMADSIDKMVIETSKAHELGADLVEIRLDWLKDFNPLEDLKTIIKKSPLPTLFTYRPKWEGGQYEGDENERRDVLRLAMELGADYIDVELQVASEFIKSIDGKKPGKFKVIVSSHNYQNTPSVEDLDGLVARIQQTGADIVKIATTAVDIADVARMFHITSKAQVPTIGLVMGERGLMSRILCSKFGGYLTFGTLDSSKVSAPGQPTIKDLLDLYNFRRIGPDTKVYGIIGKPVSHSKSPIVHNQAFKSVDFNGVYVHLLVDNLVSFLQAYSSSDFAGFSCTIPHKEAALQCCDEVDPLAKSIGAVNTILRRKSDGKLLGYNTDCIGSISAIEDGLRSDPSSVPSSSSPLASKTVVVIGAGGAGKALAYGAKEKGAKVVIANRTYERALELAEAIGGKALSLTDLDNYHPEDGMVLANTTSMGMQPNVEETPISKDALKHYALVFDAVYTPRITRLLREAEESGAITVSGSEMFVRQAYEQFEIFTGLPAPKELYWQIMSKY

SEQ ID NO: 79220 - protein, 534 aa, Arabidopsis thaliana
  peptide (1)..(534): Ceres Seq. ID no. 12650118
  misc_feature (274)..(520): Pfam Name: Shikimate / quinate 5-dehydrogenase Pfam Description: Shikimate / quinate 5-dehydrogenase
  misc_feature (1)..(534): Homolog of NCBI NO: 15230703 NR Description: dehydroquinate dehydratase/shikimate putative; protein id: At3g06350.1 [Arabidopsis thaliana] putative dehydroquinase shikimate dehydrogenase [Arabidopsis
  misc_feature (89)..(534): Homolog of NCBI NO: 7436862 NR Description: 3-dehydroquinate dehydratase (EC 4.2.1.10) /
  misc_feature (24)..(87): Homolog of NCBI NO: 7436862 NR Description: 3-dehydroquinate dehydratase (EC 4.2.1.10) /
  misc_feature (8)..(524): Homolog of NCBI NO: 629688 NR Description: 3-dehydroquinate dehydratase (EC 4.2.1.10) /
  misc_feature (87)..(534): Homolog of NCBI NO: 34914824 NR Description: putative 3-dehydroquinate dehydratase [Oryza
  misc_feature (27)..(88): Homolog of NCBI NO: 34914824 NR Description: putative 3-dehydroquinate dehydratase [Oryza
  misc_feature (27)..(518): Homolog of NCBI NO: 34914828 NR Description: putative 3-dehydroquinate dehydratase / shikimate
  misc_feature (23)..(343): Homolog of NCBI NO: 7488788 NR Description: 3-dehydroquinate dehydratase (EC 4.2.1.10) /
  misc_feature (257)..(519): Homolog of NCBI NO: 21402380 NR Description: Shikimate_DH, Shikimate / quinate 5-dehydrogenase
  misc_feature (257)..(519): Homolog of NCBI NO: 30022412 NR Description: Shikimate 5-dehydrogenase [Bacillus cereus ATCC
MEPSNVYVASNSTEMEIGSHDIVKNPSLICAPVMADSIDKMVIETSKAHELGADLVEIRLDWLKDFNPLEDLKTIIKKSPLPTLFTYRPKWEGGQYEGDENERRDVLRLAMELGADYIDVELQVASEFIKSIDGKKPGKFKVIVSSHNYQNTPSVEDLDGLVARIQQTGADIVKIATTAVDIADVARMFHITSKAQVPTIGLVMGERGLMSRILCSKFGGYLTFGTLDSSKVSAPGQPTIKDLLDLYNFRRIGPDTKVYGIIGKPVSHSKSPIVHNQAFKSVDFNGVYVHLLVDNLVSFLQAYSSSDFAGFSCTIPHKEAALQCCDEVDPLAKSIGAVNTILRRKSDGKLLGYNTDCIGSISAIEDGLRSDPSSVPSSSSPLASKTVVVIGAGGAGKALAYGAKEKGAKVVIANRTYERALELAEAIGGKALSLTDLDNYHPEDGMVLANTTSMGMQPNVEETPISKDALKHYALVFDAVYTPRITRLLREAEESGAITVSGSEMFVRQAYEQFEIFTGLPAPKELYWQIMSKY

SEQ ID NO: 79221 - protein, 520 aa, Arabidopsis thaliana
  peptide (1)..(520): Ceres Seq. ID no. 12650119
  misc_feature (260)..(506): Pfam Name: Shikimate / quinate 5-dehydrogenase Pfam Description: Shikimate / quinate 5-dehydrogenase
  misc_feature (1)..(520): Homolog of NCBI NO: 15230703 NR Description: dehydroquinate dehydratase/shikimate putative; protein id: At3g06350.1 [Arabidopsis thaliana] putative dehydroquinase shikimate dehydrogenase [Arabidopsis
  misc_feature (75)..(520): Homolog of NCBI NO: 7436862 NR Description: 3-dehydroquinate dehydratase (EC 4.2.1.10) /
  misc_feature (10)..(73): Homolog of NCBI NO: 7436862 NR Description: 3-dehydroquinate dehydratase (EC 4.2.1.10) /
  misc_feature (1)..(510): Homolog of NCBI NO: 629688 NR Description: 3-dehydroquinate dehydratase (EC 4.2.1.10) /
  misc_feature (73)..(520): Homolog of NCBI NO: 34914824 NR Description: putative 3-dehydroquinate dehydratase [Oryza
  misc_feature (13)..(74): Homolog of NCBI NO: 34914824 NR Description: putative 3-dehydroquinate dehydratase [Oryza
  misc_feature (13)..(504): Homolog of NCBI NO: 34914828 NR Description: putative 3-dehydroquinate dehydratase / shikimate
  misc_feature (9)..(329): Homolog of NCBI NO: 7488788 NR Description: 3-dehydroquinate dehydratase (EC 4.2.1.10) /
  misc_feature (243)..(505): Homolog of NCBI NO: 21402380 NR Description: Shikimate_DH, Shikimate / quinate 5-dehydrogenase
  misc_feature (243)..(505): Homolog of NCBI NO: 30022412 NR Description: Shikimate 5-dehydrogenase [Bacillus cereus ATCC
MEIGSHDIVKNPSLICAPVMADSIDKMVIETSKAHELGADLVEIRLDWLKDFNPLEDLKTIIKKSPLPTLFTYRPKWEGGQYEGDENERRDVLRLAMELGADYIDVELQVASEFIKSIDGKKPGKFKVIVSSHNYQNTPSVEDLDGLVARIQQTGADIVKIATTAVDIADVARMFHITSKAQVPTIGLVMGERGLMSRILCSKFGGYLTFGTLDSSKVSAPGQPTIKDLLDLYNFRRIGPDTKVYGIIGKPVSHSKSPIVHNQAFKSVDFNGVYVHLLVDNLVSFLQAYSSSDFAGFSCTIPHKEAALQCCDEVDPLAKSIGAVNTILRRKSDGKLLGYNTDCIGSISAIEDGLRSDPSSVPSSSSPLASKTVVVIGAGGAGKALAYGAKEKGAKVVIANRTYERALELAEAIGGKALSLTDLDNYHPEDGMVLANTTSMGMQPNVEETPISKDALKHYALVFDAVYTPRITRLLREAEESGAITVSGSEMFVRQAYEQFEIFTGLPAPKELYWQIMSKY

SEQ ID NO: 79222 - DNA, 2160 bp, Arabidopsis thaliana
  misc_feature (1)..(2160): Ceres Seq. ID no. 12650157
  misc_feature: MA Experiment ID: 20000307 Result: Down-regulated in Transcription
  misc_feature: MA Experiment 20000307 PARAMETER Experiment Name: At_Germinating_Seeds_Sub_P Parameter: Age (hr) Value: 24 vs. 0
  misc_feature: MA Experiment 20000307 PARAMETER Experiment Name: At_Germinating_Seeds_Sub_P Parameter: Organism Value: A. thaliana
  misc_feature: MA Experiment 20000307 PARAMETER Experiment Name: At_Germinating_Seeds_Sub_P Parameter: Plant Line Value: WS
  misc_feature: MA Experiment 20000307 PARAMETER Experiment Name: At_Germinating_Seeds_Sub_P Parameter: Tissue Value: Germinating Seeds
  misc_feature: MA Experiment ID: 20000315 Result: Down-regulated in Transcription
  misc_feature: MA Experiment 20000315 PARAMETER Experiment Name: At_14day_Shoots-Roots_Sub_P Parameter: Age (day) Value: 14
  misc_feature: MA Experiment 20000315 PARAMETER Experiment Name: At_14day_Shoots-Roots_Sub_P Parameter: Organism Value: A. thaliana
  misc_feature: MA Experiment 20000315 PARAMETER Experiment Name: At_14day_Shoots-Roots_Sub_P Parameter: Plant Line Value: WS
  misc_feature: MA Experiment 20000315 PARAMETER Experiment Name: At_14day_Shoots-Roots_Sub_P Parameter: Tissue Value: Shoots vs. Whole Plant
  misc_feature: MA Experiment ID: 20000355 Result: Down-regulated in Transcription
  misc_feature: MA Experiment 20000355 PARAMETER Experiment Name: At_Siliques_Sub_P Parameter: Age (day) Value: 21
  misc_feature: MA Experiment 20000355 PARAMETER Experiment Name: At_Siliques_Sub_P Parameter: Organism Value: A. thaliana
  misc_feature: MA Experiment 20000355 PARAMETER Experiment Name: At_Siliques_Sub_P Parameter: Plant Line Value: WS
  misc_feature: MA Experiment 20000355 PARAMETER Experiment Name: At_Siliques_Sub_P Parameter: Tissue Value: Less Than 5mm Siliques vs. Whole Plant
atggttaagcttcttcaagacccgattacacctaacaaggagctgctgaagaagatgatagagctagagaaaagtcaggagcatctaatgcaggagatgtctcggctcaaggtctccacggagcttcggaaggagagccgtatccagtgttccatgaatctgagaccatcgccctggaagttcactcataaacagtatctcaatattttgcagtccatggcacaatctgttcatgccttcgatctcaatatgcgaattatcttttggaatgctatggcggaaaaggtttatgggtactctgctgcagaagcagttggacagaaccctattgacgttatggtagatgatcgggatgctccctttgccatgactattgctcaactttgttccaatggagagagctggactggcaagtttcctgtcaagcgcagaacaggagagaaattctcagctgtcactacgtgttcccccttctatgctgatgacggttctcttattgggatcgtttctatcacaagtgacgtagcaccatatctgaacccaacaatctctttggctaaattaaaggcttcagaagtcgaaaccagctctacccctgcaaggaatagttttgcctttaaacttgggttggacaccaaaggagctgttgtatcgaaacttggccttgattctgatcagcctatacaagttgctatagcatcaaagatatctgatttggcatccaaggtgagaaacaaggtcaggtcgaaaatgccagcaggtgatagtagtgtcacagtatttgagggtgaaactggggatagtcatcattcagatcatggagtcttcggtgctactctctctgaccacatggatgatgcagcatcaagtggtgctagcacaccaagaggggactttatccaatctccttttggtgtattcacatgtaacgatgacaagttttcttccgaacccttcatagattccagtgatggatatcctataacccttttcacctcaaaagctgaagaatggatggtaaagaaaggtttgtcttggccatggaaagggaatgagcaggaaggttcaagagtaaagcctacttattctgtatggccttgtgtacagaatgaacaaaagaaagataagtctcaccagatcaaccgctattctggtgttaagtctaaaagccatgcctctgaaagtaataagcctaccaataacaaggcttctggtttgcggtcttcttgtataaatgcgaacagcgctattagccgtggaattatcagtcacagtactatgaacaaggtggatacaaatagtaattgcttggagtatgaaattttgtgggatgatttgacaatcggagaacaaatcggacaaggctcatgtggaactgtctatcacggtctttggtttggatctgatgtagctgtaaaattgatctccaaacaagaatattcagaagaggtcatacaatcttttagacaagaggtatcgttgatgcaaagacttagacatcctaacgttctgctgtttatgggagctgtgactttacctcagggtctctgtatagtgtcagagttccttccacgtggaagtctatttcgtctactgcagagaaatatgtcaaaacttgattggaggcggcgtatcaatatggccttggacattgctcgcggcatgaattatcttcaccgctgtagtccccccatcatccatcgtgatttgaagtcatcaaatctgctggtagacaagaacttgaccgttaaggtagctgactttggtctatcgcgtattaagcatcatacatacctaaccagcaagtcgggaaagggaatgcctcaatggatggcaccagaagttcttcgaaatgagtctgctgatgagaagtctgacatttacagctttggagtagtactatgggagcttgccacagagaagatcccatgggaaaatctcaactcgatgcaggtgatcggagctgtggggttcatgaaccagaggctggaaattccaaaggacattgatcctgattggatctcactaatagagagctgttggcacagggatgcaaagctgagacccacattccaagaactgatggagagactaagagacctgcaaagaaagtatacaatacagttccaagcgactcgtgctgcgttatctgacaagtga

SEQ ID NO: 79223 - protein, 719 aa, Arabidopsis thaliana
  peptide (1)..(719): Ceres Seq. ID no. 12650158
  misc_feature (446)..(698): Pfam Name: Protein kinase domain Pfam Description: Protein kinase domain
  misc_feature (39)..(718): Homolog of NCBI NO: 15230753 NR Description: protein kinase, putative; protein id:
  misc_feature (5)..(46): Homolog of NCBI NO: 15230753 NR Description: protein kinase, putative; protein id:
  misc_feature (13)..(683): Homolog of NCBI NO: 15230754 NR Description: protein kinase, putative; protein id: At3g06630.1
  misc_feature (39)..(718): Homolog of NCBI NO: 18408889 NR Description: putative protein kinase; protein id: At1g67890.1,
  misc_feature (5)..(57): Homolog of NCBI NO: 18408889 NR Description: putative protein kinase; protein id: At1g67890.1,
  misc_feature (39)..(718): Homolog of NCBI NO: 16604649 NR Description: putative protein kinase [Arabidopsis thaliana]
  misc_feature (5)..(57): Homolog of NCBI NO: 16604649 NR Description: putative protein kinase [Arabidopsis thaliana]
  misc_feature (39)..(683): Homolog of NCBI NO: 25404682 NR Description: hypothetical protein T23K23.26 [imported] -
  misc_feature (5)..(57): Homolog of NCBI NO: 25404682 NR Description: hypothetical protein T23K23.26 [imported] -
  misc_feature (251)..(715): Homolog of NCBI NO: 22327668 NR Description: protein kinase; protein id: At5g49470.1,
MVKLLQDPITPNKELLKKMIELEKSQEHLMQEMSRLKVSTELRKESRIQCSMNLRPSPWKFTHKQYLNILQSMAQSVHAFDLNMRIIFWNAMAEKVYGYSAAEAVGQNPIDVMVDDRDAPFAMTIAQLCSNGESWTGKFPVKRRTGEKFSAVTTCSPFYADDGSLIGIVSITSDVAPYLNPTISLAKLKASEVETSSTPARNSFAFKLGLDTKGAVVSKLGLDSDQPIQVAIASKISDLASKVRNKVRSKMPAGDSSVTVFEGETGDSHHSDHGVFGATLSDHMDDAASSGASTPRGDFIQSPFGVFTCNDDKFSSEPFIDSSDGYPITLFTSKAEEWMVKKGLSWPWKGNEQEGSRVKPTYSVWPCVQNEQKKDKSHQINRYSGVKSKSHASESNKPTNNKASGLRSSCINANSAISRGIISHSTMNKVDTNSNCLEYEILWDDLTIGEQIGQGSCGTVYHGLWFGSDVAVKLISKQEYSEEVIQSFRQEVSLMQRLRHPNVLLFMGAVTLPQGLCIVSEFLPRGSLFRLLQRNMSKLDWRRRINMALDIARGMNYLHRCSPPIIHRDLKSSNLLVDKNLTVKVADFGLSRIKHHTYLTSKSGKGMPQWMAPEVLRNESADEKSDIYSFGVVLWELATEKIPWENLNSMQVIGAVGFMNQRLEIPKDIDPDWISLIESCWHRDAKLRPTFQELMERLRDLQRKYTIQFQATRAALSDK

SEQ ID NO: 79224 - protein, 701 aa, Arabidopsis thaliana
  peptide (1)..(701): Ceres Seq. ID no. 12650159
  misc_feature (428)..(680): Pfam Name: Protein kinase domain Pfam Description: Protein kinase domain
  misc_feature (21)..(700): Homolog of NCBI NO: 15230753 NR Description: protein kinase, putative; protein id:
  misc_feature (1)..(28): Homolog of NCBI NO: 15230753 NR Description: protein kinase, putative; protein id:
  misc_feature (1)..(665): Homolog of NCBI NO: 15230754 NR Description: protein kinase, putative; protein id: At3g06630.1
  misc_feature (21)..(700): Homolog of NCBI NO: 18408889 NR Description: putative protein kinase; protein id: At1g67890.1,
  misc_feature (1)..(39): Homolog of NCBI NO: 18408889 NR Description: putative protein kinase; protein id: At1g67890.1,
  misc_feature (21)..(700): Homolog of NCBI NO: 16604649 NR Description: putative protein kinase [Arabidopsis thaliana]
  misc_feature (1)..(39): Homolog of NCBI NO: 16604649 NR Description: putative protein kinase [Arabidopsis thaliana]
  misc_feature (21)..(665): Homolog of NCBI NO: 25404682 NR Description: hypothetical protein T23K23.26 [imported] -
  misc_feature (1)..(39): Homolog of NCBI NO: 25404682 NR Description: hypothetical protein T23K23.26 [imported] -
  misc_feature (233)..(697): Homolog of NCBI NO: 22327668 NR Description: protein kinase; protein id: At5g49470.1,
MIELEKSQEHLMQEMSRLKVSTELRKESRIQCSMNLRPSPWKFTHKQYLNILQSMAQSVHAFDLNMRIIFWNAMAEKVYGYSAAEAVGQNPIDVMVDDRDAPFAMTIAQLCSNGESWTGKFPVKRRTGEKFSAVTTCSPFYADDGSLIGIVSITSDVAPYLNPTISLAKLKASEVETSSTPARNSFAFKLGLDTKGAVVSKLGLDSDQPIQVAIASKISDLASKVRNKVRSKMPAGDSSVTVFEGETGDSHHSDHGVFGATLSDHMDDAASSGASTPRGDFIQSPFGVFTCNDDKFSSEPFIDSSDGYPITLFTSKAEEWMVKKGLSWPWKGNEQEGSRVKPTYSVWPCVQNEQKKDKSHQINRYSGVKSKSHASESNKPTNNKASGLRSSCINANSAISRGIISHSTMNKVDTNSNCLEYEILWDDLTIGEQIGQGSCGTVYHGLWFGSDVAVKLISKQEYSEEVIQSFRQEVSLMQRLRHPNVLLFMGAVTLPQGLCIVSEFLPRGSLFRLLQRNMSKLDWRRRINMALDIARGMNYLHRCSPPIIHRDLKSSNLLVDKNLTVKVADFGLSRIKHHTYLTSKSGKGMPQWMAPEVLRNESADEKSDIYSFGVVLWELATEKIPWENLNSMQVIGAVGFMNQRLEIPKDIDPDWISLIESCWHRDAKLRPTFQELMERLRDLQRKYTIQFQATRAALSDK

SEQ ID NO: 79225 - protein, 690 aa, Arabidopsis thaliana
  peptide (1)..(690): Ceres Seq. ID no. 12650160
  misc_feature (417)..(669): Pfam Name: Protein kinase domain Pfam Description: Protein kinase domain
  misc_feature (10)..(689): Homolog of NCBI NO: 15230753 NR Description: protein kinase, putative; protein id:
  misc_feature (1)..(17): Homolog of NCBI NO: 15230753 NR Description: protein kinase, putative; protein id:
  misc_feature (1)..(654): Homolog of NCBI NO: 15230754 NR Description: protein kinase, putative; protein id: At3g06630.1
  misc_feature (10)..(689): Homolog of NCBI NO: 18408889 NR Description: putative protein kinase; protein id: At1g67890.1,
  misc_feature (1)..(28): Homolog of NCBI NO: 18408889 NR Description: putative protein kinase; protein id: At1g67890.1,
  misc_feature (10)..(689): Homolog of NCBI NO: 16604649 NR Description: putative protein kinase [Arabidopsis thaliana]
  misc_feature (1)..(28): Homolog of NCBI NO: 16604649 NR Description: putative protein kinase [Arabidopsis thaliana]
  misc_feature (10)..(654): Homolog of NCBI NO: 25404682 NR Description: hypothetical protein T23K23.26 [imported] -
  misc_feature (1)..(28): Homolog of NCBI NO: 25404682 NR Description: hypothetical protein T23K23.26 [imported] -
  misc_feature (222)..(686): Homolog of NCBI NO: 22327668 NR Description: protein kinase; protein id: At5g49470.1,
MQEMSRLKVSTELRKESRIQCSMNLRPSPWKFTHKQYLNILQSMAQSVHAFDLNMRIIFWNAMAEKVYGYSAAEAVGQNPIDVMVDDRDAPFAMTIAQLCSNGESWTGKFPVKRRTGEKFSAVTTCSPFYADDGSLIGIVSITSDVAPYLNPTISLAKLKASEVETSSTPARNSFAFKLGLDTKGAVVSKLGLDSDQPIQVAIASKISDLASKVRNKVRSKMPAGDSSVTVFEGETGDSHHSDHGVFGATLSDHMDDAASSGASTPRGDFIQSPFGVFTCNDDKFSSEPFIDSSDGYPITLFTSKAEEWMVKKGLSWPWKGNEQEGSRVKPTYSVWPCVQNEQKKDKSHQINRYSGVKSKSHASESNKPTNNKASGLRSSCINANSAISRGIISHSTMNKVDTNSNCLEYEILWDDLTIGEQIGQGSCGTVYHGLWFGSDVAVKLISKQEYSEEVIQSFRQEVSLMQRLRHPNVLLFMGAVTLPQGLCIVSEFLPRGSLFRLLQRNMSKLDWRRRINMALDIARGMNYLHRCSPPIIHRDLKSSNLLVDKNLTVKVADFGLSRIKHHTYLTSKSGKGMPQWMAPEVLRNESADEKSDIYSFGVVLWELATEKIPWENLNSMQVIGAVGFMNQRLEIPKDIDPDWISLIESCWHRDAKLRPTFQELMERLRDLQRKYTIQFQATRAALSDK

SEQ ID NO: 79226 - DNA, 931 bp, Arabidopsis thaliana
  misc_feature (1)..(931): Ceres Seq. ID no. 12650302
  misc_feature: MA Experiment ID: 108434 Result: Up-regulated in Transcription
  misc_feature: MA Experiment 108434 PARAMETER Experiment Name: At_Root_Tips_cDNA_P Parameter: Tissue Value: Root Tips
  misc_feature: MA Experiment ID: 108462 Result: Down-regulated in Transcription
  misc_feature: MA Experiment 108462 PARAMETER Experiment Name: At_Germinating_Seeds_cDNA_P Parameter: Age (day) Value: 2 vs. 0
  misc_feature: MA Experiment 108462 PARAMETER Experiment Name: At_Germinating_Seeds_cDNA_P Parameter: Tissue Value: Germinating Seeds
  misc_feature: MA Experiment ID: 108463 Result: Down-regulated in Transcription
  misc_feature: MA Experiment 108463 PARAMETER Experiment Name: At_Germinating_Seeds_cDNA_P Parameter: Age (day) Value: 3 vs. 0
  misc_feature: MA Experiment 108463 PARAMETER Experiment Name: At_Germinating_Seeds_cDNA_P Parameter: Tissue Value: Germinating Seeds
  misc_feature: MA Experiment ID: 108464 Result: Down-regulated in Transcription
  misc_feature: MA Experiment 108464 PARAMETER Experiment Name: At_Germinating_Seeds_cDNA_P Parameter: Age (day) Value: 4 vs. 0
  misc_feature: MA Experiment 108464 PARAMETER Experiment Name: At_Germinating_Seeds_cDNA_P Parameter: Tissue Value: Germinating Seeds
  misc_feature: MA Experiment ID: 108573 Result: Up-regulated in Transcription
  misc_feature: MA Experiment 108573 PARAMETER Experiment Name: At_Drought_cDNA_P Parameter: Timepoint (hr) Value: 6
  misc_feature: MA Experiment 108573 PARAMETER Experiment Name: At_Drought_cDNA_P Parameter: Tissue Value: Aerial
  misc_feature: MA Experiment 108573 PARAMETER Experiment Name: At_Drought_cDNA_P Parameter: Treatment Value: Drought vs. No Drought
atgagcgcgacggagctgccgacgaaggaggcacacatacttaaaggccacgagggggcggttttagcggcgaggtttaacggtgacggaaactacgctctcacctgtggcaaggatcgaactatccgcctctggaacccgcaccgtggaatcttaatcaagacctacaaatctcatggccgcgaagtccgcgacgttcatgttacttcagacaatgccaaattttgctcatgtggtggtgatcggcaagtttactactgggatgtttcaactggacgtgtaatccgtaaattccgtggtcatgatggagaggtcaatgcagtgaagttcaatgattcgtcgtctgtggttgtatcagctgggttcgatcgttcgctacgtgtatgggactgcagatctcacagtgttgagccagtacagatcattgatacatttttggatacagtcatgtctgttgttttaacaaagactgagattattggtggtagtgtcgatggaacagttcgcacatttgacatgcgtatcggtagggagatgtcagataacctaggccaaccggttaactgtatatcgatatcaaatgatggaaactgcgttttagctggttgcttggattctactctgcgtctacttgacaggaccacaggagagctactccaagtctataaaggtcatatttccaagtcatttaaaacggattgttgcctcacgaattcggatgcacatgtgattggaggatcagaggatggattggttttcttttgggatttggtagatgcaaaagtgctatcgaaatttagagctcacgatttagtggtgacaagcgtgagttaccacccgaaggaagactgtatgttgacttcttcggtcgatggtacaattcgtgtctggaaaaaatgaagaaacaacaaatcttgacttcgattgattt

SEQ ID NO: 79227 - protein, 299 aa, Arabidopsis thaliana; identical to SEQ ID NO: 23167
  peptide (1)..(299): Ceres Seq. ID no. 12650303
  misc_feature (1)..(272): Homolog of NCBI NO: 10177204 NR Description: contains similarity to unknown
  misc_feature (1)..(299): Homolog of NCBI NO: 18424859 NR Description: G-protein beta-subunit (transducin) family; id: At5g64730.1, supported by cDNA: gi_15028246, supported by gi_21281168 [Arabidopsis thaliana] >gi|15028247|gb|AAK76712.1|
  misc_feature (3)..(299): Homolog of NCBI NO: 12838548 NR Description: unnamed protein product [Mus musculus]
  misc_feature (5)..(299): Homolog of NCBI NO: 14150114 NR Description: hypothetical protein MGC4238 [Homo sapiens]
  misc_feature (3)..(299): Homolog of NCBI NO: 34851410 NR Description: similar to RIKEN cDNA 1500041N16 [Rattus
  misc_feature (3)..(299): Homolog of NCBI NO: 18044039 NR Description: RIKEN cDNA 1500041N16 gene [Mus musculus]
  misc_feature (3)..(299): Homolog of NCBI NO: 13385884 NR Description: RIKEN cDNA 1500041N16 [Mus musculus]
  misc_feature (4)..(297): Homolog of NCBI NO: 39596796 NR Description: Hypothetical protein CBG02300 [Caenorhabditis
  misc_feature (4)..(297): Homolog of NCBI NO: 17533647 NR Description: Deoxyhypusine synthase [Caenorhabditis elegans]
  misc_feature (18)..(286): Homolog of NCBI NO: 24584567 NR Description: CG4935-PA [Drosophila melanogaster] symbol=BG:DS02740.2; cDNA=method:''sim4'', score:''1000.0'',

SEQ ID NO: 79228 - protein, 150 aa, Arabidopsis thaliana
  peptide (1)..(150): Ceres Seq. ID no. 12650304
  misc_feature (1)..(123): Homolog of NCBI NO: 10177204 NR Description: contains similarity to unknown
  misc_feature (1)..(150): Homolog of NCBI NO: 18424859 NR Description: G-protein beta-subunit (transducin) family; id: At5g64730.1, supported by cDNA: gi_15028246, supported by gi_21281168 [Arabidopsis thaliana] >gi|15028247|gb|AAK76712.1|
  misc_feature (1)..(150): Homolog of NCBI NO: 12838548 NR Description: unnamed protein product [Mus musculus]
  misc_feature (1)..(150): Homolog of NCBI NO: 14150114 NR Description: hypothetical protein MGC4238 [Homo sapiens]
  misc_feature (1)..(150): Homolog of NCBI NO: 34851410 NR Description: similar to RIKEN cDNA 1500041N16 [Rattus
  misc_feature (1)..(150): Homolog of NCBI NO: 18044039 NR Description: RIKEN cDNA 1500041N16 gene [Mus musculus]
  misc_feature (1)..(150): Homolog of NCBI NO: 13385884 NR Description: RIKEN cDNA 1500041N16 [Mus musculus]
  misc_feature (1)..(148): Homolog of NCBI NO: 39596796 NR Description: Hypothetical protein CBG02300 [Caenorhabditis
  misc_feature (1)..(148): Homolog of NCBI NO: 17533647 NR Description: Deoxyhypusine synthase [Caenorhabditis elegans]
  misc_feature (1)..(137): Homolog of NCBI NO: 24584567 NR Description: CG4935-PA [Drosophila melanogaster] symbol=BG:DS02740.2; cDNA=method:''sim4'', score:''1000.0'',
MSVVLTKTEIIGGSVDGTVRTFDMRIGREMSDNLGQPVNCISISNDGNCVLAGCLDSTLRLLDRTTGELLQVYKGHISKSFKTDCCLTNSDAHVIGGSEDGLVFFWDLVDAKVLSKFRAHDLVVTSVSYHPKEDCMLTSSVDGTIRVWKK

SEQ ID NO: 79229 - DNA, 1332 bp, Arabidopsis thaliana
  misc_feature (1)..(1332): Ceres Seq. ID no. 12650391
  misc_feature: MA Experiment ID: 20000315 Result: Down-regulated in Transcription
  misc_feature: MA Experiment 20000315 PARAMETER Experiment Name: At_14day_Shoots-Roots_Sub_P Parameter: Age (day) Value: 14
  misc_feature: MA Experiment 20000315 PARAMETER Experiment Name: At_14day_Shoots-Roots_Sub_P Parameter: Organism Value: A. thaliana
  misc_feature: MA Experiment 20000315 PARAMETER Experiment Name: At_14day_Shoots-Roots_Sub_P Parameter: Plant Line Value: WS
  misc_feature: MA Experiment 20000315 PARAMETER Experiment Name: At_14day_Shoots-Roots_Sub_P Parameter: Tissue Value: Shoots vs. Whole Plant
  misc_feature: MA Experiment ID: 20000328 Result: Down-regulated in Transcription
  misc_feature: MA Experiment 20000328 PARAMETER Experiment Name: At_42deg_Heat_Sub_P Parameter: Age (day) Value: 14
  misc_feature: MA Experiment 20000328 PARAMETER Experiment Name: At_42deg_Heat_Sub_P Parameter: Organism Value: A. thaliana
  misc_feature: MA Experiment 20000328 PARAMETER Experiment Name: At_42deg_Heat_Sub_P Parameter: Plant Line Value: WS
  misc_feature: MA Experiment 20000328 PARAMETER Experiment Name: At_42deg_Heat_Sub_P Parameter: Temperature (deg C) Value: 42 vs. 22
  misc_feature: MA Experiment 20000328 PARAMETER Experiment Name: At_42deg_Heat_Sub_P Parameter: Timepoint (hr) Value: 6
  misc_feature: MA Experiment 20000328 PARAMETER Experiment Name: At_42deg_Heat_Sub_P Parameter: Tissue Value: Aerial
  misc_feature: MA Experiment ID: 20001807 Result: Down-regulated in Transcription
  misc_feature: MA Experiment 20001807 PARAMETER Experiment Name: At_50mM_NH4NO3_L-to-H_Sub_P Parameter: Timepoint (hr) Value: 6
  misc_feature: MA Experiment 20001807 PARAMETER Experiment Name: At_50mM_NH4NO3_L-to-H_Sub_P Parameter: Tissue Value: Leaf
  misc_feature: MA Experiment 20001807 PARAMETER Experiment Name: At_50mM_NH4NO3_L-to-H_Sub_P Parameter: Treatment Value: 50mM NH4NO3 vs 100mM Mannitol
atgggtggaataccagaatccattggaaatctgtctagcttgaccagcttagatttggaggataatcacttaactgatcgcattccatccactctcggtaatctcaagaatctacagttctttagaaaaactggaatcatcgctggagttgttagcggaatagcggttattctactaggattcttcttctttttcttctgcaaggataaacataaaggatataaacgagacgtatttgtggatgttgcaggaacgaactttaaaaaaggtttgatttcaggtgaagtggacagaaggattgcttttggacagttgagaagatttgcatggagagagcttcagttggctacagatgagttcagtgaaaagaatgttctcggacaaggaggctttgggaaagtttacaaaggattgctttcggatggcaccaaagtcgctgtaaaaagattgactgattttgaacgtccaggaggagatgaagctttccagagagaagttgagatgataagtgtagctgttcataggaatctgcttcgccttatcggcttttgtacaacacaaactgaacgacttttggtgtatcctttcatgcagaatctaagtgttgcatattgcttaagagagattaaacccggggatccagttctggattggttcaggaggaaacagattgcgttaggtgcagcacgaggactcgaatatcttcatgaacattgcaacccgaagatcatacacagagatgtgaaagctgcaaatgtgttactagatgaagactttgaagcagtggttggtgattttggtttagccaagttggtagatgttagaaggactaatgtaaccactcaggtccgaggaacaatgggtcatattgcaccagaatgtatatccacagggaaatcgtcagagaaaaccgatgttttcgggtacggaattatgcttctggagcttgtaactggacaaagagcaattgatttctcgcggttagaggaagaagatgatgtcttattgctagaccatgtgaagaaactggaaagagagaagagattagaagacatagtagataagaagcttgatgaggattatataaaggaagaagttgaaatgatgatacaagtagctctgctatgcacacaagcagcaccggaagaacgaccagcgatgtcggaagtagtaagaatgctagaaggagaagggcttgcagagagatgggaagagtggcagaatcttgaagtgacgagacaagaagagtttcagaggttgcagaggagatttgattggggtgaagattccattaataatcaagatgctattgaattatctggtggaagatag

SEQ ID NO: 79230 - protein, 443 aa, Arabidopsis thaliana
  peptide (1)..(443): Ceres Seq. ID no. 12650392
  misc_feature (42)..(443): Homolog of NCBI NO: 15238386 NR Description: receptor-like protein kinase; protein id:
  misc_feature (1)..(40): Homolog of NCBI NO: 15238386 NR Description: receptor-like protein kinase; protein id:
  misc_feature (2)..(443): Homolog of NCBI NO: 11358729 NR Description: protein serine/threonine kinase-like protein -
  misc_feature (2)..(443): Homolog of NCBI NO: 22326703 NR Description: protein serine/threonine kinase-like protein; id: At5g10290.1, supported by cDNA: gi_20260259 [Arabidopsis
  misc_feature (2)..(40): Homolog of NCBI NO: 11358729 NR Description: protein serine/threonine kinase-like protein -
  misc_feature (2)..(40): Homolog of NCBI NO: 22326703 NR Description: protein serine/threonine kinase-like protein; id: At5g10290.1, supported by cDNA: gi_20260259 [Arabidopsis
  misc_feature (2)..(443): Homolog of NCBI NO: 20260260 NR Description: protein serine/threonine kinase-like protein
  misc_feature (2)..(40): Homolog of NCBI NO: 20260260 NR Description: protein serine/threonine kinase-like protein
  misc_feature (2)..(38): Homolog of NCBI NO: 11358729 NR Description: protein serine/threonine kinase-like protein -
  misc_feature (2)..(38): Homolog of NCBI NO: 22326703 NR Description: protein serine/threonine kinase-like protein; id: At5g10290.1, supported by cDNA: gi_20260259 [Arabidopsis
MGGIPESIGNLSSLTSLDLEDNHLTDRIPSTLGNLKNLQFFRKTGIIAGVVSGIAVILLGFFFFFFCKDKHKGYKRDVFVDVAGTNFKKGLISGEVDRRIAFGQLRRFAWRELQLATDEFSEKNVLGQGGFGKVYKGLLSDGTKVAVKRLTDFERPGGDEAFQREVEMISVAVHRNLLRLIGFCTTQTERLLVYPFMQNLSVAYCLREIKPGDPVLDWFRRKQIALGAARGLEYLHEHCNPKIIHRDVKAANVLLDEDFEAVVGDFGLAKLVDVRRTNVTTQVRGTMGHIAPECISTGKSSEKTDVFGYGIMLLELVTGQRAIDFSRLEEEDDVLLLDHVKKLEREKRLEDIVDKKLDEDYIKEEVEMMIQVALLCTQAAPEERPAMSEVVRMLEGEGLAERWEEWQNLEVTRQEEFQRLQRRFDWGEDSINNQDAIELSGGR

SEQ ID NO: 79231 - protein, 276 aa, Arabidopsis thaliana
  peptide (1)..(276): Ceres Seq. ID no. 12650393
  misc_feature (1)..(276): Homolog of NCBI NO: 15238386 NR Description: receptor-like protein kinase; protein id:
  misc_feature (1)..(276): Homolog of NCBI NO: 11358729 NR Description: protein serine/threonine kinase-like protein -
  misc_feature (1)..(276): Homolog of NCBI NO: 22326703 NR Description: protein serine/threonine kinase-like protein; id: At5g10290.1, supported by cDNA: gi_20260259 [Arabidopsis
  misc_feature (1)..(276): Homolog of NCBI NO: 20260260 NR Description: protein serine/threonine kinase-like protein
  misc_feature (1)..(276): Homolog of NCBI NO: 16648949 NR Description: receptor-like protein kinase [Arabidopsis
  misc_feature (1)..(276): Homolog of NCBI NO: 10177052 NR Description: receptor-like protein kinase [Arabidopsis
  misc_feature (1)..(276): Homolog of NCBI NO: 18424740 NR Description: leucine-rich repeat transmembrane protein kinase, protein id: At5g63710.1, supported by cDNA: gi_16974576 thaliana] >gi|16974577|gb|AAL31184.1| AT5g63710/MBK5_19
  misc_feature (1)..(276): Homolog of NCBI NO: 38679443 NR Description: benzothiadiazole-induced somatic embryogenesis
  misc_feature (1)..(276): Homolog of NCBI NO: 40253600 NR Description: putative somatic embryogenesis receptor kinase 1
  misc_feature (1)..(276): Homolog of NCBI NO: 21740899 NR Description: OSJNBa0036B21.13 [Oryza sativa (japonica
MISVAVHRNLLRLIGFCTTQTERLLVYPFMQNLSVAYCLREIKPGDPVLDWFRRKQIALGAARGLEYLHEHCNPKIIHRDVKAANVLLDEDFEAVVGDFGLAKLVDVRRTNVTTQVRGTMGHIAPECISTGKSSEKTDVFGYGIMLLELVTGQRAIDFSRLEEEDDVLLLDHVKKLEREKRLEDIVDKKLDEDYIKEEVEMMIQVALLCTQAAPEERPAMSEVVRMLEGEGLAERWEEWQNLEVTRQEEFQRLQRRFDWGEDSINNQDAIELSGGR

SEQ ID NO: 79232 - protein, 247 aa, Arabidopsis thaliana
  peptide (1)..(247): Ceres Seq. ID no. 12650394
  misc_feature (1)..(247): Homolog of NCBI NO: 15238386 NR Description: receptor-like protein kinase; protein id:
  misc_feature (1)..(247): Homolog of NCBI NO: 11358729 NR Description: protein serine/threonine kinase-like protein -
  misc_feature (1)..(247): Homolog of NCBI NO: 22326703 NR Description: protein serine/threonine kinase-like protein; id: At5g10290.1, supported by cDNA: gi_20260259 [Arabidopsis
  misc_feature (1)..(247): Homolog of NCBI NO: 20260260 NR Description: protein serine/threonine kinase-like protein
  misc_feature (1)..(247): Homolog of NCBI NO: 16648949 NR Description: receptor-like protein kinase [Arabidopsis
  misc_feature (1)..(247): Homolog of NCBI NO: 10177052 NR Description: receptor-like protein kinase [Arabidopsis
  misc_feature (1)..(247): Homolog of NCBI NO: 18424740 NR Description: leucine-rich repeat transmembrane protein kinase, protein id: At5g63710.1, supported by cDNA: gi_16974576 thaliana] >gi|16974577|gb|AAL31184.1| AT5g63710/MBK5_19
  misc_feature (1)..(247): Homolog of NCBI NO: 38679443 NR Description: benzothiadiazole-induced somatic embryogenesis
  misc_feature (1)..(247): Homolog of NCBI NO: 40253600 NR Description: putative somatic embryogenesis receptor kinase 1
  misc_feature (1)..(247): Homolog of NCBI NO: 21740899 NR Description: OSJNBa0036B21.13 [Oryza sativa (japonica
MQNLSVAYCLREIKPGDPVLDWFRRKQIALGAARGLEYLHEHCNPKIIHRDVKAANVLLDEDFEAVVGDFGLAKLVDVRRTNVTTQVRGTMGHIAPECISTGKSSEKTDVFGYGIMLLELVTGQRAIDFSRLEEEDDVLLLDHVKKLEREKRLEDIVDKKLDEDYIKEEVEMMIQVALLCTQAAPEERPAMSEVVRMLEGEGLAERWEEWQNLEVTRQEEFQRLQRRFDWGEDSINNQDAIELSGGR

SEQ ID NO: 79233 - DNA, 783 bp, Arabidopsis thaliana
  misc_feature (1)..(783): Ceres Seq. ID no. 12650413
  misc_feature: MA Experiment ID: 20000306 Result: Up-regulated in Transcription
  misc_feature: MA Experiment 20000306 PARAMETER Experiment Name: At_Germinating_Seeds_Sub_P Parameter: Age (hr) Value: 6 vs. 0
  misc_feature: MA Experiment 20000306 PARAMETER Experiment Name: At_Germinating_Seeds_Sub_P Parameter: Organism Value: A. thaliana
  misc_feature: MA Experiment 20000306 PARAMETER Experiment Name: At_Germinating_Seeds_Sub_P Parameter: Plant Line Value: WS
  misc_feature: MA Experiment 20000306 PARAMETER Experiment Name: At_Germinating_Seeds_Sub_P Parameter: Tissue Value: Germinating Seeds
  misc_feature: MA Experiment ID: 20000307 Result: Up-regulated in Transcription
  misc_feature: MA Experiment 20000307 PARAMETER Experiment Name: At_Germinating_Seeds_Sub_P Parameter: Age (hr) Value: 24 vs. 0
  misc_feature: MA Experiment 20000307 PARAMETER Experiment Name: At_Germinating_Seeds_Sub_P Parameter: Organism Value: A. thaliana
  misc_feature: MA Experiment 20000307 PARAMETER Experiment Name: At_Germinating_Seeds_Sub_P Parameter: Plant Line Value: WS
  misc_feature: MA Experiment 20000307 PARAMETER Experiment Name: At_Germinating_Seeds_Sub_P Parameter: Tissue Value: Germinating Seeds
  misc_feature: MA Experiment ID: 20000315 Result: Down-regulated in Transcription
  misc_feature: MA Experiment 20000315 PARAMETER Experiment Name: At_14day_Shoots-Roots_Sub_P Parameter: Age (day) Value: 14
  misc_feature: MA Experiment 20000315 PARAMETER Experiment Name: At_14day_Shoots-Roots_Sub_P Parameter: Organism Value: A. thaliana
  misc_feature: MA Experiment 20000315 PARAMETER Experiment Name: At_14day_Shoots-Roots_Sub_P Parameter: Plant Line Value: WS
  misc_feature: MA Experiment 20000315 PARAMETER Experiment Name: At_14day_Shoots-Roots_Sub_P Parameter: Tissue Value: Shoots vs. Whole Plant
  misc_feature: MA Experiment ID: 20000328 Result: Down-regulated in Transcription
  misc_feature: MA Experiment 20000328 PARAMETER Experiment Name: At_42deg_Heat_Sub_P Parameter: Age (day) Value: 14
  misc_feature: MA Experiment 20000328 PARAMETER Experiment Name: At_42deg_Heat_Sub_P Parameter: Organism Value: A. thaliana
  misc_feature: MA Experiment 20000328 PARAMETER Experiment Name: At_42deg_Heat_Sub_P Parameter: Plant Line Value: WS
  misc_feature: MA Experiment 20000328 PARAMETER Experiment Name: At_42deg_Heat_Sub_P Parameter: Temperature (deg C) Value: 42 vs. 22
  misc_feature: MA Experiment 20000328 PARAMETER Experiment Name: At_42deg_Heat_Sub_P Parameter: Timepoint (hr) Value: 6
  misc_feature: MA Experiment 20000328 PARAMETER Experiment Name: At_42deg_Heat_Sub_P Parameter: Tissue Value: Aerial
atggctcgtaccaagcaaaccgcaaggaaatccaccggaggaaaagccccaaggaaacaactcgcaacaaaggcggcgaggaaatcagctccggcgaccggaggagtaaagaagccacacagattccgtcctggaactgttgccctaagagaaatcaggaagtatcagaagagcactgagcttctgatccgcaagcttccgttccagcgtttggttcgtgagatcgctcaggatttcaaaacagatctgcgtttccagagcagcgccgtcgcagcacttcaggaagcggctgaagcatacctcgttggattgtttgaagacaccaatctttgcgcgattcatgctaagagagtcactatcatgcctaaggatattcaattgactgctagaatatccaccggaggaaaagctccgaggaagcaattagcgccaaaagcggcgagacaatctgcaccagcaacgggaggagtgaagaagccacacagattccgtccaggaactgttgcgttgagagatattaggaaataccaaaagagtaccgagattttgatcagaaagcttccgtttcagcgacttgttcgtgagatcgctcaagatttcaaaacggatctgaggtttcagagcagtgccgtcgctgctctccaggaagctgctgaggcttaccttgttgggttattcgaagatacaaacctctgtgcgattcacgcaaagagggtgacgatcatgcctaaagagatccaattagcgagaaggattagaggtgagagagctcgaggagagtga

SEQ ID NO: 79234 - protein, 260 aa, Arabidopsis thaliana
  peptide (1)..(260): Ceres Seq. ID no. 12650414
  misc_feature (138)..(256): Pfam Name: Core histone H2A/H2B/H3/H4 Pfam Description: Core histone H2A/H2B/H3/H4
  misc_feature (108)..(257): Homolog of NCBI NO: 34876364 NR Description: similar to CG31613-PA [Rattus norvegicus]
  misc_feature (1)..(96): Homolog of NCBI NO: 34876364 NR Description: similar to CG31613-PA [Rattus norvegicus]
  misc_feature (1)..(131): Homolog of NCBI NO: 37550346 NR Description: similar to histone (15.4 kD) (his-72) [Homo
  misc_feature (125)..(214): Homolog of NCBI NO: 37550346 NR Description: similar to histone (15.4 kD) (his-72) [Homo
  misc_feature (128)..(260): Homolog of NCBI NO: 15238430 NR Description: histone H3; protein id: At5g65350.1 [Arabidopsis
  misc_feature (1)..(131): Homolog of NCBI NO: 15232146 NR Description: histone H3, putative; protein id: At3g27360.1, by cDNA: gi_14335141, supported by cDNA: gi_18655352 [Arabidopsis >gi|15238433|ref|NP_201339.1| histone H3 (sp|P05203); id:
  misc_feature (1)..(131): Homolog of NCBI NO: 1362108 NR Description: histone H3 homolog - common tobacco
  misc_feature (1)..(131): Homolog of NCBI NO: 122087 NR Description: Histone H3 >gi|81849|pir||S04520 histone H3
  misc_feature (1)..(131): Homolog of NCBI NO: 166384 NR Description: histone H3 (H3-1.1)
  misc_feature (2)..(131): Homolog of NCBI NO: 70753 NR Description: histone H3 - garden pea (tentative sequence)
MARTKQTARKSTGGKAPRKQLATKAARKSAPATGGVKKPHRFRPGTVALREIRKYQKSTELLIRKLPFQRLVREIAQDFKTDLRFQSSAVAALQEAAEAYLVGLFEDTNLCAIHAKRVTIMPKDIQLTARISTGGKAPRKQLAPKAARQSAPATGGVKKPHRFRPGTVALRDIRKYQKSTEILIRKLPFQRLVREIAQDFKTDLRFQSSAVAALQEAAEAYLVGLFEDTNLCAIHAKRVTIMPKEIQLARRIRGERARGE

SEQ ID NO: 79235 - protein, 140 aa, Arabidopsis thaliana
  peptide (1)..(140): Ceres Seq. ID no. 12650415
  misc_feature (18)..(136): Pfam Name: Core histone H2A/H2B/H3/H4 Pfam Description: Core histone H2A/H2B/H3/H4
  misc_feature (1)..(137): Homolog of NCBI NO: 34876364 NR Description: similar to CG31613-PA [Rattus norvegicus]
  misc_feature (1)..(11): Homolog of NCBI NO: 37550346 NR Description: similar to histone (15.4 kD) (his-72) [Homo
  misc_feature (5)..(94): Homolog of NCBI NO: 37550346 NR Description: similar to histone (15.4 kD) (his-72) [Homo
  misc_feature (8)..(140): Homolog of NCBI NO: 15238430 NR Description: histone H3; protein id: At5g65350.1 [Arabidopsis
  misc_feature (1)..(11): Homolog of NCBI NO: 15232146 NR Description: histone H3, putative; protein id: At3g27360.1, by cDNA: gi_14335141, supported by cDNA: gi_18655352 [Arabidopsis >gi|15238433|ref|NP_201339.1| histone H3 (sp|P05203); id:
  misc_feature (1)..(11): Homolog of NCBI NO: 1362108 NR Description: histone H3 homolog - common tobacco
  misc_feature (1)..(11): Homolog of NCBI NO: 122087 NR Description: Histone H3 >gi|81849|pir||S04520 histone H3
  misc_feature (1)..(11): Homolog of NCBI NO: 166384 NR Description: histone H3 (H3-1.1)
  misc_feature (1)..(11): Homolog of NCBI NO: 70753 NR Description: histone H3 - garden pea (tentative sequence)
  misc_feature (1)..(11): Homolog of NCBI NO: 122083 NR Description: Histone H3 >gi|70751|pir||HSEAH3 histone H3 -
MPKDIQLTARISTGGKAPRKQLAPKAARQSAPATGGVKKPHRFRPGTVALRDIRKYQKSTEILIRKLPFQRLVREIAQDFKTDLRFQSSAVAALQEAAEAYLVGLFEDTNLCAIHAKRVTIMPKEIQLARRIRGERARGE

SEQ ID NO: 79236 - DNA, 1359 bp, Arabidopsis thaliana
  misc_feature (1)..(1359): Ceres Seq. ID no. 12650441
  misc_feature: MA Experiment ID: 20000180 Result: Down-regulated in Transcription
  misc_feature: MA Experiment 20000180 PARAMETER Experiment Name: At_Germinating_Seeds_P Parameter: Age (hr) Value: 24 vs. 0
  misc_feature: MA Experiment 20000180 PARAMETER Experiment Name: At_Germinating_Seeds_P Parameter: Tissue Value: Germinating Seeds
atggctcctccaatgacgaattgcttaacgttttctctgtcaccaatggagatgttgaaatcaactgatcagtctcacttctcttcttcttacgacgattcttctactccttatctcatcgataacttctatgctttcaaagaagaagctgagatagaagctgctgctgcttcaatggcggattcaacaaccttatctacttttttcgatcattctcagactcagattccaaagctggaagatttcctcggtgattcctttgtccgttactctgataaccaaacagagacccaagactcttcttctctcactccattctacgatccacgtcaccgcaccgttgccgaaggagttacagggttcttctctgatcatcatcagccagatttcaagacgataaactcgggaccagaaatcttcgatgactcaacaacttccaacatcggtggtactcatctctccagtcacgtggtggagtcatcaacgacggcgaagttagggtttaacggtgattgcaccaccaccggaggagttttgtctctaggggttaacaacacatcagatcaacctttgagctgtaacaatggcgagagaggtggaaacagtaacaagaagaaaacagtttctaagaaggaaacatcagatgattcaaagaagaagattgtcgaaacattgggacaaagaacttcaatttatcgtggagtcacccgacatagatggactggaagatacgaagcgcatctatgggataacagctgtaggagggaaggtcaagccagaaaaggacgtcaaggtggatatgacaaggaagatagagcagctagagcctatgacttggcagctttaaaatactggggttctactgctactacaaattttccggtctcgagttattcaaaagaacttgaggaaatgaatcacatgaccaagcaagagtttattgcatctcttaggaggaaaagtagcggtttttcgagaggagcttcaatatatagaggtgtcacaaggcatcatcaacaaggtcgctggcaagcaagaatcggccgtgtcgcaggaaacaaagatctttacctcggaacctttggaggagcagctgcgaaacgccacaaactcaaactcgctcttgaatctccttcttcatcatcctctgaccataacctccaacaacaacagttgcttccgtcctcttctccctcggatcaaaaccctaactcaatcccatgtggcattccatttgagccttcagttctctattaccaccagaacttctttcagcattatcctttggtctctgactctacaattcaagctcctatgaaccaagctgagtttttcttgtggcctaaccagtcttactaa

SEQ ID NO: 79237 - protein, 452 aa, Arabidopsis thaliana
  peptide (1)..(452): Ceres Seq. ID no. 12650442
  misc_feature (229)..(299): Pfam Name: AP2 domain Pfam Description: AP2 domain
  misc_feature (59)..(361): Homolog of NCBI NO: 15238491 NR Description: ovule development protein, putative; protein id:
  misc_feature (362)..(452): Homolog of NCBI NO: 15238491 NR Description: ovule development protein, putative; protein id:
  misc_feature (15)..(451): Homolog of NCBI NO: 15238174 NR Description: ovule development protein, putative; protein id:
  misc_feature (151)..(362): Homolog of NCBI NO: 15237965 NR Description: ovule development protein, putative; protein id: [Arabidopsis thaliana] >gi|11358596|pir||T51580 ovule development
  misc_feature (7)..(362): Homolog of NCBI NO: 21069051 NR Description: AP2/EREBP transcription factor BABY BOOM1 napus] >gi|21069055|gb|AAM33802.1| AP2/EREBP transcription factor
  misc_feature (179)..(362): Homolog of NCBI NO: 21069053 NR Description: AP2/EREBP transcription factor BABY BOOM2
  misc_feature (151)..(362): Homolog of NCBI NO: 21069057 NR Description: BABY BOOM [Arabidopsis thaliana]
  misc_feature (199)..(361): Homolog of NCBI NO: 15242120 NR Description: ovule development protein, putative; protein id: [Arabidopsis thaliana] >gi|9757933|dbj|BAB08476.1| contains to unknown protein~gb|AAD30633.1~gene_id:MSF19.5 [Arabidopsis
  misc_feature (159)..(361): Homolog of NCBI NO: 21304227 NR Description: ovule development aintegumenta-like protein BNM3
  misc_feature (159)..(361): Homolog of NCBI NO: 34907686 NR Description: putative ovule development protein
MAPPMTNCLTFSLSPMEMLKSTDQSHFSSSYDDSSTPYLIDNFYAFKEEAEIEAAAASMADSTTLSTFFDHSQTQIPKLEDFLGDSFVRYSDNQTETQDSSSLTPFYDPRHRTVAEGVTGFFSDHHQPDFKTINSGPEIFDDSTTSNIGGTHLSSHVVESSTTAKLGFNGDCTTTGGVLSLGVNNTSDQPLSCNNGERGGNSNKKKTVSKKETSDDSKKKIVETLGQRTSIYRGVTRHRWTGRYEAHLWDNSCRREGQARKGRQGGYDKEDRAARAYDLAALKYWGSTATTNFPVSSYSKELEEMNHMTKQEFIASLRRKSSGFSRGASIYRGVTRHHQQGRWQARIGRVAGNKDLYLGTFGGAAAKRHKLKLALESPSSSSSDHNLQQQQLLPSSSPSDQNPNSIPCGIPFEPSVLYYHQNFFQHYPLVSDSTIQAPMNQAEFFLWPNQSY

SEQ ID NO: 79238 - protein, 448 aa, Arabidopsis thaliana
  peptide (1)..(448): Ceres Seq. ID no. 12650443
  misc_feature (225)..(295): Pfam Name: AP2 domain Pfam Description: AP2 domain
  misc_feature (55)..(357): Homolog of NCBI NO: 15238491 NR Description: ovule development protein, putative; protein id:
  misc_feature (358)..(448): Homolog of NCBI NO: 15238491 NR Description: ovule development protein, putative; protein id:
  misc_feature (11)..(447): Homolog of NCBI NO: 15238174 NR Description: ovule development protein, putative; protein id:
  misc_feature (147)..(358): Homolog of NCBI NO: 15237965 NR Description: ovule development protein, putative; protein id: [Arabidopsis thaliana] >gi|11358596|pir||T51580 ovule development
  misc_feature (3)..(358): Homolog of NCBI NO: 21069051 NR Description: AP2/EREBP transcription factor BABY BOOM1 napus] >gi|21069055|gb|AAM33802.1| AP2/EREBP transcription factor
  misc_feature (175)..(358): Homolog of NCBI NO: 21069053 NR Description: AP2/EREBP transcription factor BABY BOOM2
  misc_feature (147)..(358): Homolog of NCBI NO: 21069057 NR Description: BABY BOOM [Arabidopsis thaliana]
  misc_feature (195)..(357): Homolog of NCBI NO: 15242120 NR Description: ovule development protein, putative; protein id: [Arabidopsis thaliana] >gi|9757933|dbj|BAB08476.1| contains to unknown protein~gb|AAD30633.1~gene_id:MSF19.5 [Arabidopsis
  misc_feature (155)..(357): Homolog of NCBI NO: 21304227 NR Description: ovule development aintegumenta-like protein BNM3
  misc_feature (155)..(357): Homolog of NCBI NO: 34907686 NR Description: putative ovule development protein
MTNCLTFSLSPMEMLKSTDQSHFSSSYDDSSTPYLIDNFYAFKEEAEIEAAAASMADSTTLSTFFDHSQTQIPKLEDFLGDSFVRYSDNQTETQDSSSLTPFYDPRHRTVAEGVTGFFSDHHQPDFKTINSGPEIFDDSTTSNIGGTHLSSHVVESSTTAKLGFNGDCTTTGGVLSLGVNNTSDQPLSCNNGERGGNSNKKKTVSKKETSDDSKKKIVETLGQRTSIYRGVTRHRWTGRYEAHLWDNSCRREGQARKGRQGGYDKEDRAARAYDLAALKYWGSTATTNFPVSSYSKELEEMNHMTKQEFIASLRRKSSGFSRGASIYRGVTRHHQQGRWQARIGRVAGNKDLYLGTFGGAAAKRHKLKLALESPSSSSSDHNLQQQQLLPSSSPSDQNPNSIPCGIPFEPSVLYYHQNFFQHYPLVSDSTIQAPMNQAEFFLWPNQSY

SEQ ID NO: 79239 - protein, 437 aa, Arabidopsis thaliana
  peptide (1)..(437): Ceres Seq. ID no. 12650444
  misc_feature (214)..(284): Pfam Name: AP2 domain Pfam Description: AP2 domain
  misc_feature (44)..(346): Homolog of NCBI NO: 15238491 NR Description: ovule development protein, putative; protein id:
  misc_feature (347)..(437): Homolog of NCBI NO: 15238491 NR Description: ovule development protein, putative; protein id:
  misc_feature (1)..(436): Homolog of NCBI NO: 15238174 NR Description: ovule development protein, putative; protein id:
  misc_feature (136)..(347): Homolog of NCBI NO: 15237965 NR Description: ovule development protein, putative; protein id: [Arabidopsis thaliana] >gi|11358596|pir||T51580 ovule development
  misc_feature (1)..(347): Homolog of NCBI NO: 21069051 NR Description: AP2/EREBP transcription factor BABY BOOM1 napus] >gi|21069055|gb|AAM33802.1| AP2/EREBP transcription factor
  misc_feature (164)..(347): Homolog of NCBI NO: 21069053 NR Description: AP2/EREBP transcription factor BABY BOOM2
  misc_feature (136)..(347): Homolog of NCBI NO: 21069057 NR Description: BABY BOOM [Arabidopsis thaliana]
  misc_feature (184)..(346): Homolog of NCBI NO: 15242120 NR Description: ovule development protein, putative; protein id: [Arabidopsis thaliana] >gi|9757933|dbj|BAB08476.1| contains to unknown protein~gb|AAD30633.1~gene_id:MSF19.5 [Arabidopsis
  misc_feature (144)..(346): Homolog of NCBI NO: 21304227 NR Description: ovule development aintegumenta-like protein BNM3
  misc_feature (144)..(346): Homolog of NCBI NO: 34907686 NR Description: putative ovule development protein
MEMLKSTDQSHFSSSYDDSSTPYLIDNFYAFKEEAEIEAAAASMADSTTLSTFFDHSQTQIPKLEDFLGDSFVRYSDNQTETQDSSSLTPFYDPRHRTVAEGVTGFFSDHHQPDFKTINSGPEIFDDSTTSNIGGTHLSSHVVESSTTAKLGFNGDCTTTGGVLSLGVNNTSDQPLSCNNGERGGNSNKKKTVSKKETSDDSKKKIVETLGQRTSIYRGVTRHRWTGRYEAHLWDNSCRREGQARKGRQGGYDKEDRAARAYDLAALKYWGSTATTNFPVSSYSKELEEMNHMTKQEFIASLRRKSSGFSRGASIYRGVTRHHQQGRWQARIGRVAGNKDLYLGTFGGAAAKRHKLKLALESPSSSSSDHNLQQQQLLPSSSPSDQNPNSIPCGIPFEPSVLYYHQNFFQHYPLVSDSTIQAPMNQAEFFLWPNQSY

SEQ ID NO: 79240 - DNA, 1410 bp, Arabidopsis thaliana
  misc_feature (1)..(1410): Ceres Seq. ID no. 12650445
  misc_feature: MA Experiment ID: 20000179 Result: Down-regulated in Transcription
  misc_feature: MA Experiment 20000179 PARAMETER Experiment Name: At_Germinating_Seeds_P Parameter: Age (hr) Value: 6 vs. 0
  misc_feature: MA Experiment 20000179 PARAMETER Experiment Name: At_Germinating_Seeds_P Parameter: Tissue Value: Germinating Seeds
  misc_feature: MA Experiment ID: 20000180 Result: Down-regulated in Transcription
  misc_feature: MA Experiment 20000180 PARAMETER Experiment Name: At_Germinating_Seeds_P Parameter: Age (hr) Value: 24 vs. 0
  misc_feature: MA Experiment 20000180 PARAMETER Experiment Name: At_Germinating_Seeds_P Parameter: Tissue Value: Germinating Seeds
  misc_feature: MA Experiment ID: 20000185 Result: Up-regulated in Transcription
  misc_feature: MA Experiment 20000185 PARAMETER Experiment Name: At_Roots__P Parameter: Age (day) Value: 7 vs. 21
  misc_feature: MA Experiment 20000185 PARAMETER Experiment Name: At_Roots__P Parameter: Organism Value: A. thaliana
  misc_feature: MA Experiment 20000185 PARAMETER Experiment Name: At_Roots__P Parameter: Tissue Value: Roots vs. Whole Plant
  misc_feature: MA Experiment ID: 20000264 Result: Up-regulated in Transcription
  misc_feature: MA Experiment 20000264 PARAMETER Experiment Name: At_Open_Flower_P Parameter: Age (day) Value: 21
  misc_feature: MA Experiment 20000264 PARAMETER Experiment Name: At_Open_Flower_P Parameter: Plant Line Value: WS
  misc_feature: MA Experiment 20000264 PARAMETER Experiment Name: At_Open_Flower_P Parameter: Tissue Value: Open Flower vs. Whole Plant
  misc_feature: MA Experiment ID: 20000286 Result: Up-regulated in Transcription
  misc_feature: MA Experiment 20000286 PARAMETER Experiment Name: At_Open_Flower_P Parameter: Age (day) Value: 21
  misc_feature: MA Experiment 20000286 PARAMETER Experiment Name: At_Open_Flower_P Parameter: Plant Line Value: WS
  misc_feature: MA Experiment 20000286 PARAMETER Experiment Name: At_Open_Flower_P Parameter: Tissue Value: Half Open vs. Whole Plant
  misc_feature: MA Experiment ID: 20000439 Result: Up-regulated in Transcription
  misc_feature: MA Experiment 20000439 PARAMETER Experiment Name: At_Roots__P Parameter: Age (day) Value: 14 vs. 21
  misc_feature: MA Experiment 20000439 PARAMETER Experiment Name: At_Roots__P Parameter: Organism Value: A. thaliana
  misc_feature: MA Experiment 20000439 PARAMETER Experiment Name: At_Roots__P Parameter: Tissue Value: Roots vs. Whole Plant
  misc_feature: MA Experiment ID: 20001773 Result: Up-regulated in Transcription
  misc_feature: MA Experiment 20001773 PARAMETER Experiment Name: At_Far-red-enriched-adult_P Parameter: Age (day) Value: 30
  misc_feature: MA Experiment 20001773 PARAMETER Experiment Name: At_Far-red-enriched-adult_P Parameter: Light Value: Far-red enriched vs. White
  misc_feature: MA Experiment 20001773 PARAMETER Experiment Name: At_Far-red-enriched-adult_P Parameter: Organism Value: A. thaliana
  misc_feature: MA Experiment 20001773 PARAMETER Experiment Name: At_Far-red-enriched-adult_P Parameter: Plant Line Value: Columbia
  misc_feature: MA Experiment 20001773 PARAMETER Experiment Name: At_Far-red-enriched-adult_P Parameter: Timepoint (hr) Value: 48
  misc_feature: MA Experiment 20001773 PARAMETER Experiment Name: At_Far-red-enriched-adult_P Parameter: Tissue Value: Aerial
  misc_feature: MA Experiment ID: 20001910 Result: Up-regulated in Transcription
  misc_feature: MA Experiment 20001910 PARAMETER Experiment Name: At_Drought_Reproduction_P Parameter: Age (day) Value: 37
  misc_feature: MA Experiment 20001910 PARAMETER Experiment Name: At_Drought_Reproduction_P Parameter: Organism Value: A. thaliana
  misc_feature: MA Experiment 20001910 PARAMETER Experiment Name: At_Drought_Reproduction_P Parameter: Plant Line Value: WS
  misc_feature: MA Experiment 20001910 PARAMETER Experiment Name: At_Drought_Reproduction_P Parameter: Timepoint (day) Value: 7
  misc_feature: MA Experiment 20001910 PARAMETER Experiment Name: At_Drought_Reproduction_P Parameter: Tissue Value: Flowers
  misc_feature: MA Experiment 20001910 PARAMETER Experiment Name: At_Drought_Reproduction_P Parameter: Treatment Value: Drought vs. No Drought
atggctgttgaagagatggagaagaagatcaaaggaagccaagagacggagctacataaaaacgacttatcaatcgaagacccatctccaagatgcgtgcttgaaattccggtaatgagttcagattccgataacagcagcagttgtagctcgtgttctcctgataaatcatcgtcgccattatcaacaactcctccaaacgtttcgtcttttcatcaatggaacaagatgatcgaatccatcaagaagaaatcaattaggagattctctgtcattcctctcctcgctagctacgagctcacccgcaaaaagaaacaaccgaaactatctccttgttcagaaaacgacttcgattgtgatcaaatcctcgtcgctaaaccttcgtggcgtaatttcaccttcgacgaactcgttgccgccaccgacaattttaatcccggtaaagttcaaatcttgaaaagacgatattatccccaaaagaacatgattgggaaaggaggacatgcggaggtgtacaaaggggttttaccggacggagagactgtggcgatcaagaagctgacgagacatgcaaaggaagtagaagaacgagtcagtgatttcttatcggagcttgggataatcgcacatgttaaccatccaaacgcagctaggcttcgtggtttcagttgtgatcgcggtttgcattttgtgcttgagtactcttctcatggcagtcttgcttctctactctttggatcagaggagtgtttggattggaagaaacggtataaagtggctatgggtatagctgatggtttgagttatcttcataacgattgccctcgacggattattcaccgagacatcaaagcttccaacattttgctctctcaagactacgaagctcagatttcggattttggactagctaagtggctcccagagcattggcctcatcacattgttttccctatcgaaggcacattcggatatctagctccagagtacttcatgcacgggattgtcgatgagaagacggatgtttttgcttttggtgtattgcttctagagatcataactggtcgtcgagctgttgataccgatagccggcaaagcatagttatgtgggcaaaacctcttctggagaagaacaacatggaagaaatagttgatcctcagctaggcaatgactttgatgaaaccgagatgaaacgagtgatgcaaacagcttcaatgtgcatacaccatgtatccactatgcgtcctgacatgaaccggttggttcagctgttgcgcggagatgaccagttagctgaacaaaaaccaggtggagcaagaacagtgagtctcgacgattgcgacttagatcacacctcttcctcttaccttaacgatctcactcgacatagacagctcttaatggagtaa

SEQ ID NO: 79241 - protein, 469 aa, Arabidopsis thaliana
  peptide (1)..(469): Ceres Seq. ID no. 12650446
  misc_feature (1)..(469): Homolog of NCBI NO: 30698132 NR Description: protein kinase, putative [Arabidopsis thaliana]
  misc_feature (1)..(469): Homolog of NCBI NO: 26452369 NR Description: unknown protein [Arabidopsis thaliana]
  misc_feature (1)..(469): Homolog of NCBI NO: 15810235 NR Description: putative Pto kinase interactor [Arabidopsis
  misc_feature (1)..(469): Homolog of NCBI NO: 18416299 NR Description: Pto kinase interactor - like protein; protein id: supported by cDNA: gi_15810234 [Arabidopsis thaliana]
  misc_feature (1)..(469): Homolog of NCBI NO: 11358733 NR Description: Pto kinase interactor-like protein - Arabidopsis
  misc_feature (36)..(468): Homolog of NCBI NO: 30687061 NR Description: protein kinase family [Arabidopsis thaliana] putative protein kinase [Arabidopsis thaliana]
  misc_feature (13)..(468): Homolog of NCBI NO: 22330852 NR Description: putative serine/threonine protein kinase; protein At3g05140.1, supported by cDNA: gi_19698986 [Arabidopsis >gi|19698987|gb|AAL91229.1| putative serine/threonine protein
  misc_feature (57)..(428): Homolog of NCBI NO: 15239245 NR Description: serine/threonine protein kinase-like; protein id: [Arabidopsis thaliana] >gi|9758799|dbj|BAB09252.1|
  misc_feature (126)..(448): Homolog of NCBI NO: 40253745 NR Description: SERK1 protein-like [Oryza sativa (japonica
  misc_feature (22)..(338): Homolog of NCBI NO: 6729024 NR Description: putative serine/threonine protein kinase
MAVEEMEKKIKGSQETELHKNDLSIEDPSPRCVLEIPVMSSDSDNSSSCSSCSPDKSSSPLSTTPPNVSSFHQWNKMIESIKKKSIRRFSVIPLLASYELTRKKKQPKLSPCSENDFDCDQILVAKPSWRNFTFDELVAATDNFNPGKVQILKRRYYPQKNMIGKGGHAEVYKGVLPDGETVAIKKLTRHAKEVEERVSDFLSELGIIAHVNHPNAARLRGFSCDRGLHFVLEYSSHGSLASLLFGSEECLDWKKRYKVAMGIADGLSYLHNDCPRRIIHRDIKASNILLSQDYEAQISDFGLAKWLPEHWPHHIVFPIEGTFGYLAPEYFMHGIVDEKTDVFAFGVLLLEIITGRRAVDTDSRQSIVMWAKPLLEKNNMEEIVDPQLGNDFDETEMKRVMQTASMCIHHVSTMRPDMNRLVQLLRGDDQLAEQKPGGARTVSLDDCDLDHTSSSYLNDLTRHRQLLME

SEQ ID NO: 79242 - protein, 464 aa, Arabidopsis thaliana
  peptide (1)..(464): Ceres Seq. ID no. 12650447
  misc_feature (1)..(464): Homolog of NCBI NO: 30698132 NR Description: protein kinase, putative [Arabidopsis thaliana]
  misc_feature (1)..(464): Homolog of NCBI NO: 26452369 NR Description: unknown protein [Arabidopsis thaliana]
  misc_feature (1)..(464): Homolog of NCBI NO: 15810235 NR Description: putative Pto kinase interactor [Arabidopsis
  misc_feature (1)..(464): Homolog of NCBI NO: 18416299 NR Description: Pto kinase interactor - like protein; protein id: supported by cDNA: gi_15810234 [Arabidopsis thaliana]
  misc_feature (1)..(464): Homolog of NCBI NO: 11358733 NR Description: Pto kinase interactor-like protein - Arabidopsis
  misc_feature (31)..(463): Homolog of NCBI NO: 30687061 NR Description: protein kinase family [Arabidopsis thaliana] putative protein kinase [Arabidopsis thaliana]
  misc_feature (8)..(463): Homolog of NCBI NO: 22330852 NR Description: putative serine/threonine protein kinase; protein At3g05140.1, supported by cDNA: gi_19698986 [Arabidopsis >gi|19698987|gb|AAL91229.1| putative serine/threonine protein
  misc_feature (52)..(423): Homolog of NCBI NO: 15239245 NR Description: serine/threonine protein kinase-like; protein id: [Arabidopsis thaliana] >gi|9758799|dbj|BAB09252.1|
  misc_feature (121)..(443): Homolog of NCBI NO: 40253745 NR Description: SERK1 protein-like [Oryza sativa (japonica
  misc_feature (17)..(333): Homolog of NCBI NO: 6729024 NR Description: putative serine/threonine protein kinase
MEKKIKGSQETELHKNDLSIEDPSPRCVLEIPVMSSDSDNSSSCSSCSPDKSSSPLSTTPPNVSSFHQWNKMIESIKKKSIRRFSVIPLLASYELTRKKKQPKLSPCSENDFDCDQILVAKPSWRNFTFDELVAATDNFNPGKVQILKRRYYPQKNMIGKGGHAEVYKGVLPDGETVAIKKLTRHAKEVEERVSDFLSELGIIAHVNHPNAARLRGFSCDRGLHFVLEYSSHGSLASLLFGSEECLDWKKRYKVAMGIADGLSYLHNDCPRRIIHRDIKASNILLSQDYEAQISDFGLAKWLPEHWPHHIVFPIEGTFGYLAPEYFMHGIVDEKTDVFAFGVLLLEIITGRRAVDTDSRQSIVMWAKPLLEKNNMEEIVDPQLGNDFDETEMKRVMQTASMCIHHVSTMRPDMNRLVQLLRGDDQLAEQKPGGARTVSLDDCDLDHTSSSYLNDLTRHRQLLME

SEQ ID NO: 79243 - protein, 431 aa, Arabidopsis thaliana
  peptide (1)..(431): Ceres Seq. ID no. 12650448
  misc_feature (1)..(431): Homolog of NCBI NO: 30698132 NR Description: protein kinase, putative [Arabidopsis thaliana]
  misc_feature (1)..(431): Homolog of NCBI NO: 26452369 NR Description: unknown protein [Arabidopsis thaliana]
  misc_feature (1)..(431): Homolog of NCBI NO: 15810235 NR Description: putative Pto kinase interactor [Arabidopsis
  misc_feature (1)..(431): Homolog of NCBI NO: 18416299 NR Description: Pto kinase interactor - like protein; protein id: supported by cDNA: gi_15810234 [Arabidopsis thaliana]
  misc_feature (1)..(431): Homolog of NCBI NO: 11358733 NR Description: Pto kinase interactor-like protein - Arabidopsis
  misc_feature (1)..(430): Homolog of NCBI NO: 30687061 NR Description: protein kinase family [Arabidopsis thaliana] putative protein kinase [Arabidopsis thaliana]
  misc_feature (1)..(430): Homolog of NCBI NO: 22330852 NR Description: putative serine/threonine protein kinase; protein At3g05140.1, supported by cDNA: gi_19698986 [Arabidopsis >gi|19698987|gb|AAL91229.1| putative serine/threonine protein
  misc_feature (19)..(390): Homolog of NCBI NO: 15239245 NR Description: serine/threonine protein kinase-like; protein id: [Arabidopsis thaliana] >gi|9758799|dbj|BAB09252.1|
  misc_feature (88)..(410): Homolog of NCBI NO: 40253745 NR Description: SERK1 protein-like [Oryza sativa (japonica
  misc_feature (1)..(300): Homolog of NCBI NO: 6729024 NR Description: putative serine/threonine protein kinase
MSSDSDNSSSCSSCSPDKSSSPLSTTPPNVSSFHQWNKMIESIKKKSIRRFSVIPLLASYELTRKKKQPKLSPCSENDFDCDQILVAKPSWRNFTFDELVAATDNFNPGKVQILKRRYYPQKNMIGKGGHAEVYKGVLPDGETVAIKKLTRHAKEVEERVSDFLSELGIIAHVNHPNAARLRGFSCDRGLHFVLEYSSHGSLASLLFGSEECLDWKKRYKVAMGIADGLSYLHNDCPRRIIHRDIKASNILLSQDYEAQISDFGLAKWLPEHWPHHIVFPIEGTFGYLAPEYFMHGIVDEKTDVFAFGVLLLEIITGRRAVDTDSRQSIVMWAKPLLEKNNMEEIVDPQLGNDFDETEMKRVMQTASMCIHHVSTMRPDMNRLVQLLRGDDQLAEQKPGGARTVSLDDCDLDHTSSSYLNDLTRHRQLLME

SEQ ID NO: 79244 - DNA, 2211 bp, Arabidopsis thaliana
  misc_feature (1)..(2211): Ceres Seq. ID no. 12650453
  misc_feature: MA Experiment ID: 20000182 Result: Up-regulated in Transcription
  misc_feature: MA Experiment 20000182 PARAMETER Experiment Name: At_2mM_SA_P Parameter: Age (day) Value: 14
  misc_feature: MA Experiment 20000182 PARAMETER Experiment Name: At_2mM_SA_P Parameter: Organism Value: A. thaliana
  misc_feature: MA Experiment 20000182 PARAMETER Experiment Name: At_2mM_SA_P Parameter: Plant Line Value: WS
  misc_feature: MA Experiment 20000182 PARAMETER Experiment Name: At_2mM_SA_P Parameter: Timepoint (hr) Value: 6
  misc_feature: MA Experiment 20000182 PARAMETER Experiment Name: At_2mM_SA_P Parameter: Tissue Value: Aerial
  misc_feature: MA Experiment 20000182 PARAMETER Experiment Name: At_2mM_SA_P Parameter: Treatment Value: 2mM SA vs. No Treatment
  misc_feature: MA Experiment ID: 20000185 Result: Down-regulated in Transcription
  misc_feature: MA Experiment 20000185 PARAMETER Experiment Name: At_Roots__P Parameter: Age (day) Value: 7 vs. 21
  misc_feature: MA Experiment 20000185 PARAMETER Experiment Name: At_Roots__P Parameter: Organism Value: A. thaliana
  misc_feature: MA Experiment 20000185 PARAMETER Experiment Name: At_Roots__P Parameter: Tissue Value: Roots vs. Whole Plant
  misc_feature: MA Experiment ID: 20000227 Result: Down-regulated in Transcription
  misc_feature: MA Experiment 20000227 PARAMETER Experiment Name: At_Root-Tips-vs-Tops_P Parameter: Tissue Value: Root Tips vs. Root Tops
  misc_feature: MA Experiment ID: 20000234 Result: Down-regulated in Transcription
  misc_feature: MA Experiment 20000234 PARAMETER Experiment Name: At_Siliques_P Parameter: Age (day) Value: 21
  misc_feature: MA Experiment 20000234 PARAMETER Experiment Name: At_Siliques_P Parameter: Organism Value: A. thaliana
  misc_feature: MA Experiment 20000234 PARAMETER Experiment Name: At_Siliques_P Parameter: Plant Line Value: WS
  misc_feature: MA Experiment 20000234 PARAMETER Experiment Name: At_Siliques_P Parameter: Tissue Value: Less Than 5mm Siliques vs. Whole Plant
  misc_feature: MA Experiment ID: 20000235 Result: Down-regulated in Transcription
  misc_feature: MA Experiment 20000235 PARAMETER Experiment Name: At_Siliques_P Parameter: Age (day) Value: 21
  misc_feature: MA Experiment 20000235 PARAMETER Experiment Name: At_Siliques_P Parameter: Organism Value: A. thaliana
  misc_feature: MA Experiment 20000235 PARAMETER Experiment Name: At_Siliques_P Parameter: Plant Line Value: WS
  misc_feature: MA Experiment 20000235 PARAMETER Experiment Name: At_Siliques_P Parameter: Tissue Value: 5-10mm Siliques vs. Whole Plant
  misc_feature: MA Experiment ID: 20000438 Result: Down-regulated in Transcription
  misc_feature: MA Experiment 20000438 PARAMETER Experiment Name: At_Shoots__P Parameter: Age (day) Value: 14
  misc_feature: MA Experiment 20000438 PARAMETER Experiment Name: At_Shoots__P Parameter: Tissue Value: Shoots vs. Whole Plant
  misc_feature: MA Experiment ID: 20000439 Result: Down-regulated in Transcription
  misc_feature: MA Experiment 20000439 PARAMETER Experiment Name: At_Roots__P Parameter: Age (day) Value: 14 vs. 21
  misc_feature: MA Experiment 20000439 PARAMETER Experiment Name: At_Roots__P Parameter: Organism Value: A. thaliana
  misc_feature: MA Experiment 20000439 PARAMETER Experiment Name: At_Roots__P Parameter: Tissue Value: Roots vs. Whole Plant
  misc_feature: MA Experiment ID: 20000794 Result: Down-regulated in Transcription
  misc_feature: MA Experiment 20000794 PARAMETER Experiment Name: At_Petals_P Parameter: Age (day) Value: 23-25 days
  misc_feature: MA Experiment 20000794 PARAMETER Experiment Name: At_Petals_P Parameter: Plant Line Value: WS
  misc_feature: MA Experiment 20000794 PARAMETER Experiment Name: At_Petals_P Parameter: Tissue Value: Petals vs. Whole plant
  misc_feature: MA Experiment ID: 20001904 Result: Down-regulated in Transcription
  misc_feature: MA Experiment 20001904 PARAMETER Experiment Name: At_Drought_Reproduction_P Parameter: Age (day) Value: 37
  misc_feature: MA Experiment 20001904 PARAMETER Experiment Name: At_Drought_Reproduction_P Parameter: Organism Value: A. thaliana
  misc_feature: MA Experiment 20001904 PARAMETER Experiment Name: At_Drought_Reproduction_P Parameter: Plant Line Value: WS
  misc_feature: MA Experiment 20001904 PARAMETER Experiment Name: At_Drought_Reproduction_P Parameter: Timepoint (day) Value: 7
  misc_feature: MA Experiment 20001904 PARAMETER Experiment Name: At_Drought_Reproduction_P Parameter: Tissue Value: Rosettes
  misc_feature: MA Experiment 20001904 PARAMETER Experiment Name: At_Drought_Reproduction_P Parameter: Treatment Value: Drought vs. No Drought
atggaaacgagaagtcgaagcccaccgtgtcgtactctgaaaaatctgagaaagttcctcctaggtcgagatcaaaaccttcctaggtgctcttcgctttcactgcccccaatctcttccttctccgcttgtgttctgaaatcatcatcgattggggctgacatagaggatgtgggagaagtaattcaaccaatcacgaatcatcattcatcccgcgatcaggcaatcttcgtttttggagcagaagccagattctacaggacttgcctgatacagcacacgttgatatcatcaggctaccgatgctgttttcgacaaggtgatcccggggacatattttaccacggggatgcaactcccgatgaagatggaacagtgaacttcaacaacgctgaacaaacatctcaggttggttggattacttattcaaagaaggtgcctatatggagtcataaaactggtaaggcttcagatttcagcaccagtttctccttcaaaatcgatgctcgtaatctttcagcagatggtcatggaatctgtttctttcttgctcctatgggagctcaactacctgcatactcagttggtggtttcttgaatttgttcactcggaagaataattactcatcttcgtttccgctagttcatgttgaatttgacacgtttaacaatccaggatgggatcctaatgatgttggatctcatgttgggatcaataacaactctcttgtttcttccaactacacttcttggaatgcaagctctcacagccaagatatttgtcatgcaaagatctcttatgattccgtgaccaagaatttaagtgtgacttgggcttatgagctaacagcaacctctgatcctaaggagagttcaagcctttcttacatcatcgacctcgctaaggttctgccatcagatgttatgttcgggtttatagctgccgctgggacaaacacagaggaacatagacttttatcatgggagctcagttcaagtttggacagcgacaaagccgatagcaggataggactagtaattggcatttcggcttccgggtttgtttttctgacgtttatggtcatcacaaccgtggtggtttggtcacggaagcaaagaaagaagaaagaaagagatatagaaaacatgatatcgataaacaaagaccttgaaagggaagcaggaccaagaaagttttcttataaggatcttgtgtcagcaaccaacagattctcaagccatagaaagctaggtgaaggaggatttggagcagtttatgaaggaaacttgaaagaaatcaatacaatggttgcggtgaagaaactatccggtgattcaaggcagggaaagaacgagtttttaaacgaagttaagatcatcagcaaactgagacatcgaaacctcgtgcagctcatcggttggtgtaatgagaaaaatgagttcttgctgatatatgagttagttccaaatggtagcttgaactctcacctctttgggaaaagacccaatttactttcttgggacataaggtacaagataggtcttggtttagcctctgctctgctttatcttcatgaagaatgggatcaatgtgtactgcacagagacatcaaggcaagtaatataatgcttgacagtgaattcaatgtaaagttaggtgatttcgggttggctcggctaatgaaccatgaacttggttcccatacaacggggttggctggaacttttgggtacatggcacctgaatatgtaatgaaaggaagtgcgagtaaagaatctgatatatatagctttggaattgttttactagagattgtcacagggagaaaatcgctggaacgtacacaagaagataacagtgatacagagagtgatgatgagaagagtctagtggagaaagtttgggagctttatggaaaacaagaactgatcacttcatgtgttgatgacaaattgggtgaggatttcgacaagaaagaagctgaatgtcttctggttttagggttatggtgtgctcatcctgataaaaactcgagaccttcgataaaacaagggatccaagtcatgaattttgagtcaccattgcctgatcttccattgaagaggcctgttgctatgtattacatctcgactactacttcttcttcttctccctcagttaactcaaatggagtttctgtaacgttctcaggcatcgagtatggtcgttaa

SEQ ID NO: 79245 - protein, 736 aa, Arabidopsis thaliana
  peptide (1)..(736): Ceres Seq. ID no. 12650454
  misc_feature (108)..(736): Homolog of NCBI NO: 15238190 NR Description: lectin-like protein kinase - like; protein id:
  misc_feature (130)..(724): Homolog of NCBI NO: 33146777 NR Description: putative lectin-like protein kinase [Oryza sativa
  misc_feature (134)..(731): Homolog of NCBI NO: 15289871 NR Description: putative receptor protein kinase-like protein
  misc_feature (114)..(722): Homolog of NCBI NO: 38112431 NR Description: lectin-like receptor kinase 1;1 [Medicago
  misc_feature (196)..(731): Homolog of NCBI NO: 33146780 NR Description: putative lectin-like protein kinase [Oryza sativa
  misc_feature (207)..(707): Homolog of NCBI NO: 21743149 NR Description: OSJNBb0096E05.1 [Oryza sativa (japonica
  misc_feature (207)..(707): Homolog of NCBI NO: 38568031 NR Description: OSJNBa0065J03.1 [Oryza sativa (japonica
  misc_feature (331)..(712): Homolog of NCBI NO: 15242646 NR Description: receptor like protein kinase; protein id: supported by cDNA: gi_20260625 [Arabidopsis thaliana]
  misc_feature (116)..(335): Homolog of NCBI NO: 15242646 NR Description: receptor like protein kinase; protein id: supported by cDNA: gi_20260625 [Arabidopsis thaliana]
  misc_feature (88)..(697): Homolog of NCBI NO: 38112425 NR Description: lectin-like receptor kinase 7;1 [Medicago
METRSRSPPCRTLKNLRKFLLGRDQNLPRCSSLSLPPISSFSACVLKSSSIGADIEDVGEVIQPITNHHSSRDQAIFVFGAEARFYRTCLIQHTLISSGYRCCFRQGDPGDIFYHGDATPDEDGTVNFNNAEQTSQVGWITYSKKVPIWSHKTGKASDFSTSFSFKIDARNLSADGHGICFFLAPMGAQLPAYSVGGFLNLFTRKNNYSSSFPLVHVEFDTFNNPGWDPNDVGSHVGINNNSLVSSNYTSWNASSHSQDICHAKISYDSVTKNLSVTWAYELTATSDPKESSSLSYIIDLAKVLPSDVMFGFIAAAGTNTEEHRLLSWELSSSLDSDKADSRIGLVIGISASGFVFLTFMVITTVVVWSRKQRKKKERDIENMISINKDLEREAGPRKFSYKDLVSATNRFSSHRKLGEGGFGAVYEGNLKEINTMVAVKKLSGDSRQGKNEFLNEVKIISKLRHRNLVQLIGWCNEKNEFLLIYELVPNGSLNSHLFGKRPNLLSWDIRYKIGLGLASALLYLHEEWDQCVLHRDIKASNIMLDSEFNVKLGDFGLARLMNHELGSHTTGLAGTFGYMAPEYVMKGSASKESDIYSFGIVLLEIVTGRKSLERTQEDNSDTESDDEKSLVEKVWELYGKQELITSCVDDKLGEDFDKKEAECLLVLGLWCAHPDKNSRPSIKQGIQVMNFESPLPDLPLKRPVAMYYISTTTSSSSPSVNSNGVSVTFSGIEYGR

SEQ ID NO: 79246 - protein, 551 aa, Arabidopsis thaliana; identical to SEQ ID NO: 73007
  peptide (1)..(551): Ceres Seq. ID no. 12650455
  misc_feature (1)..(551): Homolog of NCBI NO: 15238190 NR Description: lectin-like protein kinase - like; protein id:
  misc_feature (1)..(539): Homolog of NCBI NO: 33146777 NR Description: putative lectin-like protein kinase [Oryza sativa
  misc_feature (1)..(546): Homolog of NCBI NO: 15289871 NR Description: putative receptor protein kinase-like protein
  misc_feature (1)..(537): Homolog of NCBI NO: 38112431 NR Description: lectin-like receptor kinase 1;1 [Medicago
  misc_feature (11)..(546): Homolog of NCBI NO: 33146780 NR Description: putative lectin-like protein kinase [Oryza sativa
  misc_feature (22)..(522): Homolog of NCBI NO: 21743149 NR Description: OSJNBb0096E05.1 [Oryza sativa (japonica
  misc_feature (22)..(522): Homolog of NCBI NO: 38568031 NR Description: OSJNBa0065J03.1 [Oryza sativa (japonica
  misc_feature (146)..(527): Homolog of NCBI NO: 15242646 NR Description: receptor like protein kinase; protein id: supported by cDNA: gi_20260625 [Arabidopsis thaliana]
  misc_feature (1)..(150): Homolog of NCBI NO: 15242646 NR Description: receptor like protein kinase; protein id: supported by cDNA: gi_20260625 [Arabidopsis thaliana]
  misc_feature (1)..(512): Homolog of NCBI NO: 38112425 NR Description: lectin-like receptor kinase 7;1 [Medicago

SEQ ID NO: 79247 - protein, 428 aa, Arabidopsis thaliana
  peptide (1)..(428): Ceres Seq. ID no. 12650456
  misc_feature (1)..(428): Homolog of NCBI NO: 15238190 NR Description: lectin-like protein kinase - like; protein id:
  misc_feature (1)..(416): Homolog of NCBI NO: 33146777 NR Description: putative lectin-like protein kinase [Oryza sativa
  misc_feature (1)..(423): Homolog of NCBI NO: 15289871 NR Description: putative receptor protein kinase-like protein
  misc_feature (1)..(414): Homolog of NCBI NO: 38112431 NR Description: lectin-like receptor kinase 1;1 [Medicago
  misc_feature (1)..(423): Homolog of NCBI NO: 33146780 NR Description: putative lectin-like protein kinase [Oryza sativa
  misc_feature (1)..(399): Homolog of NCBI NO: 21743149 NR Description: OSJNBb0096E05.1 [Oryza sativa (japonica
  misc_feature (1)..(399): Homolog of NCBI NO: 38568031 NR Description: OSJNBa0065J03.1 [Oryza sativa (japonica
  misc_feature (23)..(404): Homolog of NCBI NO: 15242646 NR Description: receptor like protein kinase; protein id: supported by cDNA: gi_20260625 [Arabidopsis thaliana]
  misc_feature (1)..(27): Homolog of NCBI NO: 15242646 NR Description: receptor like protein kinase; protein id: supported by cDNA: gi_20260625 [Arabidopsis thaliana]
  misc_feature (1)..(389): Homolog of NCBI NO: 38112425 NR Description: lectin-like receptor kinase 7;1 [Medicago
MFGFIAAAGTNTEEHRLLSWELSSSLDSDKADSRIGLVIGISASGFVFLTFMVITTVVVWSRKQRKKKERDIENMISINKDLEREAGPRKFSYKDLVSATNRFSSHRKLGEGGFGAVYEGNLKEINTMVAVKKLSGDSRQGKNEFLNEVKIISKLRHRNLVQLIGWCNEKNEFLLIYELVPNGSLNSHLFGKRPNLLSWDIRYKIGLGLASALLYLHEEWDQCVLHRDIKASNIMLDSEFNVKLGDFGLARLMNHELGSHTTGLAGTFGYMAPEYVMKGSASKESDIYSFGIVLLEIVTGRKSLERTQEDNSDTESDDEKSLVEKVWELYGKQELITSCVDDKLGEDFDKKEAECLLVLGLWCAHPDKNSRPSIKQGIQVMNFESPLPDLPLKRPVAMYYISTTTSSSSPSVNSNGVSVTFSGIEYGR

SEQ ID NO: 79248 - DNA, 960 bp, Arabidopsis thaliana
  misc_feature (1)..(960): Ceres Seq. ID no. 12650477
  misc_feature: MA Experiment ID: 20000180 Result: Up-regulated in Transcription
  misc_feature: MA Experiment 20000180 PARAMETER Experiment Name: At_Germinating_Seeds_P Parameter: Age (hr) Value: 24 vs. 0
  misc_feature: MA Experiment 20000180 PARAMETER Experiment Name: At_Germinating_Seeds_P Parameter: Tissue Value: Germinating Seeds
  misc_feature: MA Experiment ID: 20000265 Result: Up-regulated in Transcription
  misc_feature: MA Experiment 20000265 PARAMETER Experiment Name: At_Open_Flower_P Parameter: Age (day) Value: 21
  misc_feature: MA Experiment 20000265 PARAMETER Experiment Name: At_Open_Flower_P Parameter: Plant Line Value: WS
  misc_feature: MA Experiment 20000265 PARAMETER Experiment Name: At_Open_Flower_P Parameter: Tissue Value: Closed Flower vs. Whole Plant
atgatgaatgtttctggagaatgtgtaggccgtgaaagatgcgaggaattagccaagtcttcttcgttttaccggaaagtttactcggagatagaagaaattggatgggaaccaataaggagattaggtggagatttaacgttttttagctttcacattctagataagaagggaagagctcacaacttagaaattcaactgaacagagactatcctaattcaccaccttctgtttctgcgcgaattaacttttgcttcgatgtaggatgtgccatatatgtttacactagaatggtcaacaagttcaagattgaaggatgtaatgcaccaattccaaaaggtagatctaagactttgctacattctctctttcatttggactatcttcaagaattttggtctgtcttggacaatatcgataaatctctatgtgttgttgatgtcaagcaaccagctcgtgcctctgctattcgccggattgatgctgggaatgattgtatcatcattgttcatatcgacttcaaagaccctaaatccctaccagagtcccggtttattggtcctgtgccttcagctacgcatatgaacaacttgcatatgttatggagaagaaattgcaaaagatggtcaaatgaaagatcatttcctgagaaccttgaatgtattctaggtactgagcttccaaagcctctaggtctccaagtggaagacgatcaacaacaagttgaatgtgggatttgctatgcgcagtttctacccaccgatgaggagctcggagctagaagtgggacacgaacagattacacatgtgaaaacatcagttgcaacaagtctttccatagcctctgcctcacagactggttaaggtctatcacaacaacaagacagtcatttgatgttctgtttgggaactgcccttattgttcagacccagttgcagtcaaaaccagcaacaaatag

SEQ ID NO: 79249 - protein, 319 aa, Arabidopsis thaliana
  peptide (1)..(319): Ceres Seq. ID no. 12650478
  misc_feature (210)..(319): Homolog of NCBI NO: 10177332 NR Description: gene_id:MPA24.9~unknown protein [Arabidopsis
  misc_feature (79)..(124): Homolog of NCBI NO: 10177332 NR Description: gene_id:MPA24.9~unknown protein [Arabidopsis
  misc_feature (150)..(183): Homolog of NCBI NO: 10177332 NR Description: gene_id:MPA24.9~unknown protein [Arabidopsis
  misc_feature (1)..(30): Homolog of NCBI NO: 10177332 NR Description: gene_id:MPA24.9~unknown protein [Arabidopsis
  misc_feature (115)..(319): Homolog of NCBI NO: 30698155 NR Description: expressed protein [Arabidopsis thaliana]
  misc_feature (115)..(319): Homolog of NCBI NO: 39104597 NR Description: unknown protein [Arabidopsis thaliana]
  misc_feature (123)..(319): Homolog of NCBI NO: 13385416 NR Description: proliferation of germ cells protein [Mus >gi|12842891|dbj|BAB25772.1| unnamed protein product [Mus >gi|12847699|dbj|BAB27674.1| unnamed protein product [Mus
  misc_feature (11)..(76): Homolog of NCBI NO: 13385416 NR Description: proliferation of germ cells protein [Mus >gi|12842891|dbj|BAB25772.1| unnamed protein product [Mus >gi|12847699|dbj|BAB27674.1| unnamed protein product [Mus
  misc_feature (120)..(315): Homolog of NCBI NO: 33416848 NR Description: Unknown (protein for MGC:66144) [Danio rerio]
  misc_feature (14)..(80): Homolog of NCBI NO: 33416848 NR Description: Unknown (protein for MGC:66144) [Danio rerio]
MMNVSGECVGRERCEELAKSSSFYRKVYSEIEEIGWEPIRRLGGDLTFFSFHILDKKGRAHNLEIQLNRDYPNSPPSVSARINFCFDVGCAIYVYTRMVNKFKIEGCNAPIPKGRSKTLLHSLFHLDYLQEFWSVLDNIDKSLCVVDVKQPARASAIRRIDAGNDCIIIVHIDFKDPKSLPESRFIGPVPSATHMNNLHMLWRRNCKRWSNERSFPENLECILGTELPKPLGLQVEDDQQQVECGICYAQFLPTDEELGARSGTRTDYTCENISCNKSFHSLCLTDWLRSITTTRQSFDVLFGNCPYCSDPVAVKTSNK

SEQ ID NO: 79250 - protein, 318 aa, Arabidopsis thaliana
  peptide (1)..(318): Ceres Seq. ID no. 12650479
  misc_feature (209)..(318): Homolog of NCBI NO: 10177332 NR Description: gene_id:MPA24.9~unknown protein [Arabidopsis
  misc_feature (78)..(123): Homolog of NCBI NO: 10177332 NR Description: gene_id:MPA24.9~unknown protein [Arabidopsis
  misc_feature (149)..(182): Homolog of NCBI NO: 10177332 NR Description: gene_id:MPA24.9~unknown protein [Arabidopsis
  misc_feature (1)..(29): Homolog of NCBI NO: 10177332 NR Description: gene_id:MPA24.9~unknown protein [Arabidopsis
  misc_feature (114)..(318): Homolog of NCBI NO: 30698155 NR Description: expressed protein [Arabidopsis thaliana]
  misc_feature (114)..(318): Homolog of NCBI NO: 39104597 NR Description: unknown protein [Arabidopsis thaliana]
  misc_feature (122)..(318): Homolog of NCBI NO: 13385416 NR Description: proliferation of germ cells protein [Mus >gi|12842891|dbj|BAB25772.1| unnamed protein product [Mus >gi|12847699|dbj|BAB27674.1| unnamed protein product [Mus
  misc_feature (10)..(75): Homolog of NCBI NO: 13385416 NR Description: proliferation of germ cells protein [Mus >gi|12842891|dbj|BAB25772.1| unnamed protein product [Mus >gi|12847699|dbj|BAB27674.1| unnamed protein product [Mus
  misc_feature (119)..(314): Homolog of NCBI NO: 33416848 NR Description: Unknown (protein for MGC:66144) [Danio rerio]
  misc_feature (13)..(79): Homolog of NCBI NO: 33416848 NR Description: Unknown (protein for MGC:66144) [Danio rerio]
MNVSGECVGRERCEELAKSSSFYRKVYSEIEEIGWEPIRRLGGDLTFFSFHILDKKGRAHNLEIQLNRDYPNSPPSVSARINFCFDVGCAIYVYTRMVNKFKIEGCNAPIPKGRSKTLLHSLFHLDYLQEFWSVLDNIDKSLCVVDVKQPARASAIRRIDAGNDCIIIVHIDFKDPKSLPESRFIGPVPSATHMNNLHMLWRRNCKRWSNERSFPENLECILGTELPKPLGLQVEDDQQQVECGICYAQFLPTDEELGARSGTRTDYTCENISCNKSFHSLCLTDWLRSITTTRQSFDVLFGNCPYCSDPVAVKTSNK

SEQ ID NO: 79251 - protein, 222 aa, Arabidopsis thaliana
  peptide (1)..(222): Ceres Seq. ID no. 12650480
  misc_feature (113)..(222): Homolog of NCBI NO: 10177332 NR Description: gene_id:MPA24.9~unknown protein [Arabidopsis
  misc_feature (1)..(27): Homolog of NCBI NO: 10177332 NR Description: gene_id:MPA24.9~unknown protein [Arabidopsis
  misc_feature (53)..(86): Homolog of NCBI NO: 10177332 NR Description: gene_id:MPA24.9~unknown protein [Arabidopsis
  misc_feature (18)..(222): Homolog of NCBI NO: 30698155 NR Description: expressed protein [Arabidopsis thaliana]
  misc_feature (18)..(222): Homolog of NCBI NO: 39104597 NR Description: unknown protein [Arabidopsis thaliana]
  misc_feature (26)..(222): Homolog of NCBI NO: 13385416 NR Description: proliferation of germ cells protein [Mus >gi|12842891|dbj|BAB25772.1| unnamed protein product [Mus >gi|12847699|dbj|BAB27674.1| unnamed protein product [Mus
  misc_feature (23)..(218): Homolog of NCBI NO: 33416848 NR Description: Unknown (protein for MGC:66144) [Danio rerio]
  misc_feature (29)..(212): Homolog of NCBI NO: 34879602 NR Description: similar to PHD finger protein 9; proliferation of
  misc_feature (5)..(222): Homolog of NCBI NO: 8922360 NR Description: hypothetical protein FLJ10335 [Homo sapiens]
  misc_feature (120)..(222): Homolog of NCBI NO: 12848314 NR Description: unnamed protein product [Mus musculus]
MVNKFKIEGCNAPIPKGRSKTLLHSLFHLDYLQEFWSVLDNIDKSLCVVDVKQPARASAIRRIDAGNDCIIIVHIDFKDPKSLPESRFIGPVPSATHMNNLHMLWRRNCKRWSNERSFPENLECILGTELPKPLGLQVEDDQQQVECGICYAQFLPTDEELGARSGTRTDYTCENISCNKSFHSLCLTDWLRSITTTRQSFDVLFGNCPYCSDPVAVKTSNK

SEQ ID NO: 79252 - DNA, 1105 bp, Arabidopsis thaliana
  misc_feature (1)..(1105): Ceres Seq. ID no. 12650481
  misc_feature: MA Experiment ID: 108435 Result: Down-regulated in Transcription
  misc_feature: MA Experiment 108435 PARAMETER Experiment Name: At_stm_Mutants_cDNA_P Parameter: Plant Line Value: wt Landsburg vs stm
  misc_feature: MA Experiment 108435 PARAMETER Experiment Name: At_stm_Mutants_cDNA_P Parameter: Tissue Value: Shoot Apical Meristem Region
  misc_feature: MA Experiment ID: 108462 Result: Up-regulated in Transcription
  misc_feature: MA Experiment 108462 PARAMETER Experiment Name: At_Germinating_Seeds_cDNA_P Parameter: Age (day) Value: 2 vs. 0
  misc_feature: MA Experiment 108462 PARAMETER Experiment Name: At_Germinating_Seeds_cDNA_P Parameter: Tissue Value: Germinating Seeds
  misc_feature: MA Experiment ID: 108463 Result: Up-regulated in Transcription
  misc_feature: MA Experiment 108463 PARAMETER Experiment Name: At_Germinating_Seeds_cDNA_P Parameter: Age (day) Value: 3 vs. 0
  misc_feature: MA Experiment 108463 PARAMETER Experiment Name: At_Germinating_Seeds_cDNA_P Parameter: Tissue Value: Germinating Seeds
  misc_feature: MA Experiment ID: 108473 Result: Down-regulated in Transcription
  misc_feature: MA Experiment 108473 PARAMETER Experiment Name: At_Drought_Flowers_cDNA_P Parameter: Timepoint (hr) Value: 7 d
  misc_feature: MA Experiment 108473 PARAMETER Experiment Name: At_Drought_Flowers_cDNA_P Parameter: Tissue Value: Flower
  misc_feature: MA Experiment 108473 PARAMETER Experiment Name: At_Drought_Flowers_cDNA_P Parameter: Treatment Value: Drought vs. No Drought
  misc_feature: MA Experiment ID: 108573 Result: Down-regulated in Transcription
  misc_feature: MA Experiment 108573 PARAMETER Experiment Name: At_Drought_cDNA_P Parameter: Timepoint (hr) Value: 6
  misc_feature: MA Experiment 108573 PARAMETER Experiment Name: At_Drought_cDNA_P Parameter: Tissue Value: Aerial
  misc_feature: MA Experiment 108573 PARAMETER Experiment Name: At_Drought_cDNA_P Parameter: Treatment Value: Drought vs. No Drought
  misc_feature: MA Experiment ID: 108595 Result: Down-regulated in Transcription
  misc_feature: MA Experiment 108595 PARAMETER Experiment Name: At_Ler-pi_Ovule_cDNA_P Parameter: Plant Line Value: null
  misc_feature: MA Experiment ID: 108607 Result: Down-regulated in Transcription
  misc_feature: MA Experiment 108607 PARAMETER Experiment Name: At_100uM_ABA_cDNA_P Parameter: Timepoint (hr) Value: 4
  misc_feature: MA Experiment 108607 PARAMETER Experiment Name: At_100uM_ABA_cDNA_P Parameter: Tissue Value: Aerial
  misc_feature: MA Experiment 108607 PARAMETER Experiment Name: At_100uM_ABA_cDNA_P Parameter: Treatment Value: 100uM ABA vs. No Treatment
  misc_feature: MA Experiment ID: 108668 Result: Down-regulated in Transcription
  misc_feature: MA Experiment 108668 PARAMETER Experiment Name: At_2mM_SA_cDNA_P Parameter: Plant Line Value: WS
  misc_feature: MA Experiment 108668 PARAMETER Experiment Name: At_2mM_SA_cDNA_P Parameter: Timepoint (hr) Value: 6
  misc_feature: MA Experiment 108668 PARAMETER Experiment Name: At_2mM_SA_cDNA_P Parameter: Treatment Value: 2mM SA vs. No Treatment
  misc_feature: MA Experiment ID: 20000069 Result: Down-regulated in Transcription
  misc_feature: MA Experiment 20000069 PARAMETER Experiment Name: At_100uM_ABA_Mutants_cDNA_P Parameter: Plant Line Value: CS23
  misc_feature: MA Experiment 20000069 PARAMETER Experiment Name: At_100uM_ABA_Mutants_cDNA_P Parameter: Timepoint (hr) Value: 6
  misc_feature: MA Experiment 20000069 PARAMETER Experiment Name: At_100uM_ABA_Mutants_cDNA_P Parameter: Tissue Value: Aerial
  misc_feature: MA Experiment 20000069 PARAMETER Experiment Name: At_100uM_ABA_Mutants_cDNA_P Parameter: Treatment Value: 100uM ABA vs. No Treatment
  misc_feature: MA Experiment ID: 20000070 Result: Down-regulated in Transcription
  misc_feature: MA Experiment 20000070 PARAMETER Experiment Name: At_100uM_ABA_Mutants_cDNA_P Parameter: Plant Line Value: CS24
  misc_feature: MA Experiment 20000070 PARAMETER Experiment Name: At_100uM_ABA_Mutants_cDNA_P Parameter: Timepoint (hr) Value: 6
  misc_feature: MA Experiment 20000070 PARAMETER Experiment Name: At_100uM_ABA_Mutants_cDNA_P Parameter: Tissue Value: Aerial
  misc_feature: MA Experiment 20000070 PARAMETER Experiment Name: At_100uM_ABA_Mutants_cDNA_P Parameter: Treatment Value: 100uM ABA vs. No Treatment
  misc_feature: MA Experiment ID: 20000071 Result: Down-regulated in Transcription
  misc_feature: MA Experiment 20000071 PARAMETER Experiment Name: At_100uM_ABA_Mutants_cDNA_P Parameter: Plant Line Value: CS8104
  misc_feature: MA Experiment 20000071 PARAMETER Experiment Name: At_100uM_ABA_Mutants_cDNA_P Parameter: Timepoint (hr) Value: 6
  misc_feature: MA Experiment 20000071 PARAMETER Experiment Name: At_100uM_ABA_Mutants_cDNA_P Parameter: Tissue Value: Aerial
  misc_feature: MA Experiment 20000071 PARAMETER Experiment Name: At_100uM_ABA_Mutants_cDNA_P Parameter: Treatment Value: 100uM ABA vs. No Treatment
  misc_feature: MA Experiment ID: 20000072 Result: Down-regulated in Transcription
  misc_feature: MA Experiment 20000072 PARAMETER Experiment Name: At_100uM_ABA_Mutants_cDNA_P Parameter: Plant Line Value: CS8105
  misc_feature: MA Experiment 20000072 PARAMETER Experiment Name: At_100uM_ABA_Mutants_cDNA_P Parameter: Timepoint (hr) Value: 6
  misc_feature: MA Experiment 20000072 PARAMETER Experiment Name: At_100uM_ABA_Mutants_cDNA_P Parameter: Tissue Value: Aerial
  misc_feature: MA Experiment 20000072 PARAMETER Experiment Name: At_100uM_ABA_Mutants_cDNA_P Parameter: Treatment Value: 100uM ABA vs. No Treatment
  misc_feature: MA Experiment ID: 20000087 Result: Down-regulated in Transcription
  misc_feature: MA Experiment 20000087 PARAMETER Experiment Name: At_100uM_ABA_Mutants_cDNA_P Parameter: Plant Line Value: WS
  misc_feature: MA Experiment 20000087 PARAMETER Experiment Name: At_100uM_ABA_Mutants_cDNA_P Parameter: Timepoint (hr) Value: 6
  misc_feature: MA Experiment 20000087 PARAMETER Experiment Name: At_100uM_ABA_Mutants_cDNA_P Parameter: Tissue Value: Aerial
  misc_feature: MA Experiment 20000087 PARAMETER Experiment Name: At_100uM_ABA_Mutants_cDNA_P Parameter: Treatment Value: 100uM ABA vs. No Treatment
  misc_feature: MA Experiment ID: 20000089 Result: Down-regulated in Transcription
  misc_feature: MA Experiment ID: 20000090 Result: Down-regulated in Transcription
  misc_feature: MA Experiment ID: 20000112 Result: Down-regulated in Transcription
  misc_feature: MA Experiment 20000112 PARAMETER Experiment Name: At_42deg_Heat_cDNA_P Parameter: Temperature (deg C) Value: 42 vs. 22
  misc_feature: MA Experiment 20000112 PARAMETER Experiment Name: At_42deg_Heat_cDNA_P Parameter: Timepoint (hr) Value: 2
  misc_feature: MA Experiment 20000112 PARAMETER Experiment Name: At_42deg_Heat_cDNA_P Parameter: Tissue Value: Aerial
  misc_feature: MA Experiment ID: 20000117 Result: Down-regulated in Transcription
  misc_feature: MA Experiment 20000117 PARAMETER Experiment Name: At_100uM_ABA_Mutants_cDNA_P Parameter: Plant Line Value: Columbia
  misc_feature: MA Experiment 20000117 PARAMETER Experiment Name: At_100uM_ABA_Mutants_cDNA_P Parameter: Timepoint (hr) Value: 6
  misc_feature: MA Experiment 20000117 PARAMETER Experiment Name: At_100uM_ABA_Mutants_cDNA_P Parameter: Tissue Value: Aerial
  misc_feature: MA Experiment 20000117 PARAMETER Experiment Name: At_100uM_ABA_Mutants_cDNA_P Parameter: Treatment Value: 100uM ABA vs. No Treatment
  misc_feature: MA Experiment ID: 20000182 Result: Down-regulated in Transcription
  misc_feature: MA Experiment 20000182 PARAMETER Experiment Name: At_2mM_SA_P Parameter: Age (day) Value: 14
  misc_feature: MA Experiment 20000182 PARAMETER Experiment Name: At_2mM_SA_P Parameter: Organism Value: A. thaliana
  misc_feature: MA Experiment 20000182 PARAMETER Experiment Name: At_2mM_SA_P Parameter: Plant Line Value: WS
  misc_feature: MA Experiment 20000182 PARAMETER Experiment Name: At_2mM_SA_P Parameter: Timepoint (hr) Value: 6
  misc_feature: MA Experiment 20000182 PARAMETER Experiment Name: At_2mM_SA_P Parameter: Tissue Value: Aerial
  misc_feature: MA Experiment 20000182 PARAMETER Experiment Name: At_2mM_SA_P Parameter: Treatment Value: 2mM SA vs. No Treatment
  misc_feature: MA Experiment ID: 20000185 Result: Down-regulated in Transcription
  misc_feature: MA Experiment 20000185 PARAMETER Experiment Name: At_Roots__P Parameter: Age (day) Value: 7 vs. 21
  misc_feature: MA Experiment 20000185 PARAMETER Experiment Name: At_Roots__P Parameter: Organism Value: A. thaliana
  misc_feature: MA Experiment 20000185 PARAMETER Experiment Name: At_Roots__P Parameter: Tissue Value: Roots vs. Whole Plant
  misc_feature: MA Experiment ID: 20000224 Result: Down-regulated in Transcription
  misc_feature: MA Experiment ID: 20000264 Result: Down-regulated in Transcription
  misc_feature: MA Experiment 20000264 PARAMETER Experiment Name: At_Open_Flower_P Parameter: Age (day) Value: 21
  misc_feature: MA Experiment 20000264 PARAMETER Experiment Name: At_Open_Flower_P Parameter: Plant Line Value: WS
  misc_feature: MA Experiment 20000264 PARAMETER Experiment Name: At_Open_Flower_P Parameter: Tissue Value: Open Flower vs. Whole Plant
  misc_feature: MA Experiment ID: 20000267 Result: Down-regulated in Transcription
  misc_feature: MA Experiment 20000267 PARAMETER Experiment Name: At_Drought_P Parameter: Age (day) Value: 7
  misc_feature: MA Experiment 20000267 PARAMETER Experiment Name: At_Drought_P Parameter: Organism Value: A. thaliana
  misc_feature: MA Experiment 20000267 PARAMETER Experiment Name: At_Drought_P Parameter: Plant Line Value: WS
  misc_feature: MA Experiment 20000267 PARAMETER Experiment Name: At_Drought_P Parameter: Timepoint (hr) Value: 6
  misc_feature: MA Experiment 20000267 PARAMETER Experiment Name: At_Drought_P Parameter: Tissue Value: Whole Plant
  misc_feature: MA Experiment 20000267 PARAMETER Experiment Name: At_Drought_P Parameter: Treatment Value: Drought vs. No Drought
  misc_feature: MA Experiment ID: 20000268 Result: Down-regulated in Transcription
  misc_feature: MA Experiment 20000268 PARAMETER Experiment Name: At_100mM_NaCl__P Parameter: Age (day) Value: 14
  misc_feature: MA Experiment 20000268 PARAMETER Experiment Name: At_100mM_NaCl__P Parameter: Organism Value: A. thaliana
  misc_feature: MA Experiment 20000268 PARAMETER Experiment Name: At_100mM_NaCl__P Parameter: Plant Line Value: WS
  misc_feature: MA Experiment 20000268 PARAMETER Experiment Name: At_100mM_NaCl__P Parameter: Timepoint (hr) Value: 6
  misc_feature: MA Experiment 20000268 PARAMETER Experiment Name: At_100mM_NaCl__P Parameter: Tissue Value: Whole Plant
  misc_feature: MA Experiment 20000268 PARAMETER Experiment Name: At_100mM_NaCl__P Parameter: Treatment Value: 100mM NaCl vs. No Treatment
  misc_feature: MA Experiment ID: 20000436 Result: Down-regulated in Transcription
  misc_feature: MA Experiment 20000436 PARAMETER Experiment Name: At_Drought_P Parameter: Age (day) Value: 7
  misc_feature: MA Experiment 20000436 PARAMETER Experiment Name: At_Drought_P Parameter: Organism Value: A. thaliana
  misc_feature: MA Experiment 20000436 PARAMETER Experiment Name: At_Drought_P Parameter: Plant Line Value: WS
  misc_feature: MA Experiment 20000436 PARAMETER Experiment Name: At_Drought_P Parameter: Timepoint (hr) Value: 12
  misc_feature: MA Experiment 20000436 PARAMETER Experiment Name: At_Drought_P Parameter: Tissue Value: Whole Plant
  misc_feature: MA Experiment 20000436 PARAMETER Experiment Name: At_Drought_P Parameter: Treatment Value: Drought vs. No Drought
  misc_feature: MA Experiment ID: 20000437 Result: Down-regulated in Transcription
  misc_feature: MA Experiment 20000437 PARAMETER Experiment Name: At_Drought_P Parameter: Age (day) Value: 8
  misc_feature: MA Experiment 20000437 PARAMETER Experiment Name: At_Drought_P Parameter: Organism Value: A. thaliana
  misc_feature: MA Experiment 20000437 PARAMETER Experiment Name: At_Drought_P Parameter: Plant Line Value: WS
  misc_feature: MA Experiment 20000437 PARAMETER Experiment Name: At_Drought_P Parameter: Timepoint (hr) Value: 24
  misc_feature: MA Experiment 20000437 PARAMETER Experiment Name: At_Drought_P Parameter: Tissue Value: Whole Plant
  misc_feature: MA Experiment 20000437 PARAMETER Experiment Name: At_Drought_P Parameter: Treatment Value: Drought vs. No Drought
  misc_feature: MA Experiment ID: 20000439 Result: Down-regulated in Transcription
  misc_feature: MA Experiment 20000439 PARAMETER Experiment Name: At_Roots__P Parameter: Age (day) Value: 14 vs. 21
  misc_feature: MA Experiment 20000439 PARAMETER Experiment Name: At_Roots__P Parameter: Organism Value: A. thaliana
  misc_feature: MA Experiment 20000439 PARAMETER Experiment Name: At_Roots__P Parameter: Tissue Value: Roots vs. Whole Plant
  misc_feature: MA Experiment ID: 20000441 Result: Up-regulated in Transcription
  misc_feature: MA Experiment 20000441 PARAMETER Experiment Name: At_1uM_BR-BRZ__P Parameter: Tissue Value: Shoot Apices
  misc_feature: MA Experiment 20000441 PARAMETER Experiment Name: At_1uM_BR-BRZ__P Parameter: Treatment Value: 1uM BR vs. No Treatment
  misc_feature: MA Experiment ID: 20000443 Result: Up-regulated in Transcription
  misc_feature: MA Experiment 20000443 PARAMETER Experiment Name: At_1uM_BR-BRZ__P Parameter: Tissue Value: Shoot Apices
  misc_feature: MA Experiment 20000443 PARAMETER Experiment Name: At_1uM_BR-BRZ__P Parameter: Treatment Value: 1uM BRZ vs. No Treatment
  misc_feature: MA Experiment ID: 20000456 Result: Down-regulated in Transcription
  misc_feature: MA Experiment 20000456 PARAMETER Experiment Name: At_100uM_BA_P Parameter: Age (day) Value: 14
  misc_feature: MA Experiment 20000456 PARAMETER Experiment Name: At_100uM_BA_P Parameter: Organism Value: A. thaliana
  misc_feature: MA Experiment 20000456 PARAMETER Experiment Name: At_100uM_BA_P Parameter: Plant Line Value: WS
  misc_feature: MA Experiment 20000456 PARAMETER Experiment Name: At_100uM_BA_P Parameter: Timepoint (hr) Value: 6
  misc_feature: MA Experiment 20000456 PARAMETER Experiment Name: At_100uM_BA_P Parameter: Tissue Value: Aerial
  misc_feature: MA Experiment 20000456 PARAMETER Experiment Name: At_100uM_BA_P Parameter: Treatment Value: 100uM BA vs. No Treatment
  misc_feature: MA Experiment ID: 20000496 Result: Down-regulated in Transcription
  misc_feature: MA Experiment 20000496 PARAMETER Experiment Name: At_Guard_Cells_P Parameter: Harvest Date Value: 7/19/2002
  misc_feature: MA Experiment 20000496 PARAMETER Experiment Name: At_Guard_Cells_P Parameter: Organism Value: Canola
  misc_feature: MA Experiment 20000496 PARAMETER Experiment Name: At_Guard_Cells_P Parameter: Tissue Value: Guard Cells vs. Leaves
  misc_feature: MA Experiment ID: 20000794 Result: Down-regulated in Transcription
  misc_feature: MA Experiment 20000794 PARAMETER Experiment Name: At_Petals_P Parameter: Age (day) Value: 23-25 days
  misc_feature: MA Experiment 20000794 PARAMETER Experiment Name: At_Petals_P Parameter: Plant Line Value: WS
  misc_feature: MA Experiment 20000794 PARAMETER Experiment Name: At_Petals_P Parameter: Tissue Value: Petals vs. Whole plant
  misc_feature: MA Experiment ID: 20001247 Result: Up-regulated in Transcription
  misc_feature: MA Experiment 20001247 PARAMETER Experiment Name: At_Far-red-induction_P Parameter: Age (day) Value: 7
  misc_feature: MA Experiment 20001247 PARAMETER Experiment Name: At_Far-red-induction_P Parameter: Light Value: Far-red vs. White
  misc_feature: MA Experiment 20001247 PARAMETER Experiment Name: At_Far-red-induction_P Parameter: Organism Value: A. thaliana
  misc_feature: MA Experiment 20001247 PARAMETER Experiment Name: At_Far-red-induction_P Parameter: Plant Line Value: Columbia
  misc_feature: MA Experiment 20001247 PARAMETER Experiment Name: At_Far-red-induction_P Parameter: Timepoint (hr) Value: 1
  misc_feature: MA Experiment 20001247 PARAMETER Experiment Name: At_Far-red-induction_P Parameter: Tissue Value: Whole Plant
  misc_feature: MA Experiment ID: 20001450 Result: Up-regulated in Transcription
  misc_feature: MA Experiment 20001450 PARAMETER Experiment Name: At_Far-red-induction_P Parameter: Age (day) Value: 7
  misc_feature: MA Experiment 20001450 PARAMETER Experiment Name: At_Far-red-induction_P Parameter: Light Value: Far-red vs. White
  misc_feature: MA Experiment 20001450 PARAMETER Experiment Name: At_Far-red-induction_P Parameter: Organism Value: A. thaliana
  misc_feature: MA Experiment 20001450 PARAMETER Experiment Name: At_Far-red-induction_P Parameter: Plant Line Value: Columbia
  misc_feature: MA Experiment 20001450 PARAMETER Experiment Name: At_Far-red-induction_P Parameter: Timepoint (hr) Value: 8
  misc_feature: MA Experiment 20001450 PARAMETER Experiment Name: At_Far-red-induction_P Parameter: Tissue Value: Whole Plant
  misc_feature: MA Experiment ID: 20001451 Result: Up-regulated in Transcription
  misc_feature: MA Experiment 20001451 PARAMETER Experiment Name: At_Far-red-induction_P Parameter: Age (day) Value: 7
  misc_feature: MA Experiment 20001451 PARAMETER Experiment Name: At_Far-red-induction_P Parameter: Light Value: Far-red vs. White
  misc_feature: MA Experiment 20001451 PARAMETER Experiment Name: At_Far-red-induction_P Parameter: Organism Value: A. thaliana
  misc_feature: MA Experiment 20001451 PARAMETER Experiment Name: At_Far-red-induction_P Parameter: Plant Line Value: Columbia
  misc_feature: MA Experiment 20001451 PARAMETER Experiment Name: At_Far-red-induction_P Parameter: Timepoint (hr) Value: 24
  misc_feature: MA Experiment 20001451 PARAMETER Experiment Name: At_Far-red-induction_P Parameter: Tissue Value: Whole Plant
  misc_feature: MA Experiment ID: 20001554 Result: Down-regulated in Transcription
  misc_feature: MA Experiment 20001554 PARAMETER Experiment Name: At_Drought_Soil_Dry_P Parameter: Age (day) Value: 21
  misc_feature: MA Experiment 20001554 PARAMETER Experiment Name: At_Drought_Soil_Dry_P Parameter: Organism Value: A. thaliana
  misc_feature: MA Experiment 20001554 PARAMETER Experiment Name: At_Drought_Soil_Dry_P Parameter: Plant Line Value: WS
  misc_feature: MA Experiment 20001554 PARAMETER Experiment Name: At_Drought_Soil_Dry_P Parameter: Post Timepoint (hr) Value: None
  misc_feature: MA Experiment 20001554 PARAMETER Experiment Name: At_Drought_Soil_Dry_P Parameter: Post-Treatment Value: None
  misc_feature: MA Experiment 20001554 PARAMETER Experiment Name: At_Drought_Soil_Dry_P Parameter: Timepoint (day) Value: 7
  misc_feature: MA Experiment 20001554 PARAMETER Experiment Name: At_Drought_Soil_Dry_P Parameter: Treatment Value: Drought vs. No Drought
  misc_feature: MA Experiment ID: 20001555 Result: Down-regulated in Transcription
  misc_feature: MA Experiment 20001555 PARAMETER Experiment Name: At_Drought_Soil_Dry_P Parameter: Age (day) Value: 24
  misc_feature: MA Experiment 20001555 PARAMETER Experiment Name: At_Drought_Soil_Dry_P Parameter: Organism Value: A. thaliana
  misc_feature: MA Experiment 20001555 PARAMETER Experiment Name: At_Drought_Soil_Dry_P Parameter: Plant Line Value: WS
  misc_feature: MA Experiment 20001555 PARAMETER Experiment Name: At_Drought_Soil_Dry_P Parameter: Post Timepoint (hr) Value: None
  misc_feature: MA Experiment 20001555 PARAMETER Experiment Name: At_Drought_Soil_Dry_P Parameter: Post-Treatment Value: None
  misc_feature: MA Experiment 20001555 PARAMETER Experiment Name: At_Drought_Soil_Dry_P Parameter: Timepoint (day) Value: 10
  misc_feature: MA Experiment 20001555 PARAMETER Experiment Name: At_Drought_Soil_Dry_P Parameter: Treatment Value: Drought vs. No Drought
  misc_feature: MA Experiment ID: 20001556 Result: Down-regulated in Transcription
  misc_feature: MA Experiment 20001556 PARAMETER Experiment Name: At_Drought_Soil_Dry_P Parameter: Age (day) Value: 26
  misc_feature: MA Experiment 20001556 PARAMETER Experiment Name: At_Drought_Soil_Dry_P Parameter: Organism Value: A. thaliana
  misc_feature: MA Experiment 20001556 PARAMETER Experiment Name: At_Drought_Soil_Dry_P Parameter: Plant Line Value: WS
  misc_feature: MA Experiment 20001556 PARAMETER Experiment Name: At_Drought_Soil_Dry_P Parameter: Post Timepoint (hr) Value: None
  misc_feature: MA Experiment 20001556 PARAMETER Experiment Name: At_Drought_Soil_Dry_P Parameter: Post-Treatment Value: None
  misc_feature: MA Experiment 20001556 PARAMETER Experiment Name: At_Drought_Soil_Dry_P Parameter: Timepoint (day) Value: 12
  misc_feature: MA Experiment 20001556 PARAMETER Experiment Name: At_Drought_Soil_Dry_P Parameter: Treatment Value: Drought vs. No Drought
  misc_feature: MA Experiment ID: 20001557 Result: Down-regulated in Transcription
  misc_feature: MA Experiment 20001557 PARAMETER Experiment Name: At_Drought_Soil_Dry_P Parameter: Age (day) Value: 27
  misc_feature: MA Experiment 20001557 PARAMETER Experiment Name: At_Drought_Soil_Dry_P Parameter: Organism Value: A. thaliana
  misc_feature: MA Experiment 20001557 PARAMETER Experiment Name: At_Drought_Soil_Dry_P Parameter: Plant Line Value: WS
  misc_feature: MA Experiment 20001557 PARAMETER Experiment Name: At_Drought_Soil_Dry_P Parameter: Post Timepoint (hr) Value: 3
  misc_feature: MA Experiment 20001557 PARAMETER Experiment Name: At_Drought_Soil_Dry_P Parameter: Post-Treatment Value: Re-Water vs. No Drought
  misc_feature: MA Experiment 20001557 PARAMETER Experiment Name: At_Drought_Soil_Dry_P Parameter: Timepoint (day) Value: 13
  misc_feature: MA Experiment 20001557 PARAMETER Experiment Name: At_Drought_Soil_Dry_P Parameter: Treatment Value: Drought vs. No Drought
  misc_feature: MA Experiment ID: 20001559 Result: Down-regulated in Transcription
  misc_feature: MA Experiment 20001559 PARAMETER Experiment Name: At_Drought_Soil_Dry_P Parameter: Age (day) Value: 28
  misc_feature: MA Experiment 20001559 PARAMETER Experiment Name: At_Drought_Soil_Dry_P Parameter: Organism Value: A. thaliana
  misc_feature: MA Experiment 20001559 PARAMETER Experiment Name: At_Drought_Soil_Dry_P Parameter: Plant Line Value: WS
  misc_feature: MA Experiment 20001559 PARAMETER Experiment Name: At_Drought_Soil_Dry_P Parameter: Post Timepoint (hr) Value: 29
  misc_feature: MA Experiment 20001559 PARAMETER Experiment Name: At_Drought_Soil_Dry_P Parameter: Post-Treatment Value: Re-Water vs. No Drought
  misc_feature: MA Experiment 20001559 PARAMETER Experiment Name: At_Drought_Soil_Dry_P Parameter: Timepoint (day) Value: 14
  misc_feature: MA Experiment 20001559 PARAMETER Experiment Name: At_Drought_Soil_Dry_P Parameter: Treatment Value: Drought vs. No Drought
  misc_feature: MA Experiment ID: 20001560 Result: Up-regulated in Transcription
  misc_feature: MA Experiment 20001560 PARAMETER Experiment Name: At_Drought_Soil_Dry_P Parameter: Age (day) Value: 28
  misc_feature: MA Experiment 20001560 PARAMETER Experiment Name: At_Drought_Soil_Dry_P Parameter: Organism Value: A. thaliana
  misc_feature: MA Experiment 20001560 PARAMETER Experiment Name: At_Drought_Soil_Dry_P Parameter: Plant Line Value: WS
  misc_feature: MA Experiment 20001560 PARAMETER Experiment Name: At_Drought_Soil_Dry_P Parameter: Post Timepoint (hr) Value: None
  misc_feature: MA Experiment 20001560 PARAMETER Experiment Name: At_Drought_Soil_Dry_P Parameter: Post-Treatment Value: None
  misc_feature: MA Experiment 20001560 PARAMETER Experiment Name: At_Drought_Soil_Dry_P Parameter: Timepoint (day) Value: 14
  misc_feature: MA Experiment 20001560 PARAMETER Experiment Name: At_Drought_Soil_Dry_P Parameter: Treatment Value: Drought vs. No Drought
  misc_feature: MA Experiment ID: 20001761 Result: Up-regulated in Transcription
  misc_feature: MA Experiment 20001761 PARAMETER Experiment Name: At_50mM_NH4NO3_L-to-H_P Parameter: Timepoint (hr) Value: 4
  misc_feature: MA Experiment 20001761 PARAMETER Experiment Name: At_50mM_NH4NO3_L-to-H_P Parameter: Tissue Value: Siliques
  misc_feature: MA Experiment 20001761 PARAMETER Experiment Name: At_50mM_NH4NO3_L-to-H_P Parameter: Treatment Value: 50mM NH4NO3 vs 100mM Mannitol
  misc_feature: MA Experiment ID: 20001904 Result: Down-regulated in Transcription
  misc_feature: MA Experiment 20001904 PARAMETER Experiment Name: At_Drought_Reproduction_P Parameter: Age (day) Value: 37
  misc_feature: MA Experiment 20001904 PARAMETER Experiment Name: At_Drought_Reproduction_P Parameter: Organism Value: A. thaliana
  misc_feature: MA Experiment 20001904 PARAMETER Experiment Name: At_Drought_Reproduction_P Parameter: Plant Line Value: WS
  misc_feature: MA Experiment 20001904 PARAMETER Experiment Name: At_Drought_Reproduction_P Parameter: Timepoint (day) Value: 7
  misc_feature: MA Experiment 20001904 PARAMETER Experiment Name: At_Drought_Reproduction_P Parameter: Tissue Value: Rosettes
  misc_feature: MA Experiment 20001904 PARAMETER Experiment Name: At_Drought_Reproduction_P Parameter: Treatment Value: Drought vs. No Drought
  misc_feature: MA Experiment ID: 20001906 Result: Down-regulated in Transcription
  misc_feature: MA Experiment 20001906 PARAMETER Experiment Name: At_Drought_Reproduction_P Parameter: Age (day) Value: 35
  misc_feature: MA Experiment 20001906 PARAMETER Experiment Name: At_Drought_Reproduction_P Parameter: Organism Value: A. thaliana
  misc_feature: MA Experiment 20001906 PARAMETER Experiment Name: At_Drought_Reproduction_P Parameter: Plant Line Value: WS
  misc_feature: MA Experiment 20001906 PARAMETER Experiment Name: At_Drought_Reproduction_P Parameter: Timepoint (day) Value: 5
  misc_feature: MA Experiment 20001906 PARAMETER Experiment Name: At_Drought_Reproduction_P Parameter: Tissue Value: Siliques
  misc_feature: MA Experiment 20001906 PARAMETER Experiment Name: At_Drought_Reproduction_P Parameter: Treatment Value: Drought vs. No Drought
  misc_feature: MA Experiment ID: 20001907 Result: Down-regulated in Transcription
  misc_feature: MA Experiment 20001907 PARAMETER Experiment Name: At_Drought_Reproduction_P Parameter: Age (day) Value: 37
  misc_feature: MA Experiment 20001907 PARAMETER Experiment Name: At_Drought_Reproduction_P Parameter: Organism Value: A. thaliana
  misc_feature: MA Experiment 20001907 PARAMETER Experiment Name: At_Drought_Reproduction_P Parameter: Plant Line Value: WS
  misc_feature: MA Experiment 20001907 PARAMETER Experiment Name: At_Drought_Reproduction_P Parameter: Timepoint (day) Value: 7
  misc_feature: MA Experiment 20001907 PARAMETER Experiment Name: At_Drought_Reproduction_P Parameter: Tissue Value: Siliques
  misc_feature: MA Experiment 20001907 PARAMETER Experiment Name: At_Drought_Reproduction_P Parameter: Treatment Value: Drought vs. No Drought
  misc_feature: MA Experiment ID: 20001908 Result: Down-regulated in Transcription
  misc_feature: MA Experiment 20001908 PARAMETER Experiment Name: At_Drought_Reproduction_P Parameter: Age (day) Value: 40
  misc_feature: MA Experiment 20001908 PARAMETER Experiment Name: At_Drought_Reproduction_P Parameter: Organism Value: A. thaliana
  misc_feature: MA Experiment 20001908 PARAMETER Experiment Name: At_Drought_Reproduction_P Parameter: Plant Line Value: WS
  misc_feature: MA Experiment 20001908 PARAMETER Experiment Name: At_Drought_Reproduction_P Parameter: Timepoint (day) Value: 10
  misc_feature: MA Experiment 20001908 PARAMETER Experiment Name: At_Drought_Reproduction_P Parameter: Tissue Value: Siliques
  misc_feature: MA Experiment 20001908 PARAMETER Experiment Name: At_Drought_Reproduction_P Parameter: Treatment Value: Drought vs. No Drought
  misc_feature: MA Experiment ID: 20001910 Result: Down-regulated in Transcription
  misc_feature: MA Experiment 20001910 PARAMETER Experiment Name: At_Drought_Reproduction_P Parameter: Age (day) Value: 37
  misc_feature: MA Experiment 20001910 PARAMETER Experiment Name: At_Drought_Reproduction_P Parameter: Organism Value: A. thaliana
  misc_feature: MA Experiment 20001910 PARAMETER Experiment Name: At_Drought_Reproduction_P Parameter: Plant Line Value: WS
  misc_feature: MA Experiment 20001910 PARAMETER Experiment Name: At_Drought_Reproduction_P Parameter: Timepoint (day) Value: 7
  misc_feature: MA Experiment 20001910 PARAMETER Experiment Name: At_Drought_Reproduction_P Parameter: Tissue Value: Flowers
  misc_feature: MA Experiment 20001910 PARAMETER Experiment Name: At_Drought_Reproduction_P Parameter: Treatment Value: Drought vs. No Drought
  misc_feature: MA Experiment ID: 20001911 Result: Down-regulated in Transcription
  misc_feature: MA Experiment 20001911 PARAMETER Experiment Name: At_Drought_Reproduction_P Parameter: Age (day) Value: 40
  misc_feature: MA Experiment 20001911 PARAMETER Experiment Name: At_Drought_Reproduction_P Parameter: Organism Value: A. thaliana
  misc_feature: MA Experiment 20001911 PARAMETER Experiment Name: At_Drought_Reproduction_P Parameter: Plant Line Value: WS
  misc_feature: MA Experiment 20001911 PARAMETER Experiment Name: At_Drought_Reproduction_P Parameter: Timepoint (day) Value: 10
  misc_feature: MA Experiment 20001911 PARAMETER Experiment Name: At_Drought_Reproduction_P Parameter: Tissue Value: Flowers
  misc_feature: MA Experiment 20001911 PARAMETER Experiment Name: At_Drought_Reproduction_P Parameter: Treatment Value: Drought vs. No Drought
acttttacaactaactcataagtaaaacacagacagtttttagatggctaagatatattccccttcttttcccggtactctctgtctttgcatttttactctcttgacgctaatgttcattcgggtttccgctcgacccgcgacattcgtcgaggatttcaaagccgcctggtcggaatctcacatccgtcaaatggaagacggaaaagctatccagctcgtccttgatcagagcactggatgtggatttgcttccaaaagaaaatatctattcggacgagtgagcatgaagatcaaactcattcccggagactctgccggtacggtcaccgctttctacatgaactccgatacggccacggtgagagacgagctagattttgagttcttgggaaacagaagtggtcaaccttactcagtgcaaacaaacatatttgctcatggcaaaggagatagagaacaaagagttaatctttggttcgacccatctatggattaccacacttacactatcttatggtcacacaaacacattgttttttacgtagacgatgtgccaataagagaatacaaaaacaacgaagccaagaacatagcttacccaacatcacaacctatgggagtatactcaacattatgggaagcagatgactgggcaacacgtggtggattagagaaaattgattggagcaaagctccattttatgcttattacaaagatttcgacatcgaaggttgtcctgttcctggaccaaccttttgtccatcgaaccctcataattggtgggaaggttatgcctatcagtctcttaacgccgttgaagctcgacgttaccggtgggttagagtaaaccatatggtttatgattattgtactgaccggtctaggtttcctgtcccaccacccgagtgtcgtgcttgaaaataattgcatacgtacgttgcaatgatcatgtttcgtcttgtacgagattttatatataaattgtgggaaaatgtggattgtattgtcctcttacgcaattgtgcagacgtacgtgagtgtgtatagatataattgtgatttgtggttatttgaaatttttataaacatagatgaattctg

SEQ ID NO: 79253 - protein, 292 aa, Arabidopsis thaliana; identical to SEQ ID NO: 28915
  peptide (1)..(292): Ceres Seq. ID no. 12650482
  misc_feature (35)..(217): Pfam Name: Glycosyl hydrolases family 16 Pfam Description: Glycosyl hydrolases family 16
  misc_feature (1)..(292): Homolog of NCBI NO: 18424986 NR Description: xyloglucan endotransglycosylase, putative; id: At5g65730.1, supported by cDNA: 12301., supported by cDNA: supported by cDNA: gi_20334765 [Arabidopsis thaliana]
  misc_feature (1)..(292): Homolog of NCBI NO: 21537188 NR Description: xyloglucan endo-transglycosylase-like protein
  misc_feature (24)..(292): Homolog of NCBI NO: 7447407 NR Description: xyloglucan endo-1,4-beta-D-glucanase (EC 3.2.1.-)
  misc_feature (17)..(290): Homolog of NCBI NO: 7447418 NR Description: probable endo-xyloglucan transferase - upland
  misc_feature (12)..(292): Homolog of NCBI NO: 15235714 NR Description: xyloglucan endotransglycosylase, putative; id: At4g37800.1, supported by cDNA: 142634., supported by cDNA:
  misc_feature (12)..(292): Homolog of NCBI NO: 21553421 NR Description: endo-xyloglucan transferase-like protein
  misc_feature (15)..(290): Homolog of NCBI NO: 30841326 NR Description: xyloglucan endotransglycosylase [Gossypium
  misc_feature (17)..(290): Homolog of NCBI NO: 5070246 NR Description: xyloglucan endo-transglycosylase-like protein
  misc_feature (12)..(291): Homolog of NCBI NO: 15240733 NR Description: xyloglucan endotransglycosylase (EXGT-A4); id: At5g13870.1 [Arabidopsis thaliana] endoxyloglucan transferase [Arabidopsis thaliana]
  misc_feature (35)..(291): Homolog of NCBI NO: 950299 NR Description: xyloglucan endotransglycosylase precursor

SEQ ID NO: 79254 - protein, 269 aa, Arabidopsis thaliana; identical to SEQ ID NO: 28916
  peptide (1)..(269): Ceres Seq. ID no. 12650483
  misc_feature (12)..(194): Pfam Name: Glycosyl hydrolases family 16 Pfam Description: Glycosyl hydrolases family 16
  misc_feature (1)..(269): Homolog of NCBI NO: 18424986 NR Description: xyloglucan endotransglycosylase, putative; id: At5g65730.1, supported by cDNA: 12301., supported by cDNA: supported by cDNA: gi_20334765 [Arabidopsis thaliana]
  misc_feature (1)..(269): Homolog of NCBI NO: 21537188 NR Description: xyloglucan endo-transglycosylase-like protein
  misc_feature (1)..(269): Homolog of NCBI NO: 7447407 NR Description: xyloglucan endo-1,4-beta-D-glucanase (EC 3.2.1.-)
  misc_feature (1)..(267): Homolog of NCBI NO: 7447418 NR Description: probable endo-xyloglucan transferase - upland
  misc_feature (1)..(269): Homolog of NCBI NO: 15235714 NR Description: xyloglucan endotransglycosylase, putative; id: At4g37800.1, supported by cDNA: 142634., supported by cDNA:
  misc_feature (1)..(269): Homolog of NCBI NO: 21553421 NR Description: endo-xyloglucan transferase-like protein
  misc_feature (1)..(267): Homolog of NCBI NO: 30841326 NR Description: xyloglucan endotransglycosylase [Gossypium
  misc_feature (1)..(267): Homolog of NCBI NO: 5070246 NR Description: xyloglucan endo-transglycosylase-like protein
  misc_feature (1)..(268): Homolog of NCBI NO: 15240733 NR Description: xyloglucan endotransglycosylase (EXGT-A4); id: At5g13870.1 [Arabidopsis thaliana] endoxyloglucan transferase [Arabidopsis thaliana]
  misc_feature (12)..(268): Homolog of NCBI NO: 950299 NR Description: xyloglucan endotransglycosylase precursor

SEQ ID NO: 79255 - protein, 242 aa, Arabidopsis thaliana; identical to SEQ ID NO: 28917
  peptide (1)..(242): Ceres Seq. ID no. 12650484
  misc_feature (1)..(167): Pfam Name: Glycosyl hydrolases family 16 Pfam Description: Glycosyl hydrolases family 16
  misc_feature (1)..(242): Homolog of NCBI NO: 18424986 NR Description: xyloglucan endotransglycosylase, putative; id: At5g65730.1, supported by cDNA: 12301., supported by cDNA: supported by cDNA: gi_20334765 [Arabidopsis thaliana]
  misc_feature (1)..(242): Homolog of NCBI NO: 21537188 NR Description: xyloglucan endo-transglycosylase-like protein
  misc_feature (1)..(242): Homolog of NCBI NO: 7447407 NR Description: xyloglucan endo-1,4-beta-D-glucanase (EC 3.2.1.-)
  misc_feature (1)..(240): Homolog of NCBI NO: 7447418 NR Description: probable endo-xyloglucan transferase - upland
  misc_feature (1)..(242): Homolog of NCBI NO: 15235714 NR Description: xyloglucan endotransglycosylase, putative; id: At4g37800.1, supported by cDNA: 142634., supported by cDNA:
  misc_feature (1)..(242): Homolog of NCBI NO: 21553421 NR Description: endo-xyloglucan transferase-like protein
  misc_feature (1)..(240): Homolog of NCBI NO: 30841326 NR Description: xyloglucan endotransglycosylase [Gossypium
  misc_feature (1)..(240): Homolog of NCBI NO: 5070246 NR Description: xyloglucan endo-transglycosylase-like protein
  misc_feature (1)..(241): Homolog of NCBI NO: 15240733 NR Description: xyloglucan endotransglycosylase (EXGT-A4); id: At5g13870.1 [Arabidopsis thaliana] endoxyloglucan transferase [Arabidopsis thaliana]
  misc_feature (1)..(241): Homolog of NCBI NO: 950299 NR Description: xyloglucan endotransglycosylase precursor

SEQ ID NO: 79256 - DNA, 408 bp, Arabidopsis thaliana
  misc_feature (1)..(408): Ceres Seq. ID no. 12650513
  misc_feature: MA Experiment ID: 20000173 Result: Down-regulated in Transcription
  misc_feature: MA Experiment 20000173 PARAMETER Experiment Name: At_42deg_Heat_P Parameter: Age (day) Value: 14
  misc_feature: MA Experiment 20000173 PARAMETER Experiment Name: At_42deg_Heat_P Parameter: Organism Value: A. thaliana
  misc_feature: MA Experiment 20000173 PARAMETER Experiment Name: At_42deg_Heat_P Parameter: Plant Line Value: WS
  misc_feature: MA Experiment 20000173 PARAMETER Experiment Name: At_42deg_Heat_P Parameter: Temperature (deg C) Value: 42 vs. 22
  misc_feature: MA Experiment 20000173 PARAMETER Experiment Name: At_42deg_Heat_P Parameter: Timepoint (hr) Value: 6
  misc_feature: MA Experiment 20000173 PARAMETER Experiment Name: At_42deg_Heat_P Parameter: Tissue Value: Aerial
  misc_feature: MA Experiment ID: 20000234 Result: Up-regulated in Transcription
  misc_feature: MA Experiment 20000234 PARAMETER Experiment Name: At_Siliques_P Parameter: Age (day) Value: 21
  misc_feature: MA Experiment 20000234 PARAMETER Experiment Name: At_Siliques_P Parameter: Organism Value: A. thaliana
  misc_feature: MA Experiment 20000234 PARAMETER Experiment Name: At_Siliques_P Parameter: Plant Line Value: WS
  misc_feature: MA Experiment 20000234 PARAMETER Experiment Name: At_Siliques_P Parameter: Tissue Value: Less Than 5mm Siliques vs. Whole Plant
  misc_feature: MA Experiment ID: 20000235 Result: Up-regulated in Transcription
  misc_feature: MA Experiment 20000235 PARAMETER Experiment Name: At_Siliques_P Parameter: Age (day) Value: 21
  misc_feature: MA Experiment 20000235 PARAMETER Experiment Name: At_Siliques_P Parameter: Organism Value: A. thaliana
  misc_feature: MA Experiment 20000235 PARAMETER Experiment Name: At_Siliques_P Parameter: Plant Line Value: WS
  misc_feature: MA Experiment 20000235 PARAMETER Experiment Name: At_Siliques_P Parameter: Tissue Value: 5-10mm Siliques vs. Whole Plant
  misc_feature: MA Experiment ID: 20000264 Result: Up-regulated in Transcription
  misc_feature: MA Experiment 20000264 PARAMETER Experiment Name: At_Open_Flower_P Parameter: Age (day) Value: 21
  misc_feature: MA Experiment 20000264 PARAMETER Experiment Name: At_Open_Flower_P Parameter: Plant Line Value: WS
  misc_feature: MA Experiment 20000264 PARAMETER Experiment Name: At_Open_Flower_P Parameter: Tissue Value: Open Flower vs. Whole Plant
  misc_feature: MA Experiment ID: 20000265 Result: Up-regulated in Transcription
  misc_feature: MA Experiment 20000265 PARAMETER Experiment Name: At_Open_Flower_P Parameter: Age (day) Value: 21
  misc_feature: MA Experiment 20000265 PARAMETER Experiment Name: At_Open_Flower_P Parameter: Plant Line Value: WS
  misc_feature: MA Experiment 20000265 PARAMETER Experiment Name: At_Open_Flower_P Parameter: Tissue Value: Closed Flower vs. Whole Plant
  misc_feature: MA Experiment ID: 20000438 Result: Up-regulated in Transcription
  misc_feature: MA Experiment 20000438 PARAMETER Experiment Name: At_Shoots__P Parameter: Age (day) Value: 14
  misc_feature: MA Experiment 20000438 PARAMETER Experiment Name: At_Shoots__P Parameter: Tissue Value: Shoots vs. Whole Plant
atgagggtttccaaccctaacttaaaaatccagggtttctacactcgtaatcaagaatcgatgacatggcctagtgttggcaagtacaaagtggacattgcatccttcgagtctatagccttgcctgagctacaggtcaaagacgataccaatcttttcatcattgatgaagttggcaagatggagatgtttagtccatccttttttccggctgtcctcaatgttttggactccaacgttcctcttcttgcttccattcctagcccaaaatttggtcgacatcttcctgaagtggcaaggttgaagaaccaaccgggagtgaatgtaatctccctgagtgcgactaacagagatcccatgaaagaacatatctttgatgttttctctggttggctgcccaagcaatag

SEQ ID NO: 79257 - protein, 135 aa, Arabidopsis thaliana
  peptide (1)..(135): Ceres Seq. ID no. 12650514
  misc_feature (17)..(134): Pfam Name: Protein of unknown function, DUF265 Pfam Description: Protein of unknown function, DUF265
  misc_feature (17)..(135): Homolog of NCBI NO: 20503005 NR Description: Unknown protein [Oryza sativa (japonica
  misc_feature (17)..(135): Homolog of NCBI NO: 6063556 NR Description: similar to Aquifex aeolicus section 65 of 109 of complete genome; hypothetical protein. (AE000733) [Oryza sativa
  misc_feature (26)..(118): Homolog of NCBI NO: 14150100 NR Description: hypothetical protein MGC13186 [Homo sapiens] Similar to RIKEN cDNA 2310079N02 gene [Homo sapiens]
  misc_feature (26)..(127): Homolog of NCBI NO: 15606506 NR Description: hypothetical protein [Aquifex aeolicus]
  misc_feature (26)..(127): Homolog of NCBI NO: 34851911 NR Description: similar to RIKEN cDNA 2310079N02 [Rattus
  misc_feature (26)..(127): Homolog of NCBI NO: 13385098 NR Description: RIKEN cDNA 2310079N02 [Mus musculus] unnamed protein product [Mus musculus] unnamed protein product [Mus musculus]
  misc_feature (24)..(124): Homolog of NCBI NO: 24667833 NR Description: CG10581-PA [Drosophila melanogaster]
  misc_feature (27)..(127): Homolog of NCBI NO: 12859618 NR Description: unnamed protein product [Mus musculus]
  misc_feature (24)..(128): Homolog of NCBI NO: 20092214 NR Description: conserved hypothetical protein [Methanosarcina str. C2A] >gi|19917446|gb|AAM06769.1| conserved hypothetical
  misc_feature (23)..(96): Homolog of NCBI NO: 14521472 NR Description: hypothetical protein [Pyrococcus abyssi]
MRVSNPNLKIQGFYTRNQESMTWPSVGKYKVDIASFESIALPELQVKDDTNLFIIDEVGKMEMFSPSFFPAVLNVLDSNVPLLASIPSPKFGRHLPEVARLKNQPGVNVISLSATNRDPMKEHIFDVFSGWLPKQ

SEQ ID NO: 79258 - protein, 115 aa, Arabidopsis thaliana
  peptide (1)..(115): Ceres Seq. ID no. 12650515
  misc_feature (1)..(114): Pfam Name: Protein of unknown function, DUF265 Pfam Description: Protein of unknown function, DUF265
  misc_feature (1)..(115): Homolog of NCBI NO: 20503005 NR Description: Unknown protein [Oryza sativa (japonica
  misc_feature (1)..(115): Homolog of NCBI NO: 6063556 NR Description: similar to Aquifex aeolicus section 65 of 109 of complete genome; hypothetical protein. (AE000733) [Oryza sativa
  misc_feature (6)..(98): Homolog of NCBI NO: 14150100 NR Description: hypothetical protein MGC13186 [Homo sapiens] Similar to RIKEN cDNA 2310079N02 gene [Homo sapiens]
  misc_feature (6)..(107): Homolog of NCBI NO: 15606506 NR Description: hypothetical protein [Aquifex aeolicus]
  misc_feature (6)..(107): Homolog of NCBI NO: 34851911 NR Description: similar to RIKEN cDNA 2310079N02 [Rattus
  misc_feature (6)..(107): Homolog of NCBI NO: 13385098 NR Description: RIKEN cDNA 2310079N02 [Mus musculus] unnamed protein product [Mus musculus] unnamed protein product [Mus musculus]
  misc_feature (4)..(104): Homolog of NCBI NO: 24667833 NR Description: CG10581-PA [Drosophila melanogaster]
  misc_feature (7)..(107): Homolog of NCBI NO: 12859618 NR Description: unnamed protein product [Mus musculus]
  misc_feature (4)..(108): Homolog of NCBI NO: 20092214 NR Description: conserved hypothetical protein [Methanosarcina str. C2A] >gi|19917446|gb|AAM06769.1| conserved hypothetical
  misc_feature (3)..(76): Homolog of NCBI NO: 14521472 NR Description: hypothetical protein [Pyrococcus abyssi]
MTWPSVGKYKVDIASFESIALPELQVKDDTNLFIIDEVGKMEMFSPSFFPAVLNVLDSNVPLLASIPSPKFGRHLPEVARLKNQPGVNVISLSATNRDPMKEHIFDVFSGWLPKQ

SEQ ID NO: 79259 - protein, 75 aa, Arabidopsis thaliana
  peptide (1)..(75): Ceres Seq. ID no. 12650516
  misc_feature (1)..(74): Pfam Name: Protein of unknown function, DUF265 Pfam Description: Protein of unknown function, DUF265
  misc_feature (1)..(75): Homolog of NCBI NO: 20503005 NR Description: Unknown protein [Oryza sativa (japonica
  misc_feature (1)..(75): Homolog of NCBI NO: 6063556 NR Description: similar to Aquifex aeolicus section 65 of 109 of complete genome; hypothetical protein. (AE000733) [Oryza sativa
  misc_feature (1)..(58): Homolog of NCBI NO: 14150100 NR Description: hypothetical protein MGC13186 [Homo sapiens] Similar to RIKEN cDNA 2310079N02 gene [Homo sapiens]
  misc_feature (1)..(67): Homolog of NCBI NO: 15606506 NR Description: hypothetical protein [Aquifex aeolicus]
  misc_feature (1)..(67): Homolog of NCBI NO: 34851911 NR Description: similar to RIKEN cDNA 2310079N02 [Rattus
  misc_feature (1)..(67): Homolog of NCBI NO: 13385098 NR Description: RIKEN cDNA 2310079N02 [Mus musculus] unnamed protein product [Mus musculus] unnamed protein product [Mus musculus]
  misc_feature (1)..(64): Homolog of NCBI NO: 24667833 NR Description: CG10581-PA [Drosophila melanogaster]
  misc_feature (1)..(67): Homolog of NCBI NO: 12859618 NR Description: unnamed protein product [Mus musculus]
  misc_feature (1)..(68): Homolog of NCBI NO: 20092214 NR Description: conserved hypothetical protein [Methanosarcina str. C2A] >gi|19917446|gb|AAM06769.1| conserved hypothetical
  misc_feature (1)..(36): Homolog of NCBI NO: 14521472 NR Description: hypothetical protein [Pyrococcus abyssi]
MEMFSPSFFPAVLNVLDSNVPLLASIPSPKFGRHLPEVARLKNQPGVNVISLSATNRDPMKEHIFDVFSGWLPKQ

SEQ ID NO: 79260 - DNA, 1188 bp, Arabidopsis thaliana
  misc_feature (1)..(1188): Ceres Seq. ID no. 12650529
  misc_feature: MA Experiment ID: 20000184 Result: Down-regulated in Transcription
  misc_feature: MA Experiment 20000184 PARAMETER Experiment Name: At_Shoots__P Parameter: Age (day) Value: 7
  misc_feature: MA Experiment 20000184 PARAMETER Experiment Name: At_Shoots__P Parameter: Tissue Value: Shoots vs. Whole Plant
  misc_feature: MA Experiment ID: 20001450 Result: Up-regulated in Transcription
  misc_feature: MA Experiment 20001450 PARAMETER Experiment Name: At_Far-red-induction_P Parameter: Age (day) Value: 7
  misc_feature: MA Experiment 20001450 PARAMETER Experiment Name: At_Far-red-induction_P Parameter: Light Value: Far-red vs. White
  misc_feature: MA Experiment 20001450 PARAMETER Experiment Name: At_Far-red-induction_P Parameter: Organism Value: A. thaliana
  misc_feature: MA Experiment 20001450 PARAMETER Experiment Name: At_Far-red-induction_P Parameter: Plant Line Value: Columbia
  misc_feature: MA Experiment 20001450 PARAMETER Experiment Name: At_Far-red-induction_P Parameter: Timepoint (hr) Value: 8
  misc_feature: MA Experiment 20001450 PARAMETER Experiment Name: At_Far-red-induction_P Parameter: Tissue Value: Whole Plant
  misc_feature: MA Experiment ID: 20001451 Result: Up-regulated in Transcription
  misc_feature: MA Experiment 20001451 PARAMETER Experiment Name: At_Far-red-induction_P Parameter: Age (day) Value: 7
  misc_feature: MA Experiment 20001451 PARAMETER Experiment Name: At_Far-red-induction_P Parameter: Light Value: Far-red vs. White
  misc_feature: MA Experiment 20001451 PARAMETER Experiment Name: At_Far-red-induction_P Parameter: Organism Value: A. thaliana
  misc_feature: MA Experiment 20001451 PARAMETER Experiment Name: At_Far-red-induction_P Parameter: Plant Line Value: Columbia
  misc_feature: MA Experiment 20001451 PARAMETER Experiment Name: At_Far-red-induction_P Parameter: Timepoint (hr) Value: 24
  misc_feature: MA Experiment 20001451 PARAMETER Experiment Name: At_Far-red-induction_P Parameter: Tissue Value: Whole Plant
atggaagaaacgtccaagctacagttaccggagagtttccttagctttctagaggcgaatggccttgatccttcaatctatactcacggagattcaattccacgttatgtaaggttgaaacctggattcgaggatgctttcgaagagattgaatccgaaattaactgtaaactggagaaggtgaattggttaccaggattttactccatccctccagatgttcatatagccagaaccaaggcctatcagcaaggcatgatgtacggaatcgatgcagcttccggtgccgctgtctcagctcttggtatctccccaggagaccatgtcttggatctttgtgctgctcctggtgctaaactatgtatgatgcttgacctactgggtcagaagggtactgccaccggtgtcgatgttgcaaggcatcgtcttgctgcctgcagaactatgcttctaaagtatgggcttgctgaaaggagccggctttttcttgctgatggaaccactttctcagtcccaccaaccagaaacctaccatgtgagtcatgtgtggacgatcatgaagacacattcaagcagtggacctcccgtagaccttacaaagaaaggaaacaagaagctaaggcaaggaagaattctgttttgccgcagaatggacaggcagaaattattttctacggacagggttctggagtaatcgggctaaaaaagaatgaactttatagatcccttgaccaaaatgattatgcatcttatgggtatgataaggttcttgtggacgcagagtgcacacacgatggttcgatcaaacatatccagaaatttgagcaatggggttggaaaactctggaacgccgtgttctggatgctgagagaaccgatacaaacttaaaagctcttcagttgaatctactgagaaatggattcagattgttgaaagaagctggcactctagtgtacagcacctgcagtttgacgcatgcccaaaacgaagatgtggtggatcagttcctttctgaaaatttctctgcagagctacaagagattgaaatggccaaggattggccgtgtagaagtggtcgcacgcctaagacactgcggtttgatccttccacctcagcaaccagcggccttttcgttgcaaaaatcaggaaattgccacccaacgaagcaaagaagaatgtgttgtga

SEQ ID NO: 79261 - protein, 395 aa, Arabidopsis thaliana
  peptide (1)..(395): Ceres Seq. ID no. 12650530
  misc_feature (295)..(381): Pfam Name: NOL1/NOP2/sun family Pfam Description: NOL1/NOP2/sun family
  misc_feature (178)..(395): Homolog of NCBI NO: 15239280 NR Description: putative protein; protein id: At5g66180.1 thaliana] >gi|10177133|dbj|BAB10423.1| contains similarity to
  misc_feature (1)..(117): Homolog of NCBI NO: 15239280 NR Description: putative protein; protein id: At5g66180.1 thaliana] >gi|10177133|dbj|BAB10423.1| contains similarity to
  misc_feature (87)..(386): Homolog of NCBI NO: 18481712 NR Description: putative nucleolar protein [Sorghum bicolor]
  misc_feature (3)..(90): Homolog of NCBI NO: 18481711 NR Description: putative phosphate/phosphoenolpyruvate
  misc_feature (254)..(391): Homolog of NCBI NO: 11499621 NR Description: proliferating-cell nucleolar antigen P120,
  misc_feature (31)..(143): Homolog of NCBI NO: 11499621 NR Description: proliferating-cell nucleolar antigen P120,
  misc_feature (10)..(166): Homolog of NCBI NO: 20094975 NR Description: tRNA/rRNA cytosine-C5-methylase [Methanopyrus
  misc_feature (254)..(380): Homolog of NCBI NO: 20094975 NR Description: tRNA/rRNA cytosine-C5-methylase [Methanopyrus
  misc_feature (247)..(384): Homolog of NCBI NO: 18977629 NR Description: putative nucleolar protein III (nol1-nop2-sun [Pyrococcus furiosus DSM 3638] >gi|18893351|gb|AAL81381.1|
  misc_feature (33)..(155): Homolog of NCBI NO: 18977629 NR Description: putative nucleolar protein III (nol1-nop2-sun [Pyrococcus furiosus DSM 3638] >gi|18893351|gb|AAL81381.1|
MEETSKLQLPESFLSFLEANGLDPSIYTHGDSIPRYVRLKPGFEDAFEEIESEINCKLEKVNWLPGFYSIPPDVHIARTKAYQQGMMYGIDAASGAAVSALGISPGDHVLDLCAAPGAKLCMMLDLLGQKGTATGVDVARHRLAACRTMLLKYGLAERSRLFLADGTTFSVPPTRNLPCESCVDDHEDTFKQWTSRRPYKERKQEAKARKNSVLPQNGQAEIIFYGQGSGVIGLKKNELYRSLDQNDYASYGYDKVLVDAECTHDGSIKHIQKFEQWGWKTLERRVLDAERTDTNLKALQLNLLRNGFRLLKEAGTLVYSTCSLTHAQNEDVVDQFLSENFSAELQEIEMAKDWPCRSGRTPKTLRFDPSTSATSGLFVAKIRKLPPNEAKKNVL

SEQ ID NO: 79262 - protein, 310 aa, Arabidopsis thaliana
  peptide (1)..(310): Ceres Seq. ID no. 12650531
  misc_feature (210)..(296): Pfam Name: NOL1/NOP2/sun family Pfam Description: NOL1/NOP2/sun family
  misc_feature (93)..(310): Homolog of NCBI NO: 15239280 NR Description: putative protein; protein id: At5g66180.1 thaliana] >gi|10177133|dbj|BAB10423.1| contains similarity to
  misc_feature (1)..(32): Homolog of NCBI NO: 15239280 NR Description: putative protein; protein id: At5g66180.1 thaliana] >gi|10177133|dbj|BAB10423.1| contains similarity to
  misc_feature (2)..(301): Homolog of NCBI NO: 18481712 NR Description: putative nucleolar protein [Sorghum bicolor]
  misc_feature (169)..(306): Homolog of NCBI NO: 11499621 NR Description: proliferating-cell nucleolar antigen P120,
  misc_feature (1)..(58): Homolog of NCBI NO: 11499621 NR Description: proliferating-cell nucleolar antigen P120,
  misc_feature (1)..(81): Homolog of NCBI NO: 20094975 NR Description: tRNA/rRNA cytosine-C5-methylase [Methanopyrus
  misc_feature (169)..(295): Homolog of NCBI NO: 20094975 NR Description: tRNA/rRNA cytosine-C5-methylase [Methanopyrus
  misc_feature (162)..(299): Homolog of NCBI NO: 18977629 NR Description: putative nucleolar protein III (nol1-nop2-sun [Pyrococcus furiosus DSM 3638] >gi|18893351|gb|AAL81381.1|
  misc_feature (1)..(70): Homolog of NCBI NO: 18977629 NR Description: putative nucleolar protein III (nol1-nop2-sun [Pyrococcus furiosus DSM 3638] >gi|18893351|gb|AAL81381.1|
  misc_feature (1)..(108): Homolog of NCBI NO: 14591177 NR Description: proliferating-cell nucleolar protein p120
MMYGIDAASGAAVSALGISPGDHVLDLCAAPGAKLCMMLDLLGQKGTATGVDVARHRLAACRTMLLKYGLAERSRLFLADGTTFSVPPTRNLPCESCVDDHEDTFKQWTSRRPYKERKQEAKARKNSVLPQNGQAEIIFYGQGSGVIGLKKNELYRSLDQNDYASYGYDKVLVDAECTHDGSIKHIQKFEQWGWKTLERRVLDAERTDTNLKALQLNLLRNGFRLLKEAGTLVYSTCSLTHAQNEDVVDQFLSENFSAELQEIEMAKDWPCRSGRTPKTLRFDPSTSATSGLFVAKIRKLPPNEAKKNVL

SEQ ID NO: 79263 - protein, 309 aa, Arabidopsis thaliana
  peptide (1)..(309): Ceres Seq. ID no. 12650532
  misc_feature (209)..(295): Pfam Name: NOL1/NOP2/sun family Pfam Description: NOL1/NOP2/sun family
  misc_feature (92)..(309): Homolog of NCBI NO: 15239280 NR Description: putative protein; protein id: At5g66180.1 thaliana] >gi|10177133|dbj|BAB10423.1| contains similarity to
  misc_feature (1)..(31): Homolog of NCBI NO: 15239280 NR Description: putative protein; protein id: At5g66180.1 thaliana] >gi|10177133|dbj|BAB10423.1| contains similarity to
  misc_feature (1)..(300): Homolog of NCBI NO: 18481712 NR Description: putative nucleolar protein [Sorghum bicolor]
  misc_feature (168)..(305): Homolog of NCBI NO: 11499621 NR Description: proliferating-cell nucleolar antigen P120,
  misc_feature (1)..(57): Homolog of NCBI NO: 11499621 NR Description: proliferating-cell nucleolar antigen P120,
  misc_feature (1)..(80): Homolog of NCBI NO: 20094975 NR Description: tRNA/rRNA cytosine-C5-methylase [Methanopyrus
  misc_feature (168)..(294): Homolog of NCBI NO: 20094975 NR Description: tRNA/rRNA cytosine-C5-methylase [Methanopyrus
  misc_feature (161)..(298): Homolog of NCBI NO: 18977629 NR Description: putative nucleolar protein III (nol1-nop2-sun [Pyrococcus furiosus DSM 3638] >gi|18893351|gb|AAL81381.1|
  misc_feature (1)..(69): Homolog of NCBI NO: 18977629 NR Description: putative nucleolar protein III (nol1-nop2-sun [Pyrococcus furiosus DSM 3638] >gi|18893351|gb|AAL81381.1|
  misc_feature (1)..(107): Homolog of NCBI NO: 14591177 NR Description: proliferating-cell nucleolar protein p120
MYGIDAASGAAVSALGISPGDHVLDLCAAPGAKLCMMLDLLGQKGTATGVDVARHRLAACRTMLLKYGLAERSRLFLADGTTFSVPPTRNLPCESCVDDHEDTFKQWTSRRPYKERKQEAKARKNSVLPQNGQAEIIFYGQGSGVIGLKKNELYRSLDQNDYASYGYDKVLVDAECTHDGSIKHIQKFEQWGWKTLERRVLDAERTDTNLKALQLNLLRNGFRLLKEAGTLVYSTCSLTHAQNEDVVDQFLSENFSAELQEIEMAKDWPCRSGRTPKTLRFDPSTSATSGLFVAKIRKLPPNEAKKNVL

SEQ ID NO: 79264 - DNA, 749 bp, Arabidopsis thaliana
  misc_feature (1)..(749): Ceres Seq. ID no. 12650546
  misc_feature: MA Experiment ID: 20000179 Result: Up-regulated in Transcription
  misc_feature: MA Experiment 20000179 PARAMETER Experiment Name: At_Germinating_Seeds_P Parameter: Age (hr) Value: 6 vs. 0
  misc_feature: MA Experiment 20000179 PARAMETER Experiment Name: At_Germinating_Seeds_P Parameter: Tissue Value: Germinating Seeds
  misc_feature: MA Experiment ID: 20000180 Result: Up-regulated in Transcription
  misc_feature: MA Experiment 20000180 PARAMETER Experiment Name: At_Germinating_Seeds_P Parameter: Age (hr) Value: 24 vs. 0
  misc_feature: MA Experiment 20000180 PARAMETER Experiment Name: At_Germinating_Seeds_P Parameter: Tissue Value: Germinating Seeds
  misc_feature: MA Experiment ID: 20000214 Result: Down-regulated in Transcription
  misc_feature: MA Experiment 20000214 PARAMETER Experiment Name: At_4deg_Cold_P Parameter: Timepoint (hr) Value: 6
  misc_feature: MA Experiment ID: 20001558 Result: Down-regulated in Transcription
  misc_feature: MA Experiment 20001558 PARAMETER Experiment Name: At_Drought_Soil_Dry_P Parameter: Age (day) Value: 27
  misc_feature: MA Experiment 20001558 PARAMETER Experiment Name: At_Drought_Soil_Dry_P Parameter: Organism Value: A. thaliana
  misc_feature: MA Experiment 20001558 PARAMETER Experiment Name: At_Drought_Soil_Dry_P Parameter: Plant Line Value: WS
  misc_feature: MA Experiment 20001558 PARAMETER Experiment Name: At_Drought_Soil_Dry_P Parameter: Post Timepoint (hr) Value: 6
  misc_feature: MA Experiment 20001558 PARAMETER Experiment Name: At_Drought_Soil_Dry_P Parameter: Post-Treatment Value: Re-Water vs. No Drought
  misc_feature: MA Experiment 20001558 PARAMETER Experiment Name: At_Drought_Soil_Dry_P Parameter: Timepoint (day) Value: 13
  misc_feature: MA Experiment 20001558 PARAMETER Experiment Name: At_Drought_Soil_Dry_P Parameter: Treatment Value: Drought vs. No Drought
atcgtcatcgtgaaatgtgcagctccggaaataaataatcactaaaataaccagatccgatctactgccccggtttctcgccggaatctccattctgtaaccggcgatcctctttctgctcagttatggaagacgtgaaagggaaggagattattgatgatgctcctattgacaacaaggtttcagatgaaatggagagtgaggaaaatgcgatcaagaaaaagtatggaggattgttgcctaagaagattcctttgatatctaaggaccatgaacgtgcgttttttgactcagctgattgggctttaggcaagcaaaaaggacagaagccgaaagggcctttggaagctctccgcccaaaactgcagccaaccccgcaacagcaaccaagagcaagacgaatggcttattcttcaggcgaaactgaagacactgagattgataacaacgaagctccggatgaccaagcctgcgcatcagctgtggatagtaccaatttaaaggacgatggaggcgcaaaagacaacatcaaatcatgaacaacatatagagatctcttgaggagcgcaaacaaacaacatcacaagtcaatttacagaagaataagcgaccaggtttgctttgcaacggttgtaatatcaagtctcttaccttatcatacttgggactgcaaatctgtatcacttacaaacctcctggcttgaaacgtctattggacgattgcaaatgatttgctttaatgatccatc

SEQ ID NO: 79265 - protein, 137 aa, Arabidopsis thaliana; identical to SEQ ID NO: 28532
  peptide (1)..(137): Ceres Seq. ID no. 12650547
  misc_feature (1)..(137): Homolog of NCBI NO: 18409295 NR Description: expressed protein; protein id: At1g69510.1, by cDNA: 10857., supported by cDNA: gi_20260659 [Arabidopsis >gi|12597801|gb|AAG60113.1|AC073178_24 unknown protein
  misc_feature (1)..(102): Homolog of NCBI NO: 34902768 NR Description: unnamed protein product [Oryza sativa (japonica group)] >gi|34904672|ref|NP_913683.1| P0034C11.31 [Oryza sativa
  misc_feature (30)..(133): Homolog of NCBI NO: 4164473 NR Description: negatively light-regulated protein [Vernicia
  misc_feature (1)..(99): Homolog of NCBI NO: 18424791 NR Description: expressed protein; protein id: At5g64130.1, by cDNA: 10032., supported by cDNA: gi_16648717 [Arabidopsis >gi|16648718|gb|AAL25551.1| AT5g64130/MHJ24_11 [Arabidopsis
  misc_feature (35)..(102): Homolog of NCBI NO: 100535 NR Description: hypothetical protein - swollen duckweed
  misc_feature (35)..(114): Homolog of NCBI NO: 100536 NR Description: hypothetical protein - swollen duckweed (fragment)
  misc_feature (38)..(99): Homolog of NCBI NO: 10176961 NR Description: gene_id:MHJ24.11~unknown protein [Arabidopsis
  misc_feature (17)..(104): Homolog of NCBI NO: 18414599 NR Description: Expressed protein; protein id: At4g16146.1,
  misc_feature (17)..(104): Homolog of NCBI NO: 21592601 NR Description: unknown [Arabidopsis thaliana]
  misc_feature (17)..(104): Homolog of NCBI NO: 26453128 NR Description: unknown protein [Arabidopsis thaliana]

SEQ ID NO: 79266 - protein, 115 aa, Arabidopsis thaliana; identical to SEQ ID NO: 28533
  peptide (1)..(115): Ceres Seq. ID no. 12650548
  misc_feature (1)..(115): Homolog of NCBI NO: 18409295 NR Description: expressed protein; protein id: At1g69510.1, by cDNA: 10857., supported by cDNA: gi_20260659 [Arabidopsis >gi|12597801|gb|AAG60113.1|AC073178_24 unknown protein
  misc_feature (1)..(80): Homolog of NCBI NO: 34902768 NR Description: unnamed protein product [Oryza sativa (japonica group)] >gi|34904672|ref|NP_913683.1| P0034C11.31 [Oryza sativa
  misc_feature (8)..(111): Homolog of NCBI NO: 4164473 NR Description: negatively light-regulated protein [Vernicia
  misc_feature (1)..(77): Homolog of NCBI NO: 18424791 NR Description: expressed protein; protein id: At5g64130.1, by cDNA: 10032., supported by cDNA: gi_16648717 [Arabidopsis >gi|16648718|gb|AAL25551.1| AT5g64130/MHJ24_11 [Arabidopsis
  misc_feature (13)..(80): Homolog of NCBI NO: 100535 NR Description: hypothetical protein - swollen duckweed
  misc_feature (13)..(92): Homolog of NCBI NO: 100536 NR Description: hypothetical protein - swollen duckweed (fragment)
  misc_feature (16)..(77): Homolog of NCBI NO: 10176961 NR Description: gene_id:MHJ24.11~unknown protein [Arabidopsis
  misc_feature (1)..(82): Homolog of NCBI NO: 18414599 NR Description: Expressed protein; protein id: At4g16146.1,
  misc_feature (1)..(82): Homolog of NCBI NO: 21592601 NR Description: unknown [Arabidopsis thaliana]
  misc_feature (1)..(82): Homolog of NCBI NO: 26453128 NR Description: unknown protein [Arabidopsis thaliana]

SEQ ID NO: 79267 - DNA, 1166 bp, Arabidopsis thaliana
  misc_feature (1)..(1166): Ceres Seq. ID no. 12650552
  misc_feature: MA Experiment ID: 108434 Result: Down-regulated in Transcription
  misc_feature: MA Experiment 108434 PARAMETER Experiment Name: At_Root_Tips_cDNA_P Parameter: Tissue Value: Root Tips
  misc_feature: MA Experiment ID: 108469 Result: Up-regulated in Transcription
  misc_feature: MA Experiment ID: 108576 Result: Up-regulated in Transcription
  misc_feature: MA Experiment 108576 PARAMETER Experiment Name: At_42deg_Heat_cDNA_P Parameter: Temperature (deg C) Value: 42 vs. 22
  misc_feature: MA Experiment 108576 PARAMETER Experiment Name: At_42deg_Heat_cDNA_P Parameter: Timepoint (hr) Value: 1
  misc_feature: MA Experiment 108576 PARAMETER Experiment Name: At_42deg_Heat_cDNA_P Parameter: Tissue Value: Aerial
  misc_feature: MA Experiment ID: 108595 Result: Up-regulated in Transcription
  misc_feature: MA Experiment 108595 PARAMETER Experiment Name: At_Ler-pi_Ovule_cDNA_P Parameter: Plant Line Value: null
  misc_feature: MA Experiment ID: 20000030 Result: Down-regulated in Transcription
  misc_feature: MA Experiment 20000030 PARAMETER Experiment Name: At_CS6630_Roots_cDNA_P Parameter: Plant Line Value: CS6630 vs. WS
  misc_feature: MA Experiment 20000030 PARAMETER Experiment Name: At_CS6630_Roots_cDNA_P Parameter: Tissue Value: Roots
  misc_feature: MA Experiment ID: 20000224 Result: Down-regulated in Transcription
  misc_feature: MA Experiment ID: 20000314 Result: Down-regulated in Transcription
  misc_feature: MA Experiment 20000314 PARAMETER Experiment Name: At_14day_Shoots-Roots_Sub_P Parameter: Age (day) Value: 14
  misc_feature: MA Experiment 20000314 PARAMETER Experiment Name: At_14day_Shoots-Roots_Sub_P Parameter: Organism Value: A. thaliana
  misc_feature: MA Experiment 20000314 PARAMETER Experiment Name: At_14day_Shoots-Roots_Sub_P Parameter: Plant Line Value: WS
  misc_feature: MA Experiment 20000314 PARAMETER Experiment Name: At_14day_Shoots-Roots_Sub_P Parameter: Tissue Value: Roots vs. Whole Plant
  misc_feature: MA Experiment ID: 20000315 Result: Down-regulated in Transcription
  misc_feature: MA Experiment 20000315 PARAMETER Experiment Name: At_14day_Shoots-Roots_Sub_P Parameter: Age (day) Value: 14
  misc_feature: MA Experiment 20000315 PARAMETER Experiment Name: At_14day_Shoots-Roots_Sub_P Parameter: Organism Value: A. thaliana
  misc_feature: MA Experiment 20000315 PARAMETER Experiment Name: At_14day_Shoots-Roots_Sub_P Parameter: Plant Line Value: WS
  misc_feature: MA Experiment 20000315 PARAMETER Experiment Name: At_14day_Shoots-Roots_Sub_P Parameter: Tissue Value: Shoots vs. Whole Plant
  misc_feature: MA Experiment ID: 20000347 Result: Up-regulated in Transcription
  misc_feature: MA Experiment 20000347 PARAMETER Experiment Name: At_2mM_SA_Sub_P Parameter: Age (day) Value: 14
  misc_feature: MA Experiment 20000347 PARAMETER Experiment Name: At_2mM_SA_Sub_P Parameter: Organism Value: A. thaliana
  misc_feature: MA Experiment 20000347 PARAMETER Experiment Name: At_2mM_SA_Sub_P Parameter: Plant Line Value: WS
  misc_feature: MA Experiment 20000347 PARAMETER Experiment Name: At_2mM_SA_Sub_P Parameter: Timepoint (hr) Value: 6
  misc_feature: MA Experiment 20000347 PARAMETER Experiment Name: At_2mM_SA_Sub_P Parameter: Tissue Value: Aerial
  misc_feature: MA Experiment 20000347 PARAMETER Experiment Name: At_2mM_SA_Sub_P Parameter: Treatment Value: 2mM SA vs. No Treatment
  misc_feature: MA Experiment ID: 20000355 Result: Down-regulated in Transcription
  misc_feature: MA Experiment 20000355 PARAMETER Experiment Name: At_Siliques_Sub_P Parameter: Age (day) Value: 21
  misc_feature: MA Experiment 20000355 PARAMETER Experiment Name: At_Siliques_Sub_P Parameter: Organism Value: A. thaliana
  misc_feature: MA Experiment 20000355 PARAMETER Experiment Name: At_Siliques_Sub_P Parameter: Plant Line Value: WS
  misc_feature: MA Experiment 20000355 PARAMETER Experiment Name: At_Siliques_Sub_P Parameter: Tissue Value: Less Than 5mm Siliques vs. Whole Plant
  misc_feature: MA Experiment ID: 20000440 Result: Down-regulated in Transcription
  misc_feature: MA Experiment 20000440 PARAMETER Experiment Name: At_Closed-Flower__Sub_P Parameter: Tissue Value: Closed Flower vs. Whole Plant
  misc_feature: Pfam Name: Band_7 Pfam Description: SPFH domain / Band 7 family
gtataaagttttgtaatttacttttcaggagaaaaaaatgggtcaagctttgggttgtattcaagttgatcagtcgaatgtagcaatcaaagagacttttgggaaattcgacgaagttcttgagccgggttgtcactgtttgccatggtgtttgggaagtcaagtcgctggtcacctttctttacgtgttcaacagctcgatgttcgctgcgagacaaagactaaggataatgtgtttgtcacggttgttgcttccattcaataccgtgccttagcggagagtgctcaagatgctttttacaagctcagcaacacgaggaatcagattcaagcttatgtctttgatgtgatccgagcaagtgtacctaagctggatctagactctacctttgagcaaaagaatgacattgcaaaaaccgttgagactgagctcgaaaaggctatgtcgcattacgggtatgagattgttcagacactgattgtggatatcgagcctgatgtgcacgtcaagagggcaatgaatgagatcaatgctgcttctagaatgagagaggcagcgagtgagaaagctgaggcagagaagattctgcagatcaagcgtgctgagggagaagctgaatcgaaatacctttcaggtatgggtatagcccgtcagagacaagccattgtggacggtctgagaaacagcgtcctcgccttctccgagtctgttccaggaacatcttccaaagacgtgatggatatggttcttgtgactcagtactttgacacattgaaggaaattggtgcttcttcgaagtcaaactcggtgttcataccgcacggtccaggcgctgttagggacattgcttcacagatcagggatggtcttcttcagggtaactctgctgctgagtagagaaatgtctcaaagtacaaaaaggctttttcagagttttagagttgtgttactacttgctactcagtttatcttttagcggttggctctatatgggttcttaaatttcttatcgtttctctcttctaggcttgtggacttgatccattttcttgttttatgggtttgtggatagagtttgggcttgaaaaatatttgtgttattttgggttttaatgtcgttaactcgttattaatgtttaaacagtggttaaagaatttgttaacg

SEQ ID NO: 79268 - protein, 286 aa, Arabidopsis thaliana; identical to SEQ ID NO: 23094
  peptide (1)..(286): Ceres Seq. ID no. 12650553
  misc_feature: Pfam Name: Band_7 Pfam Description: SPFH domain / Band 7 family
  misc_feature (1)..(286): Homolog of NCBI NO: 15222481 NR Description: unknown protein; protein id: At1g69840.1, by cDNA: gi_20466747 [Arabidopsis thaliana]
  misc_feature (1)..(284): Homolog of NCBI NO: 3928150 NR Description: hypothetical protein [Cicer arietinum]
  misc_feature (1)..(282): Homolog of NCBI NO: 7716466 NR Description: hypersensitive-induced response protein [Zea mays]
  misc_feature (1)..(284): Homolog of NCBI NO: 15241939 NR Description: putative protein; protein id: At5g62740.1, by cDNA: 2641., supported by cDNA: gi_17065547 [Arabidopsis
  misc_feature (1)..(281): Homolog of NCBI NO: 23345042 NR Description: hypersensitive-induced reaction protein 1
  misc_feature (1)..(280): Homolog of NCBI NO: 14150732 NR Description: hypersensitive-induced response protein [Oryza
  misc_feature (1)..(283): Homolog of NCBI NO: 28476864 NR Description: hypersensitive-induced reaction protein 2
  misc_feature (1)..(282): Homolog of NCBI NO: 9998903 NR Description: putative membrane protein [Zea mays]
  misc_feature (1)..(282): Homolog of NCBI NO: 7716468 NR Description: hypersensitive-induced response protein [Zea mays]
  misc_feature (1)..(282): Homolog of NCBI NO: 13194676 NR Description: hypersensitivity-induced response-like protein

SEQ ID NO: 79269 - protein, 151 aa, Arabidopsis thaliana; identical to SEQ ID NO: 23095
  peptide (1)..(151): Ceres Seq. ID no. 12650554
  misc_feature: Pfam Name: Band_7 Pfam Description: SPFH domain / Band 7 family
  misc_feature (1)..(151): Homolog of NCBI NO: 15222481 NR Description: unknown protein; protein id: At1g69840.1, by cDNA: gi_20466747 [Arabidopsis thaliana]
  misc_feature (1)..(149): Homolog of NCBI NO: 3928150 NR Description: hypothetical protein [Cicer arietinum]
  misc_feature (1)..(147): Homolog of NCBI NO: 7716466 NR Description: hypersensitive-induced response protein [Zea mays]
  misc_feature (1)..(149): Homolog of NCBI NO: 15241939 NR Description: putative protein; protein id: At5g62740.1, by cDNA: 2641., supported by cDNA: gi_17065547 [Arabidopsis
  misc_feature (1)..(146): Homolog of NCBI NO: 23345042 NR Description: hypersensitive-induced reaction protein 1
  misc_feature (1)..(145): Homolog of NCBI NO: 14150732 NR Description: hypersensitive-induced response protein [Oryza
  misc_feature (1)..(148): Homolog of NCBI NO: 28476864 NR Description: hypersensitive-induced reaction protein 2
  misc_feature (1)..(147): Homolog of NCBI NO: 9998903 NR Description: putative membrane protein [Zea mays]
  misc_feature (1)..(147): Homolog of NCBI NO: 7716468 NR Description: hypersensitive-induced response protein [Zea mays]
  misc_feature (1)..(147): Homolog of NCBI NO: 13194676 NR Description: hypersensitivity-induced response-like protein

SEQ ID NO: 79270 - DNA, 947 bp, Arabidopsis thaliana
  misc_feature (1)..(947): Ceres Seq. ID no. 12650555
  misc_feature: MA Experiment ID: 20000314 Result: Down-regulated in Transcription
  misc_feature: MA Experiment 20000314 PARAMETER Experiment Name: At_14day_Shoots-Roots_Sub_P Parameter: Age (day) Value: 14
  misc_feature: MA Experiment 20000314 PARAMETER Experiment Name: At_14day_Shoots-Roots_Sub_P Parameter: Organism Value: A. thaliana
  misc_feature: MA Experiment 20000314 PARAMETER Experiment Name: At_14day_Shoots-Roots_Sub_P Parameter: Plant Line Value: WS
  misc_feature: MA Experiment 20000314 PARAMETER Experiment Name: At_14day_Shoots-Roots_Sub_P Parameter: Tissue Value: Roots vs. Whole Plant
  misc_feature: MA Experiment ID: 20000315 Result: Down-regulated in Transcription
  misc_feature: MA Experiment 20000315 PARAMETER Experiment Name: At_14day_Shoots-Roots_Sub_P Parameter: Age (day) Value: 14
  misc_feature: MA Experiment 20000315 PARAMETER Experiment Name: At_14day_Shoots-Roots_Sub_P Parameter: Organism Value: A. thaliana
  misc_feature: MA Experiment 20000315 PARAMETER Experiment Name: At_14day_Shoots-Roots_Sub_P Parameter: Plant Line Value: WS
  misc_feature: MA Experiment 20000315 PARAMETER Experiment Name: At_14day_Shoots-Roots_Sub_P Parameter: Tissue Value: Shoots vs. Whole Plant
  misc_feature: MA Experiment ID: 20000347 Result: Up-regulated in Transcription
  misc_feature: MA Experiment 20000347 PARAMETER Experiment Name: At_2mM_SA_Sub_P Parameter: Age (day) Value: 14
  misc_feature: MA Experiment 20000347 PARAMETER Experiment Name: At_2mM_SA_Sub_P Parameter: Organism Value: A. thaliana
  misc_feature: MA Experiment 20000347 PARAMETER Experiment Name: At_2mM_SA_Sub_P Parameter: Plant Line Value: WS
  misc_feature: MA Experiment 20000347 PARAMETER Experiment Name: At_2mM_SA_Sub_P Parameter: Timepoint (hr) Value: 6
  misc_feature: MA Experiment 20000347 PARAMETER Experiment Name: At_2mM_SA_Sub_P Parameter: Tissue Value: Aerial
  misc_feature: MA Experiment 20000347 PARAMETER Experiment Name: At_2mM_SA_Sub_P Parameter: Treatment Value: 2mM SA vs. No Treatment
  misc_feature: MA Experiment ID: 20000355 Result: Down-regulated in Transcription
  misc_feature: MA Experiment 20000355 PARAMETER Experiment Name: At_Siliques_Sub_P Parameter: Age (day) Value: 21
  misc_feature: MA Experiment 20000355 PARAMETER Experiment Name: At_Siliques_Sub_P Parameter: Organism Value: A. thaliana
  misc_feature: MA Experiment 20000355 PARAMETER Experiment Name: At_Siliques_Sub_P Parameter: Plant Line Value: WS
  misc_feature: MA Experiment 20000355 PARAMETER Experiment Name: At_Siliques_Sub_P Parameter: Tissue Value: Less Than 5mm Siliques vs. Whole Plant
  misc_feature: MA Experiment ID: 20000440 Result: Down-regulated in Transcription
  misc_feature: MA Experiment 20000440 PARAMETER Experiment Name: At_Closed-Flower__Sub_P Parameter: Tissue Value: Closed Flower vs. Whole Plant
atgggtcaagctttgggttgtattcaagttgatcagtcgaatgtagcaatcaaagagacttttgggaaattcgacgaagttcttgagccgggttgtcactgtttgccatggtgtttgggaagtcaagtcgctggtcacctttctttacgtgttcaacagctcgatgttcgctgcgagacaaagactaaggataatgtgtttgtcacggttgttgcttccattcaataccgtgccttagcggagagtgctcaagatgctttttacaagctcagcaacacgaggaatcagattcaagcttatgtctttgatgtgatccgagcaagtgtacctaagctggatctagactctacctttgagcaaaagaatgacattgcaaaaaccgttgagactgagctcgaaaaggctatgtcgcattacgggtatgagattgttcagacactgattgtggatatcgagcctgatgtgcacgtcaagagggcaatgaatgagatcaatgctgcttctagaatgagagaggcagcgagtgagaaagctgaggcagagaagattctgcagatcaagcgtgctgagggagaagctgaatcgaaatacctttcaggtatgggtatagcccgtcagagacaagccattgtggacggtctgagaaacagcgtcctcgccttctccgagtctgttccaggaacatcttccaaagacgtgatggatatggttcttgtgactcagtactttgacacattgaaggaaattggtgcttcttcgaagtcaaactcggtgttcataccgcacggtccaggcgctgttagggacattgcttcacagatcagggatggtcttcttcagggtaactctgctgctgagtagagaaatgtctcaaagtacaaaaaggctttttcagagttttagagttgtgttactacttgctactcagtttatcttttagcggttgg

SEQ ID NO: 79271 - protein, 286 aa, Arabidopsis thaliana; identical to SEQ ID NO: 23094
  peptide (1)..(286): Ceres Seq. ID no. 12650556
  misc_feature (1)..(286): Homolog of NCBI NO: 15222481 NR Description: unknown protein; protein id: At1g69840.1, by cDNA: gi_20466747 [Arabidopsis thaliana]
  misc_feature (1)..(284): Homolog of NCBI NO: 3928150 NR Description: hypothetical protein [Cicer arietinum]
  misc_feature (1)..(282): Homolog of NCBI NO: 7716466 NR Description: hypersensitive-induced response protein [Zea mays]
  misc_feature (1)..(284): Homolog of NCBI NO: 15241939 NR Description: putative protein; protein id: At5g62740.1, by cDNA: 2641., supported by cDNA: gi_17065547 [Arabidopsis
  misc_feature (1)..(281): Homolog of NCBI NO: 23345042 NR Description: hypersensitive-induced reaction protein 1
  misc_feature (1)..(280): Homolog of NCBI NO: 14150732 NR Description: hypersensitive-induced response protein [Oryza
  misc_feature (1)..(283): Homolog of NCBI NO: 28476864 NR Description: hypersensitive-induced reaction protein 2
  misc_feature (1)..(282): Homolog of NCBI NO: 9998903 NR Description: putative membrane protein [Zea mays]
  misc_feature (1)..(282): Homolog of NCBI NO: 7716468 NR Description: hypersensitive-induced response protein [Zea mays]
  misc_feature (1)..(282): Homolog of NCBI NO: 13194676 NR Description: hypersensitivity-induced response-like protein

SEQ ID NO: 79272 - protein, 151 aa, Arabidopsis thaliana; identical to SEQ ID NO: 23095
  peptide (1)..(151): Ceres Seq. ID no. 12650557
  misc_feature (1)..(151): Homolog of NCBI NO: 15222481 NR Description: unknown protein; protein id: At1g69840.1, by cDNA: gi_20466747 [Arabidopsis thaliana]
  misc_feature (1)..(149): Homolog of NCBI NO: 3928150 NR Description: hypothetical protein [Cicer arietinum]
  misc_feature (1)..(147): Homolog of NCBI NO: 7716466 NR Description: hypersensitive-induced response protein [Zea mays]
  misc_feature (1)..(149): Homolog of NCBI NO: 15241939 NR Description: putative protein; protein id: At5g62740.1, by cDNA: 2641., supported by cDNA: gi_17065547 [Arabidopsis
  misc_feature (1)..(146): Homolog of NCBI NO: 23345042 NR Description: hypersensitive-induced reaction protein 1
  misc_feature (1)..(145): Homolog of NCBI NO: 14150732 NR Description: hypersensitive-induced response protein [Oryza
  misc_feature (1)..(148): Homolog of NCBI NO: 28476864 NR Description: hypersensitive-induced reaction protein 2
  misc_feature (1)..(147): Homolog of NCBI NO: 9998903 NR Description: putative membrane protein [Zea mays]
  misc_feature (1)..(147): Homolog of NCBI NO: 7716468 NR Description: hypersensitive-induced response protein [Zea mays]
  misc_feature (1)..(147): Homolog of NCBI NO: 13194676 NR Description: hypersensitivity-induced response-like protein

SEQ ID NO: 79273 - DNA, 1379 bp, Arabidopsis thaliana
  misc_feature (1)..(1379): Ceres Seq. ID no. 12650612
  misc_feature: MA Experiment ID: 108434 Result: Down-regulated in Transcription
  misc_feature: MA Experiment 108434 PARAMETER Experiment Name: At_Root_Tips_cDNA_P Parameter: Tissue Value: Root Tips
  misc_feature: MA Experiment ID: 108462 Result: Up-regulated in Transcription
  misc_feature: MA Experiment 108462 PARAMETER Experiment Name: At_Germinating_Seeds_cDNA_P Parameter: Age (day) Value: 2 vs. 0
  misc_feature: MA Experiment 108462 PARAMETER Experiment Name: At_Germinating_Seeds_cDNA_P Parameter: Tissue Value: Germinating Seeds
  misc_feature: MA Experiment ID: 108501 Result: Up-regulated in Transcription
  misc_feature: MA Experiment 108501 PARAMETER Experiment Name: At_ap2_floral_buds_cDNA_P Parameter: Plant Line Value: ap2 (Ler.)
  misc_feature: MA Experiment 108501 PARAMETER Experiment Name: At_ap2_floral_buds_cDNA_P Parameter: Tissue Value: Closed Flower
  misc_feature: MA Experiment ID: 20000180 Result: Up-regulated in Transcription
  misc_feature: MA Experiment 20000180 PARAMETER Experiment Name: At_Germinating_Seeds_P Parameter: Age (hr) Value: 24 vs. 0
  misc_feature: MA Experiment 20000180 PARAMETER Experiment Name: At_Germinating_Seeds_P Parameter: Tissue Value: Germinating Seeds
  misc_feature: MA Experiment ID: 20000573 Result: Down-regulated in Transcription
  misc_feature: MA Experiment 20000573 PARAMETER Experiment Name: At_100uM_ABA_Mutants__P Parameter: Organism Value: A. thaliana
  misc_feature: MA Experiment 20000573 PARAMETER Experiment Name: At_100uM_ABA_Mutants__P Parameter: Plant Line Value: CS22 vs. Ler wt
  misc_feature: MA Experiment 20000573 PARAMETER Experiment Name: At_100uM_ABA_Mutants__P Parameter: Timepoint (hr) Value: N/A
  misc_feature: MA Experiment 20000573 PARAMETER Experiment Name: At_100uM_ABA_Mutants__P Parameter: Tissue Value: Whole Plant
  misc_feature: MA Experiment 20000573 PARAMETER Experiment Name: At_100uM_ABA_Mutants__P Parameter: Treatment Value: None
  misc_feature: MA Experiment ID: 20001555 Result: Up-regulated in Transcription
  misc_feature: MA Experiment 20001555 PARAMETER Experiment Name: At_Drought_Soil_Dry_P Parameter: Age (day) Value: 24
  misc_feature: MA Experiment 20001555 PARAMETER Experiment Name: At_Drought_Soil_Dry_P Parameter: Organism Value: A. thaliana
  misc_feature: MA Experiment 20001555 PARAMETER Experiment Name: At_Drought_Soil_Dry_P Parameter: Plant Line Value: WS
  misc_feature: MA Experiment 20001555 PARAMETER Experiment Name: At_Drought_Soil_Dry_P Parameter: Post Timepoint (hr) Value: None
  misc_feature: MA Experiment 20001555 PARAMETER Experiment Name: At_Drought_Soil_Dry_P Parameter: Post-Treatment Value: None
  misc_feature: MA Experiment 20001555 PARAMETER Experiment Name: At_Drought_Soil_Dry_P Parameter: Timepoint (day) Value: 10
  misc_feature: MA Experiment 20001555 PARAMETER Experiment Name: At_Drought_Soil_Dry_P Parameter: Treatment Value: Drought vs. No Drought
  misc_feature: MA Experiment ID: 20001556 Result: Up-regulated in Transcription
  misc_feature: MA Experiment 20001556 PARAMETER Experiment Name: At_Drought_Soil_Dry_P Parameter: Age (day) Value: 26
  misc_feature: MA Experiment 20001556 PARAMETER Experiment Name: At_Drought_Soil_Dry_P Parameter: Organism Value: A. thaliana
  misc_feature: MA Experiment 20001556 PARAMETER Experiment Name: At_Drought_Soil_Dry_P Parameter: Plant Line Value: WS
  misc_feature: MA Experiment 20001556 PARAMETER Experiment Name: At_Drought_Soil_Dry_P Parameter: Post Timepoint (hr) Value: None
  misc_feature: MA Experiment 20001556 PARAMETER Experiment Name: At_Drought_Soil_Dry_P Parameter: Post-Treatment Value: None
  misc_feature: MA Experiment 20001556 PARAMETER Experiment Name: At_Drought_Soil_Dry_P Parameter: Timepoint (day) Value: 12
  misc_feature: MA Experiment 20001556 PARAMETER Experiment Name: At_Drought_Soil_Dry_P Parameter: Treatment Value: Drought vs. No Drought
agagatagttgtgacagagagattcatggcggaagcttgcggagtgagaaggatgaagctgggaagccaaggccttgaggtatctgcgcaaggccttggttgcatgggcctctccgctttctacggtgctcccaagccggaaaatgaagccatcgctctcatccaccacgctattcactccggcgttactctccttgacacctccgatatctacggccctgagaccaatgaagttctcctcggaaaggctctcaaggatggggtgagagaaaaagtggaacttgcgaccaaatttggaatcagttatgcagaggggaaaagagaggtcagaggagatcctgaatatgtaagggctgcttgtgaggcaagtttaaagaggctagatattgcctgcatcgatctctattatcagcatcgtgtcgatactcgtgtccctatcgaaatcactatgggagaactgaagaagctggttgaagagggtaaaataaagtacattggtttgtctgaagcctctgcctcaactatcagaagagcacatgctgttcacccaattactgccgtgcagatagaatggtccttgtggacgagagatgtggaagaagaaatcattccgacctgcagggaacttgggattgggattgttgcttacagtcctctaggacgaggtttcttcgcatctggacccaagcttgttgagaacctagaaaaggatgacttcagaaaggctctaccaagattccaagaggaaaacttagaccacaacaagattgtttatgaaaaagtttgtgcaatatcggagaagaaagggtgcactcctggacaactagccctggcatgggttcatcaccagggagatgacgtttgccctatcccaggaaccactaagatcgagaacctcaaacagaacattggagctttgtcagtgaaactcactcctgaagagatgactgagcttgaggccattgcccaaccaggttttgtgaaaggagatagatacagtaacatgataccaactttcaagaacgctgagacaccaccattgtctgcttggaaagccgcttaaaaccggctgaagtttctacggttgtggtggtgcatcatgacattgaagtggtcttaactttctgtcagctagatcagtgtgttggggaataatggtgcgtcttcgagagtagagtatcattcccacggaaacccaagtatcatggttaatgccttgaagaataaataatgtagagttccccaagtgaaaacttcaattttacatttccatacattgtaaccaaactctataaataaagtgttgtgatacataccttaccaaaaaaggctatctatattgtaaaattcatcttctactcaataacttgtgcttctct

SEQ ID NO: 79274 - protein, 353 aa, Arabidopsis thaliana
  peptide (1)..(353): Ceres Seq. ID no. 12650613
  misc_feature (9)..(353): Homolog of NCBI NO: 18406861 NR Description: auxin-induced protein, putative; protein id: supported by cDNA: gi_15912324, supported by cDNA: gi_20466377, by cDNA: gi_6562979 [Arabidopsis thaliana]
  misc_feature (9)..(353): Homolog of NCBI NO: 6562980 NR Description: auxin-induced atb2 [Arabidopsis thaliana]
  misc_feature (9)..(352): Homolog of NCBI NO: 15219786 NR Description: auxin-induced protein, putative; protein id: [Arabidopsis thaliana] >gi|25316215|pir||C96632 hypothetical
  misc_feature (9)..(353): Homolog of NCBI NO: 25316216 NR Description: hypothetical protein F8A5.24 [imported] -
  misc_feature (18)..(254): Homolog of NCBI NO: 25316328 NR Description: hypothetical protein F8A5.23 [imported] -
  misc_feature (293)..(353): Homolog of NCBI NO: 25316328 NR Description: hypothetical protein F8A5.23 [imported] -
  misc_feature (11)..(237): Homolog of NCBI NO: 15219805 NR Description: auxin-induced protein, putative; protein id:
  misc_feature (243)..(352): Homolog of NCBI NO: 15219805 NR Description: auxin-induced protein, putative; protein id:
  misc_feature (9)..(350): Homolog of NCBI NO: 15220214 NR Description: putative auxin-induced protein; protein id:
  misc_feature (15)..(352): Homolog of NCBI NO: 38344997 NR Description: OSJNBa0008A08.11 [Oryza sativa (japonica
EIVVTERFMAEACGVRRMKLGSQGLEVSAQGLGCMGLSAFYGAPKPENEAIALIHHAIHSGVTLLDTSDIYGPETNEVLLGKALKDGVREKVELATKFGISYAEGKREVRGDPEYVRAACEASLKRLDIACIDLYYQHRVDTRVPIEITMGELKKLVEEGKIKYIGLSEASASTIRRAHAVHPITAVQIEWSLWTRDVEEEIIPTCRELGIGIVAYSPLGRGFFASGPKLVENLEKDDFRKALPRFQEENLDHNKIVYEKVCAISEKKGCTPGQLALAWVHHQGDDVCPIPGTTKIENLKQNIGALSVKLTPEEMTELEAIAQPGFVKGDRYSNMIPTFKNAETPPLSAWKAA

SEQ ID NO: 79275 - protein, 345 aa, Arabidopsis thaliana; identical to SEQ ID NO: 28593
  peptide (1)..(345): Ceres Seq. ID no. 12650614
  misc_feature (1)..(345): Homolog of NCBI NO: 18406861 NR Description: auxin-induced protein, putative; protein id: supported by cDNA: gi_15912324, supported by cDNA: gi_20466377, by cDNA: gi_6562979 [Arabidopsis thaliana]
  misc_feature (1)..(345): Homolog of NCBI NO: 6562980 NR Description: auxin-induced atb2 [Arabidopsis thaliana]
  misc_feature (1)..(344): Homolog of NCBI NO: 15219786 NR Description: auxin-induced protein, putative; protein id: [Arabidopsis thaliana] >gi|25316215|pir||C96632 hypothetical
  misc_feature (1)..(345): Homolog of NCBI NO: 25316216 NR Description: hypothetical protein F8A5.24 [imported] -
  misc_feature (10)..(246): Homolog of NCBI NO: 25316328 NR Description: hypothetical protein F8A5.23 [imported] -
  misc_feature (285)..(345): Homolog of NCBI NO: 25316328 NR Description: hypothetical protein F8A5.23 [imported] -
  misc_feature (3)..(229): Homolog of NCBI NO: 15219805 NR Description: auxin-induced protein, putative; protein id:
  misc_feature (235)..(344): Homolog of NCBI NO: 15219805 NR Description: auxin-induced protein, putative; protein id:
  misc_feature (1)..(342): Homolog of NCBI NO: 15220214 NR Description: putative auxin-induced protein; protein id:
  misc_feature (7)..(344): Homolog of NCBI NO: 38344997 NR Description: OSJNBa0008A08.11 [Oryza sativa (japonica

SEQ ID NO: 79276 - protein, 336 aa, Arabidopsis thaliana; identical to SEQ ID NO: 28594
  peptide (1)..(336): Ceres Seq. ID no. 12650615
  misc_feature (1)..(336): Homolog of NCBI NO: 18406861 NR Description: auxin-induced protein, putative; protein id: supported by cDNA: gi_15912324, supported by cDNA: gi_20466377, by cDNA: gi_6562979 [Arabidopsis thaliana]
  misc_feature (1)..(336): Homolog of NCBI NO: 6562980 NR Description: auxin-induced atb2 [Arabidopsis thaliana]
  misc_feature (1)..(335): Homolog of NCBI NO: 15219786 NR Description: auxin-induced protein, putative; protein id: [Arabidopsis thaliana] >gi|25316215|pir||C96632 hypothetical
  misc_feature (1)..(336): Homolog of NCBI NO: 25316216 NR Description: hypothetical protein F8A5.24 [imported] -
  misc_feature (1)..(237): Homolog of NCBI NO: 25316328 NR Description: hypothetical protein F8A5.23 [imported] -
  misc_feature (276)..(336): Homolog of NCBI NO: 25316328 NR Description: hypothetical protein F8A5.23 [imported] -
  misc_feature (1)..(220): Homolog of NCBI NO: 15219805 NR Description: auxin-induced protein, putative; protein id:
  misc_feature (226)..(335): Homolog of NCBI NO: 15219805 NR Description: auxin-induced protein, putative; protein id:
  misc_feature (1)..(333): Homolog of NCBI NO: 15220214 NR Description: putative auxin-induced protein; protein id:
  misc_feature (1)..(335): Homolog of NCBI NO: 38344997 NR Description: OSJNBa0008A08.11 [Oryza sativa (japonica

SEQ ID NO: 79277 - DNA, 1409 bp, Arabidopsis thaliana
  misc_feature (1)..(1409): Ceres Seq. ID no. 12650616
  misc_feature: MA Experiment ID: 20000171 Result: Up-regulated in Transcription
  misc_feature: MA Experiment 20000171 PARAMETER Experiment Name: At_42deg_Heat_P Parameter: Age (day) Value: 14
  misc_feature: MA Experiment 20000171 PARAMETER Experiment Name: At_42deg_Heat_P Parameter: Organism Value: A. thaliana
  misc_feature: MA Experiment 20000171 PARAMETER Experiment Name: At_42deg_Heat_P Parameter: Plant Line Value: WS
  misc_feature: MA Experiment 20000171 PARAMETER Experiment Name: At_42deg_Heat_P Parameter: Temperature (deg C) Value: 42 vs. 22
  misc_feature: MA Experiment 20000171 PARAMETER Experiment Name: At_42deg_Heat_P Parameter: Timepoint (hr) Value: 1
  misc_feature: MA Experiment 20000171 PARAMETER Experiment Name: At_42deg_Heat_P Parameter: Tissue Value: Aerial
  misc_feature: MA Experiment ID: 20000173 Result: Up-regulated in Transcription
  misc_feature: MA Experiment 20000173 PARAMETER Experiment Name: At_42deg_Heat_P Parameter: Age (day) Value: 14
  misc_feature: MA Experiment 20000173 PARAMETER Experiment Name: At_42deg_Heat_P Parameter: Organism Value: A. thaliana
  misc_feature: MA Experiment 20000173 PARAMETER Experiment Name: At_42deg_Heat_P Parameter: Plant Line Value: WS
  misc_feature: MA Experiment 20000173 PARAMETER Experiment Name: At_42deg_Heat_P Parameter: Temperature (deg C) Value: 42 vs. 22
  misc_feature: MA Experiment 20000173 PARAMETER Experiment Name: At_42deg_Heat_P Parameter: Timepoint (hr) Value: 6
  misc_feature: MA Experiment 20000173 PARAMETER Experiment Name: At_42deg_Heat_P Parameter: Tissue Value: Aerial
  misc_feature: MA Experiment ID: 20000179 Result: Up-regulated in Transcription
  misc_feature: MA Experiment 20000179 PARAMETER Experiment Name: At_Germinating_Seeds_P Parameter: Age (hr) Value: 6 vs. 0
  misc_feature: MA Experiment 20000179 PARAMETER Experiment Name: At_Germinating_Seeds_P Parameter: Tissue Value: Germinating Seeds
  misc_feature: MA Experiment ID: 20000180 Result: Up-regulated in Transcription
  misc_feature: MA Experiment 20000180 PARAMETER Experiment Name: At_Germinating_Seeds_P Parameter: Age (hr) Value: 24 vs. 0
  misc_feature: MA Experiment 20000180 PARAMETER Experiment Name: At_Germinating_Seeds_P Parameter: Tissue Value: Germinating Seeds
  misc_feature: MA Experiment ID: 20000182 Result: Down-regulated in Transcription
  misc_feature: MA Experiment 20000182 PARAMETER Experiment Name: At_2mM_SA_P Parameter: Age (day) Value: 14
  misc_feature: MA Experiment 20000182 PARAMETER Experiment Name: At_2mM_SA_P Parameter: Organism Value: A. thaliana
  misc_feature: MA Experiment 20000182 PARAMETER Experiment Name: At_2mM_SA_P Parameter: Plant Line Value: WS
  misc_feature: MA Experiment 20000182 PARAMETER Experiment Name: At_2mM_SA_P Parameter: Timepoint (hr) Value: 6
  misc_feature: MA Experiment 20000182 PARAMETER Experiment Name: At_2mM_SA_P Parameter: Tissue Value: Aerial
  misc_feature: MA Experiment 20000182 PARAMETER Experiment Name: At_2mM_SA_P Parameter: Treatment Value: 2mM SA vs. No Treatment
  misc_feature: MA Experiment ID: 20000184 Result: Up-regulated in Transcription
  misc_feature: MA Experiment 20000184 PARAMETER Experiment Name: At_Shoots__P Parameter: Age (day) Value: 7
  misc_feature: MA Experiment 20000184 PARAMETER Experiment Name: At_Shoots__P Parameter: Tissue Value: Shoots vs. Whole Plant
  misc_feature: MA Experiment ID: 20000185 Result: Up-regulated in Transcription
  misc_feature: MA Experiment 20000185 PARAMETER Experiment Name: At_Roots__P Parameter: Age (day) Value: 7 vs. 21
  misc_feature: MA Experiment 20000185 PARAMETER Experiment Name: At_Roots__P Parameter: Organism Value: A. thaliana
  misc_feature: MA Experiment 20000185 PARAMETER Experiment Name: At_Roots__P Parameter: Tissue Value: Roots vs. Whole Plant
  misc_feature: MA Experiment ID: 20000264 Result: Down-regulated in Transcription
  misc_feature: MA Experiment 20000264 PARAMETER Experiment Name: At_Open_Flower_P Parameter: Age (day) Value: 21
  misc_feature: MA Experiment 20000264 PARAMETER Experiment Name: At_Open_Flower_P Parameter: Plant Line Value: WS
  misc_feature: MA Experiment 20000264 PARAMETER Experiment Name: At_Open_Flower_P Parameter: Tissue Value: Open Flower vs. Whole Plant
  misc_feature: MA Experiment ID: 20000439 Result: Up-regulated in Transcription
  misc_feature: MA Experiment 20000439 PARAMETER Experiment Name: At_Roots__P Parameter: Age (day) Value: 14 vs. 21
  misc_feature: MA Experiment 20000439 PARAMETER Experiment Name: At_Roots__P Parameter: Organism Value: A. thaliana
  misc_feature: MA Experiment 20000439 PARAMETER Experiment Name: At_Roots__P Parameter: Tissue Value: Roots vs. Whole Plant
  misc_feature: MA Experiment ID: 20000495 Result: Up-regulated in Transcription
  misc_feature: MA Experiment 20000495 PARAMETER Experiment Name: At_Guard_Cells_P Parameter: Harvest Date Value: 8/2/2002
  misc_feature: MA Experiment 20000495 PARAMETER Experiment Name: At_Guard_Cells_P Parameter: Organism Value: A. thaliana
  misc_feature: MA Experiment 20000495 PARAMETER Experiment Name: At_Guard_Cells_P Parameter: Tissue Value: Guard Cells vs. Leaves
  misc_feature: MA Experiment ID: 20000527 Result: Down-regulated in Transcription
  misc_feature: MA Experiment 20000527 PARAMETER Experiment Name: At_10percent_PEG_P Parameter: Age (day) Value: 20
  misc_feature: MA Experiment 20000527 PARAMETER Experiment Name: At_10percent_PEG_P Parameter: Organism Value: A. thaliana
  misc_feature: MA Experiment 20000527 PARAMETER Experiment Name: At_10percent_PEG_P Parameter: Plant Line Value: WS
  misc_feature: MA Experiment 20000527 PARAMETER Experiment Name: At_10percent_PEG_P Parameter: Timepoint (day) Value: 20
  misc_feature: MA Experiment 20000527 PARAMETER Experiment Name: At_10percent_PEG_P Parameter: Tissue Value: Whole Plant
  misc_feature: MA Experiment 20000527 PARAMETER Experiment Name: At_10percent_PEG_P Parameter: Treatment Value: 10percent PEG vs. No Treatment
  misc_feature: MA Experiment ID: 20001560 Result: Up-regulated in Transcription
  misc_feature: MA Experiment 20001560 PARAMETER Experiment Name: At_Drought_Soil_Dry_P Parameter: Age (day) Value: 28
  misc_feature: MA Experiment 20001560 PARAMETER Experiment Name: At_Drought_Soil_Dry_P Parameter: Organism Value: A. thaliana
  misc_feature: MA Experiment 20001560 PARAMETER Experiment Name: At_Drought_Soil_Dry_P Parameter: Plant Line Value: WS
  misc_feature: MA Experiment 20001560 PARAMETER Experiment Name: At_Drought_Soil_Dry_P Parameter: Post Timepoint (hr) Value: None
  misc_feature: MA Experiment 20001560 PARAMETER Experiment Name: At_Drought_Soil_Dry_P Parameter: Post-Treatment Value: None
  misc_feature: MA Experiment 20001560 PARAMETER Experiment Name: At_Drought_Soil_Dry_P Parameter: Timepoint (day) Value: 14
  misc_feature: MA Experiment 20001560 PARAMETER Experiment Name: At_Drought_Soil_Dry_P Parameter: Treatment Value: Drought vs. No Drought
  misc_feature: MA Experiment ID: 20001911 Result: Down-regulated in Transcription
  misc_feature: MA Experiment 20001911 PARAMETER Experiment Name: At_Drought_Reproduction_P Parameter: Age (day) Value: 40
  misc_feature: MA Experiment 20001911 PARAMETER Experiment Name: At_Drought_Reproduction_P Parameter: Organism Value: A. thaliana
  misc_feature: MA Experiment 20001911 PARAMETER Experiment Name: At_Drought_Reproduction_P Parameter: Plant Line Value: WS
  misc_feature: MA Experiment 20001911 PARAMETER Experiment Name: At_Drought_Reproduction_P Parameter: Timepoint (day) Value: 10
  misc_feature: MA Experiment 20001911 PARAMETER Experiment Name: At_Drought_Reproduction_P Parameter: Tissue Value: Flowers
  misc_feature: MA Experiment 20001911 PARAMETER Experiment Name: At_Drought_Reproduction_P Parameter: Treatment Value: Drought vs. No Drought
ttatttcttcacttttcatgatcccgaggacatcttagaccccaaatgttcttcgtcgatgttcctttggaaactggttcctctatacttgttcggatcagaaacaaagtctctctcagcaacagagtccattttgcagatagttcctgaggcaatggctgctacttcatctaacgtcctttgcaatgctagcgagtcagatctttgtcgtgatgattccgctgcatttctacttaaatttgtagccattgcttcgattctcttagctggagctgctggtgtaactataccactcattggcaggaaccgtcgtttccttcaaactgatggtaatctctttgtgactgctaaagcttttgcagctggtgtgattctcgccacgggttttgttcatatgttggcgggtggcacggaagctttgaagaacccgtgcttaccggatttcccttggtctaagtttcctttcccgggattctttgcgatgattgctgctttgatcactctgtttgtggatttcatggggactcagtactatgaacggaagcaagagagggaagctagtgagtctgttgaaccgtttggccgtgaacaatcaccgggtattgttgttcccatgattggagaaggaacgaatgatgggaaagtgtttggtgaagaagacagtggtgggattcacattgttggcattcatgctcatgctgctcatcatagacatagtcatcctcctggtcatgattcatgtgaaggacacagtaaaatcgacattggtcatgctcatgctcatgggcacgggcatggacacggacatggacacgtacacgggggtttggatgctgttaatggagctaggcatatcgttgtttctcaggttctggagcttggaattgtgtcacattccataatcatcggtctatcccttggagtatctcagtctccttgcacaatccggcctctaatcgcagcactatccttccatcaattctttgaaggatttgcgctcggtggatgcatctcccaagcgcaattcaggaacaaatcagcgaccataatggcttgttttttcgccctcacaaccccgatagggatcgggattggaaccgcagtggcgtcgtctttcaattctcacagtgtcggagcattggtcactgaaggtatcttggactcgctctcagccggaattcttgtgtacatggctttagtggatctcatagctgctgatttcttgagtacaaaaatgaggtgtaactttaggcttcaaattgtatcttatgtaatgttgttcctaggagctggactcatgtcttctcttgccatttgggcttaattagagtataagattccatagtttcttctatagctacaaataacatgtatagttctttctagagaatttatcaatctaagatttc

SEQ ID NO: 79278 - protein, 440 aa, Arabidopsis thaliana
  peptide (1)..(440): Ceres Seq. ID no. 12650617
  misc_feature (222)..(324): Pfam Name: Cation efflux family Pfam Description: Cation efflux family
  misc_feature (22)..(440): Homolog of NCBI NO: 18406954 NR Description: putative iron-regulated transporter; protein id: supported by cDNA: 15980. [Arabidopsis thaliana]
  misc_feature (52)..(440): Homolog of NCBI NO: 21553732 NR Description: putative iron-regulated transporter [Arabidopsis
  misc_feature (22)..(439): Homolog of NCBI NO: 14582257 NR Description: ZIP-like zinc transporter [Thlaspi caerulescens]
  misc_feature (52)..(439): Homolog of NCBI NO: 12006859 NR Description: putative Zn transporter ZNT4 [Thlaspi
  misc_feature (39)..(440): Homolog of NCBI NO: 30682009 NR Description: metal transporter, putative (ZIP4) [Arabidopsis
  misc_feature (22)..(440): Homolog of NCBI NO: 14582255 NR Description: ZIP-like zinc transporter [Thlaspi caerulescens]
  misc_feature (52)..(440): Homolog of NCBI NO: 7381054 NR Description: Zn and Cd transporter ZNT1 [Thlaspi caerulescens]
  misc_feature (53)..(405): Homolog of NCBI NO: 28070974 NR Description: putative Zn transporter [Thlaspi caerulescens]
  misc_feature (52)..(406): Homolog of NCBI NO: 16304806 NR Description: putative Zn and Cd transporter [Thlaspi
  misc_feature (47)..(245): Homolog of NCBI NO: 30526082 NR Description: putative ZIP-like zinc transporter [Oryza sativa
YFFTFHDPEDILDPKCSSSMFLWKLVPLYLFGSETKSLSATESILQIVPEAMAATSSNVLCNASESDLCRDDSAAFLLKFVAIASILLAGAAGVTIPLIGRNRRFLQTDGNLFVTAKAFAAGVILATGFVHMLAGGTEALKNPCLPDFPWSKFPFPGFFAMIAALITLFVDFMGTQYYERKQEREASESVEPFGREQSPGIVVPMIGEGTNDGKVFGEEDSGGIHIVGIHAHAAHHRHSHPPGHDSCEGHSKIDIGHAHAHGHGHGHGHGHVHGGLDAVNGARHIVVSQVLELGIVSHSIIIGLSLGVSQSPCTIRPLIAALSFHQFFEGFALGGCISQAQFRNKSATIMACFFALTTPIGIGIGTAVASSFNSHSVGALVTEGILDSLSAGILVYMALVDLIAADFLSTKMRCNFRLQIVSYVMLFLGAGLMSSLAIWA

SEQ ID NO: 79279 - protein, 421 aa, Arabidopsis thaliana; identical to SEQ ID NO: 29955
  peptide (1)..(421): Ceres Seq. ID no. 12650618
  misc_feature (203)..(305): Pfam Name: Cation efflux family Pfam Description: Cation efflux family
  misc_feature (3)..(421): Homolog of NCBI NO: 18406954 NR Description: putative iron-regulated transporter; protein id: supported by cDNA: 15980. [Arabidopsis thaliana]
  misc_feature (33)..(421): Homolog of NCBI NO: 21553732 NR Description: putative iron-regulated transporter [Arabidopsis
  misc_feature (3)..(420): Homolog of NCBI NO: 14582257 NR Description: ZIP-like zinc transporter [Thlaspi caerulescens]
  misc_feature (33)..(420): Homolog of NCBI NO: 12006859 NR Description: putative Zn transporter ZNT4 [Thlaspi
  misc_feature (20)..(421): Homolog of NCBI NO: 30682009 NR Description: metal transporter, putative (ZIP4) [Arabidopsis
  misc_feature (3)..(421): Homolog of NCBI NO: 14582255 NR Description: ZIP-like zinc transporter [Thlaspi caerulescens]
  misc_feature (33)..(421): Homolog of NCBI NO: 7381054 NR Description: Zn and Cd transporter ZNT1 [Thlaspi caerulescens]
  misc_feature (34)..(386): Homolog of NCBI NO: 28070974 NR Description: putative Zn transporter [Thlaspi caerulescens]
  misc_feature (33)..(387): Homolog of NCBI NO: 16304806 NR Description: putative Zn and Cd transporter [Thlaspi
  misc_feature (28)..(226): Homolog of NCBI NO: 30526082 NR Description: putative ZIP-like zinc transporter [Oryza sativa

SEQ ID NO: 79280 - protein, 389 aa, Arabidopsis thaliana; identical to SEQ ID NO: 29956
  peptide (1)..(389): Ceres Seq. ID no. 12650619
  misc_feature (171)..(273): Pfam Name: Cation efflux family Pfam Description: Cation efflux family
  misc_feature (1)..(389): Homolog of NCBI NO: 18406954 NR Description: putative iron-regulated transporter; protein id: supported by cDNA: 15980. [Arabidopsis thaliana]
  misc_feature (1)..(389): Homolog of NCBI NO: 21553732 NR Description: putative iron-regulated transporter [Arabidopsis
  misc_feature (1)..(388): Homolog of NCBI NO: 14582257 NR Description: ZIP-like zinc transporter [Thlaspi caerulescens]
  misc_feature (1)..(388): Homolog of NCBI NO: 12006859 NR Description: putative Zn transporter ZNT4 [Thlaspi
  misc_feature (1)..(389): Homolog of NCBI NO: 30682009 NR Description: metal transporter, putative (ZIP4) [Arabidopsis
  misc_feature (1)..(389): Homolog of NCBI NO: 14582255 NR Description: ZIP-like zinc transporter [Thlaspi caerulescens]
  misc_feature (1)..(389): Homolog of NCBI NO: 7381054 NR Description: Zn and Cd transporter ZNT1 [Thlaspi caerulescens]
  misc_feature (2)..(354): Homolog of NCBI NO: 28070974 NR Description: putative Zn transporter [Thlaspi caerulescens]
  misc_feature (1)..(355): Homolog of NCBI NO: 16304806 NR Description: putative Zn and Cd transporter [Thlaspi
  misc_feature (1)..(194): Homolog of NCBI NO: 30526082 NR Description: putative ZIP-like zinc transporter [Oryza sativa

SEQ ID NO: 79281 - DNA, 1230 bp, Arabidopsis thaliana
  misc_feature (1)..(1230): Ceres Seq. ID no. 12650620
  misc_feature: MA Experiment ID: 20000179 Result: Down-regulated in Transcription
  misc_feature: MA Experiment 20000179 PARAMETER Experiment Name: At_Germinating_Seeds_P Parameter: Age (hr) Value: 6 vs. 0
  misc_feature: MA Experiment 20000179 PARAMETER Experiment Name: At_Germinating_Seeds_P Parameter: Tissue Value: Germinating Seeds
  misc_feature: MA Experiment ID: 20000180 Result: Down-regulated in Transcription
  misc_feature: MA Experiment 20000180 PARAMETER Experiment Name: At_Germinating_Seeds_P Parameter: Age (hr) Value: 24 vs. 0
  misc_feature: MA Experiment 20000180 PARAMETER Experiment Name: At_Germinating_Seeds_P Parameter: Tissue Value: Germinating Seeds
  misc_feature: MA Experiment ID: 20000184 Result: Down-regulated in Transcription
  misc_feature: MA Experiment 20000184 PARAMETER Experiment Name: At_Shoots__P Parameter: Age (day) Value: 7
  misc_feature: MA Experiment 20000184 PARAMETER Experiment Name: At_Shoots__P Parameter: Tissue Value: Shoots vs. Whole Plant
  misc_feature: MA Experiment ID: 20000185 Result: Down-regulated in Transcription
  misc_feature: MA Experiment 20000185 PARAMETER Experiment Name: At_Roots__P Parameter: Age (day) Value: 7 vs. 21
  misc_feature: MA Experiment 20000185 PARAMETER Experiment Name: At_Roots__P Parameter: Organism Value: A. thaliana
  misc_feature: MA Experiment 20000185 PARAMETER Experiment Name: At_Roots__P Parameter: Tissue Value: Roots vs. Whole Plant
  misc_feature: MA Experiment ID: 20000527 Result: Up-regulated in Transcription
  misc_feature: MA Experiment 20000527 PARAMETER Experiment Name: At_10percent_PEG_P Parameter: Age (day) Value: 20
  misc_feature: MA Experiment 20000527 PARAMETER Experiment Name: At_10percent_PEG_P Parameter: Organism Value: A. thaliana
  misc_feature: MA Experiment 20000527 PARAMETER Experiment Name: At_10percent_PEG_P Parameter: Plant Line Value: WS
  misc_feature: MA Experiment 20000527 PARAMETER Experiment Name: At_10percent_PEG_P Parameter: Timepoint (day) Value: 20
  misc_feature: MA Experiment 20000527 PARAMETER Experiment Name: At_10percent_PEG_P Parameter: Tissue Value: Whole Plant
  misc_feature: MA Experiment 20000527 PARAMETER Experiment Name: At_10percent_PEG_P Parameter: Treatment Value: 10percent PEG vs. No Treatment
  misc_feature: MA Experiment ID: 20001247 Result: Down-regulated in Transcription
  misc_feature: MA Experiment 20001247 PARAMETER Experiment Name: At_Far-red-induction_P Parameter: Age (day) Value: 7
  misc_feature: MA Experiment 20001247 PARAMETER Experiment Name: At_Far-red-induction_P Parameter: Light Value: Far-red vs. White
  misc_feature: MA Experiment 20001247 PARAMETER Experiment Name: At_Far-red-induction_P Parameter: Organism Value: A. thaliana
  misc_feature: MA Experiment 20001247 PARAMETER Experiment Name: At_Far-red-induction_P Parameter: Plant Line Value: Columbia
  misc_feature: MA Experiment 20001247 PARAMETER Experiment Name: At_Far-red-induction_P Parameter: Timepoint (hr) Value: 1
  misc_feature: MA Experiment 20001247 PARAMETER Experiment Name: At_Far-red-induction_P Parameter: Tissue Value: Whole Plant
  misc_feature: MA Experiment ID: 20001555 Result: Up-regulated in Transcription
  misc_feature: MA Experiment 20001555 PARAMETER Experiment Name: At_Drought_Soil_Dry_P Parameter: Age (day) Value: 24
  misc_feature: MA Experiment 20001555 PARAMETER Experiment Name: At_Drought_Soil_Dry_P Parameter: Organism Value: A. thaliana
  misc_feature: MA Experiment 20001555 PARAMETER Experiment Name: At_Drought_Soil_Dry_P Parameter: Plant Line Value: WS
  misc_feature: MA Experiment 20001555 PARAMETER Experiment Name: At_Drought_Soil_Dry_P Parameter: Post Timepoint (hr) Value: None
  misc_feature: MA Experiment 20001555 PARAMETER Experiment Name: At_Drought_Soil_Dry_P Parameter: Post-Treatment Value: None
  misc_feature: MA Experiment 20001555 PARAMETER Experiment Name: At_Drought_Soil_Dry_P Parameter: Timepoint (day) Value: 10
  misc_feature: MA Experiment 20001555 PARAMETER Experiment Name: At_Drought_Soil_Dry_P Parameter: Treatment Value: Drought vs. No Drought
  misc_feature: MA Experiment ID: 20001757 Result: Down-regulated in Transcription
  misc_feature: MA Experiment 20001757 PARAMETER Experiment Name: At_50mM_NH4NO3_L-to-H_P Parameter: Timepoint (hr) Value: 6
  misc_feature: MA Experiment 20001757 PARAMETER Experiment Name: At_50mM_NH4NO3_L-to-H_P Parameter: Tissue Value: Leaf
  misc_feature: MA Experiment 20001757 PARAMETER Experiment Name: At_50mM_NH4NO3_L-to-H_P Parameter: Treatment Value: 50mM NH4NO3 vs 100mM Mannitol
atgaaaactttggaattagctttacctccatctccaccgtctttagttccttcttttaactacaattccaccgcacgaagcgtcgggaatgatgtcagaaccaacttcgatgttcaactttttctaaggaaacctaaacaccaaaaatcagaacctgtcgtcgttattcaacaacctcagattcaaccgcaaaatccaagttctcgttgttctacttctgatattctcagactaatggattctctttctttaccaggaaacgaagatatttactcttgtcttgccaaagaatcagccagagaaaacgatcaacgtggagctcacgagctacaagtgcatatcatgaagtctagtattagacccacgatcacttttatcaatcgtcttcttttgatgcatgtttcgtgtgggcgtttagatattacacgccagatgttcgatagaatgcctcacagagattttcattcctgggcaattgttttcctcggttgtattgaaatgggtgattacgaggacgctgctttcctttttgtttcgatgttgaaacattctcagaaaggtgctttcaagattccgtcttggatcttgggctgcgttttgaaagcttgtgccatgattagagacttcgagttagggaaacaggttcatgccttgtgtcataagctagggtttatagacgaagaagattcatatctatcgggttctttgatacgtttctacggagaattcaggtgtttggaagacgctaatctcgtgttacaccagctctctaatgctaacactgttgcttgggcagcgaaagttactaacgattacagagaaggagagtttcaagaagtaatccgcgatttcatcgaaatgggtaaccatggaatcaagaagaacgtctcagtgttctctaatgttctaaaagcatgctcatgggtcagtgacggtgggagaagcgggcaacaagtgcatgcgaatgctataaagctcggatttgagtcagattgtttgatccgatgtcggttaattgagatgtatgggaagtatgggaaggtgaaagacgcggaaaaggtttttaagagtagtaaggacgagactagtgttagttgctggaacgctatggtcgcaagttatatgcagaatgggatttacattgaagccattaagcttctctatcagatgaaagcaactggaatcaaagcacatgacacgcttttgaacgaagcccaccttcagatgtaa

SEQ ID NO: 79282 - protein, 409 aa, Arabidopsis thaliana
  peptide (1)..(409): Ceres Seq. ID no. 12650621
  misc_feature (155)..(189): Pfam Name: PPR repeat Pfam Description: PPR repeat
  misc_feature (1)..(409): Homolog of NCBI NO: 15222460 NR Description: hypothetical protein; protein id: At1g31790.1
  misc_feature (67)..(407): Homolog of NCBI NO: 34900752 NR Description: OJ1341_A08.34 [Oryza sativa (japonica
  misc_feature (69)..(399): Homolog of NCBI NO: 15229561 NR Description: hypothetical protein; protein id: At3g24000.1 thaliana] >gi|9294669|dbj|BAB03018.1| contains similarity to
  misc_feature (74)..(395): Homolog of NCBI NO: 37534806 NR Description: putative PPR-repeat containing protein [Oryza
  misc_feature (125)..(394): Homolog of NCBI NO: 38423978 NR Description: PPR-repeat protein-like [Oryza sativa (japonica
  misc_feature (80)..(396): Homolog of NCBI NO: 15240444 NR Description: putative protein; protein id: At5g27110.1
  misc_feature (77)..(396): Homolog of NCBI NO: 15231402 NR Description: hypothetical protein; protein id: At3g13880.1
  misc_feature (91)..(402): Homolog of NCBI NO: 15240665 NR Description: selenium-binding protein-like; protein id:
  misc_feature (97)..(409): Homolog of NCBI NO: 7486295 NR Description: hypothetical protein F28J12.180 - Arabidopsis >gi|2832657|emb|CAA16732.1| putative protein [Arabidopsis >gi|7268645|emb|CAB78854.1| putative protein [Arabidopsis
  misc_feature (97)..(409): Homolog of NCBI NO: 30684439 NR Description: pentatricopeptide (PPR) repeat-containing protein
MKTLELALPPSPPSLVPSFNYNSTARSVGNDVRTNFDVQLFLRKPKHQKSEPVVVIQQPQIQPQNPSSRCSTSDILRLMDSLSLPGNEDIYSCLAKESARENDQRGAHELQVHIMKSSIRPTITFINRLLLMHVSCGRLDITRQMFDRMPHRDFHSWAIVFLGCIEMGDYEDAAFLFVSMLKHSQKGAFKIPSWILGCVLKACAMIRDFELGKQVHALCHKLGFIDEEDSYLSGSLIRFYGEFRCLEDANLVLHQLSNANTVAWAAKVTNDYREGEFQEVIRDFIEMGNHGIKKNVSVFSNVLKACSWVSDGGRSGQQVHANAIKLGFESDCLIRCRLIEMYGKYGKVKDAEKVFKSSKDETSVSCWNAMVASYMQNGIYIEAIKLLYQMKATGIKAHDTLLNEAHLQM

SEQ ID NO: 79283 - protein, 331 aa, Arabidopsis thaliana
  peptide (1)..(331): Ceres Seq. ID no. 12650622
  misc_feature (77)..(111): Pfam Name: PPR repeat Pfam Description: PPR repeat
  misc_feature (1)..(331): Homolog of NCBI NO: 15222460 NR Description: hypothetical protein; protein id: At1g31790.1
  misc_feature (1)..(329): Homolog of NCBI NO: 34900752 NR Description: OJ1341_A08.34 [Oryza sativa (japonica
  misc_feature (1)..(321): Homolog of NCBI NO: 15229561 NR Description: hypothetical protein; protein id: At3g24000.1 thaliana] >gi|9294669|dbj|BAB03018.1| contains similarity to
  misc_feature (1)..(317): Homolog of NCBI NO: 37534806 NR Description: putative PPR-repeat containing protein [Oryza
  misc_feature (47)..(316): Homolog of NCBI NO: 38423978 NR Description: PPR-repeat protein-like [Oryza sativa (japonica
  misc_feature (2)..(318): Homolog of NCBI NO: 15240444 NR Description: putative protein; protein id: At5g27110.1
  misc_feature (1)..(318): Homolog of NCBI NO: 15231402 NR Description: hypothetical protein; protein id: At3g13880.1
  misc_feature (13)..(324): Homolog of NCBI NO: 15240665 NR Description: selenium-binding protein-like; protein id:
  misc_feature (19)..(331): Homolog of NCBI NO: 7486295 NR Description: hypothetical protein F28J12.180 - Arabidopsis >gi|2832657|emb|CAA16732.1| putative protein [Arabidopsis >gi|7268645|emb|CAB78854.1| putative protein [Arabidopsis
  misc_feature (19)..(331): Homolog of NCBI NO: 30684439 NR Description: pentatricopeptide (PPR) repeat-containing protein
MDSLSLPGNEDIYSCLAKESARENDQRGAHELQVHIMKSSIRPTITFINRLLLMHVSCGRLDITRQMFDRMPHRDFHSWAIVFLGCIEMGDYEDAAFLFVSMLKHSQKGAFKIPSWILGCVLKACAMIRDFELGKQVHALCHKLGFIDEEDSYLSGSLIRFYGEFRCLEDANLVLHQLSNANTVAWAAKVTNDYREGEFQEVIRDFIEMGNHGIKKNVSVFSNVLKACSWVSDGGRSGQQVHANAIKLGFESDCLIRCRLIEMYGKYGKVKDAEKVFKSSKDETSVSCWNAMVASYMQNGIYIEAIKLLYQMKATGIKAHDTLLNEAHLQM

SEQ ID NO: 79284 - protein, 295 aa, Arabidopsis thaliana
  peptide (1)..(295): Ceres Seq. ID no. 12650623
  misc_feature (41)..(75): Pfam Name: PPR repeat Pfam Description: PPR repeat
  misc_feature (1)..(295): Homolog of NCBI NO: 15222460 NR Description: hypothetical protein; protein id: At1g31790.1
  misc_feature (1)..(293): Homolog of NCBI NO: 34900752 NR Description: OJ1341_A08.34 [Oryza sativa (japonica
  misc_feature (1)..(285): Homolog of NCBI NO: 15229561 NR Description: hypothetical protein; protein id: At3g24000.1 thaliana] >gi|9294669|dbj|BAB03018.1| contains similarity to
  misc_feature (1)..(281): Homolog of NCBI NO: 37534806 NR Description: putative PPR-repeat containing protein [Oryza
  misc_feature (11)..(280): Homolog of NCBI NO: 38423978 NR Description: PPR-repeat protein-like [Oryza sativa (japonica
  misc_feature (1)..(282): Homolog of NCBI NO: 15240444 NR Description: putative protein; protein id: At5g27110.1
  misc_feature (1)..(282): Homolog of NCBI NO: 15231402 NR Description: hypothetical protein; protein id: At3g13880.1
  misc_feature (1)..(288): Homolog of NCBI NO: 15240665 NR Description: selenium-binding protein-like; protein id:
  misc_feature (1)..(295): Homolog of NCBI NO: 7486295 NR Description: hypothetical protein F28J12.180 - Arabidopsis >gi|2832657|emb|CAA16732.1| putative protein [Arabidopsis >gi|7268645|emb|CAB78854.1| putative protein [Arabidopsis
  misc_feature (1)..(295): Homolog of NCBI NO: 30684439 NR Description: pentatricopeptide (PPR) repeat-containing protein
MKSSIRPTITFINRLLLMHVSCGRLDITRQMFDRMPHRDFHSWAIVFLGCIEMGDYEDAAFLFVSMLKHSQKGAFKIPSWILGCVLKACAMIRDFELGKQVHALCHKLGFIDEEDSYLSGSLIRFYGEFRCLEDANLVLHQLSNANTVAWAAKVTNDYREGEFQEVIRDFIEMGNHGIKKNVSVFSNVLKACSWVSDGGRSGQQVHANAIKLGFESDCLIRCRLIEMYGKYGKVKDAEKVFKSSKDETSVSCWNAMVASYMQNGIYIEAIKLLYQMKATGIKAHDTLLNEAHLQM

SEQ ID NO: 79285 - DNA, 672 bp, Arabidopsis thaliana
  misc_feature (1)..(672): Ceres Seq. ID no. 12650637
  misc_feature: MA Experiment ID: 20000185 Result: Up-regulated in Transcription
  misc_feature: MA Experiment 20000185 PARAMETER Experiment Name: At_Roots__P Parameter: Age (day) Value: 7 vs. 21
  misc_feature: MA Experiment 20000185 PARAMETER Experiment Name: At_Roots__P Parameter: Organism Value: A. thaliana
  misc_feature: MA Experiment 20000185 PARAMETER Experiment Name: At_Roots__P Parameter: Tissue Value: Roots vs. Whole Plant
  misc_feature: MA Experiment ID: 20000439 Result: Up-regulated in Transcription
  misc_feature: MA Experiment 20000439 PARAMETER Experiment Name: At_Roots__P Parameter: Age (day) Value: 14 vs. 21
  misc_feature: MA Experiment 20000439 PARAMETER Experiment Name: At_Roots__P Parameter: Organism Value: A. thaliana
  misc_feature: MA Experiment 20000439 PARAMETER Experiment Name: At_Roots__P Parameter: Tissue Value: Roots vs. Whole Plant
  misc_feature: MA Experiment ID: 20001247 Result: Up-regulated in Transcription
  misc_feature: MA Experiment 20001247 PARAMETER Experiment Name: At_Far-red-induction_P Parameter: Age (day) Value: 7
  misc_feature: MA Experiment 20001247 PARAMETER Experiment Name: At_Far-red-induction_P Parameter: Light Value: Far-red vs. White
  misc_feature: MA Experiment 20001247 PARAMETER Experiment Name: At_Far-red-induction_P Parameter: Organism Value: A. thaliana
  misc_feature: MA Experiment 20001247 PARAMETER Experiment Name: At_Far-red-induction_P Parameter: Plant Line Value: Columbia
  misc_feature: MA Experiment 20001247 PARAMETER Experiment Name: At_Far-red-induction_P Parameter: Timepoint (hr) Value: 1
  misc_feature: MA Experiment 20001247 PARAMETER Experiment Name: At_Far-red-induction_P Parameter: Tissue Value: Whole Plant
atgttggcttcgaatacaaaaaccatcaaagaacaaggaccagattcagggctgagtcttgatgatctgatagatgactgcaaggctttctatctagctggtcaaaatgtgacttcttcattgtttgtttggacacttgttgctctaagccaacatcaagattggcaaaacaaagcaagagacgagatttctcaggccttcggtaacaacgaacccgatttcgaagggctaagccacctgaaagtcgtaacaatgatcctccatgaagttctacgactctattcaccagcttacttcacatgtcggataactaaacaagaagtgaagctagagagattctctttacctgaaggagttgtagtaacaataccaatgctcttggtgcaccatgattctgatctttggggagacgatgtgaaagagtttaagcccgagagattcgccaatggcgtggcgggtgcaaccaaaggaagactctccttcttgccatttagctcgggccctcggacttgtatcggtcagaacttttcgatgttgcaagctaaactcttcttggcaatggtacttcaaaggttcagtgttgaactctctccatcgtatactcatgctcctttcccagctgcaactacatttccacaacatggagctcatttgatcatccgaaaactgtag

SEQ ID NO: 79286 - protein, 223 aa, Arabidopsis thaliana
  peptide (1)..(223): Ceres Seq. ID no. 12650638
  misc_feature (33)..(223): Homolog of NCBI NO: 15220009 NR Description: cytochrome P450, putative; protein id: [Arabidopsis thaliana] >gi|25282661|pir||D86306 Similar to
  misc_feature (7)..(223): Homolog of NCBI NO: 9294385 NR Description: cytochrome P450-like protein [Arabidopsis
  misc_feature (7)..(223): Homolog of NCBI NO: 15231897 NR Description: cytochrome P450, putative; protein id:
  misc_feature (12)..(223): Homolog of NCBI NO: 15231906 NR Description: cytochrome P450, putative; protein id: supported by cDNA: gi_13605896 [Arabidopsis thaliana] cytochrome P450 [Arabidopsis thaliana]
  misc_feature (1)..(223): Homolog of NCBI NO: 15231907 NR Description: cytochrome P450, putative; protein id: supported by cDNA: gi_15292786, supported by cDNA: gi_20465786 thaliana] >gi|9294391|dbj|BAB02401.1| cytochrome P450
  misc_feature (1)..(223): Homolog of NCBI NO: 7430703 NR Description: cytochrome P450 - Madagascar periwinkle
  misc_feature (1)..(223): Homolog of NCBI NO: 15231889 NR Description: cytochrome P450, putative; protein id: supported by cDNA: gi_18252154 [Arabidopsis thaliana] cytochrome P450 [Arabidopsis thaliana]
  misc_feature (1)..(223): Homolog of NCBI NO: 461812 NR Description: Cytochrome P450 72A1 (CYPLXXII) (Secologanin
  misc_feature (1)..(223): Homolog of NCBI NO: 7488960 NR Description: cytochrome P450 (CYP72C) - Madagascar periwinkle
  misc_feature (1)..(223): Homolog of NCBI NO: 18377402 NR Description: cytochrome P450 monooxygenase CYP72A5 [Zea mays
MLASNTKTIKEQGPDSGLSLDDLIDDCKAFYLAGQNVTSSLFVWTLVALSQHQDWQNKARDEISQAFGNNEPDFEGLSHLKVVTMILHEVLRLYSPAYFTCRITKQEVKLERFSLPEGVVVTIPMLLVHHDSDLWGDDVKEFKPERFANGVAGATKGRLSFLPFSSGPRTCIGQNFSMLQAKLFLAMVLQRFSVELSPSYTHAPFPAATTFPQHGAHLIIRKL

SEQ ID NO: 79287 - protein, 139 aa, Arabidopsis thaliana
  peptide (1)..(139): Ceres Seq. ID no. 12650639
  misc_feature (1)..(139): Homolog of NCBI NO: 15220009 NR Description: cytochrome P450, putative; protein id: [Arabidopsis thaliana] >gi|25282661|pir||D86306 Similar to
  misc_feature (1)..(139): Homolog of NCBI NO: 9294385 NR Description: cytochrome P450-like protein [Arabidopsis
  misc_feature (1)..(139): Homolog of NCBI NO: 15231897 NR Description: cytochrome P450, putative; protein id:
  misc_feature (1)..(139): Homolog of NCBI NO: 15231906 NR Description: cytochrome P450, putative; protein id: supported by cDNA: gi_13605896 [Arabidopsis thaliana] cytochrome P450 [Arabidopsis thaliana]
  misc_feature (1)..(139): Homolog of NCBI NO: 15231907 NR Description: cytochrome P450, putative; protein id: supported by cDNA: gi_15292786, supported by cDNA: gi_20465786 thaliana] >gi|9294391|dbj|BAB02401.1| cytochrome P450
  misc_feature (1)..(139): Homolog of NCBI NO: 7430703 NR Description: cytochrome P450 - Madagascar periwinkle
  misc_feature (1)..(139): Homolog of NCBI NO: 15231889 NR Description: cytochrome P450, putative; protein id: supported by cDNA: gi_18252154 [Arabidopsis thaliana] cytochrome P450 [Arabidopsis thaliana]
  misc_feature (1)..(139): Homolog of NCBI NO: 461812 NR Description: Cytochrome P450 72A1 (CYPLXXII) (Secologanin
  misc_feature (1)..(139): Homolog of NCBI NO: 7488960 NR Description: cytochrome P450 (CYP72C) - Madagascar periwinkle
  misc_feature (1)..(139): Homolog of NCBI NO: 18377402 NR Description: cytochrome P450 monooxygenase CYP72A5 [Zea mays
MILHEVLRLYSPAYFTCRITKQEVKLERFSLPEGVVVTIPMLLVHHDSDLWGDDVKEFKPERFANGVAGATKGRLSFLPFSSGPRTCIGQNFSMLQAKLFLAMVLQRFSVELSPSYTHAPFPAATTFPQHGAHLIIRKL

SEQ ID NO: 79288 - DNA, 3141 bp, Arabidopsis thaliana
  misc_feature (1)..(3141): Ceres Seq. ID no. 12650654
  misc_feature: MA Experiment ID: 20000180 Result: Up-regulated in Transcription
  misc_feature: MA Experiment 20000180 PARAMETER Experiment Name: At_Germinating_Seeds_P Parameter: Age (hr) Value: 24 vs. 0
  misc_feature: MA Experiment 20000180 PARAMETER Experiment Name: At_Germinating_Seeds_P Parameter: Tissue Value: Germinating Seeds
  misc_feature: MA Experiment ID: 20000264 Result: Down-regulated in Transcription
  misc_feature: MA Experiment 20000264 PARAMETER Experiment Name: At_Open_Flower_P Parameter: Age (day) Value: 21
  misc_feature: MA Experiment 20000264 PARAMETER Experiment Name: At_Open_Flower_P Parameter: Plant Line Value: WS
  misc_feature: MA Experiment 20000264 PARAMETER Experiment Name: At_Open_Flower_P Parameter: Tissue Value: Open Flower vs. Whole Plant
  misc_feature: MA Experiment ID: 20000265 Result: Down-regulated in Transcription
  misc_feature: MA Experiment 20000265 PARAMETER Experiment Name: At_Open_Flower_P Parameter: Age (day) Value: 21
  misc_feature: MA Experiment 20000265 PARAMETER Experiment Name: At_Open_Flower_P Parameter: Plant Line Value: WS
  misc_feature: MA Experiment 20000265 PARAMETER Experiment Name: At_Open_Flower_P Parameter: Tissue Value: Closed Flower vs. Whole Plant
  misc_feature: MA Experiment ID: 20000495 Result: Up-regulated in Transcription
  misc_feature: MA Experiment 20000495 PARAMETER Experiment Name: At_Guard_Cells_P Parameter: Harvest Date Value: 8/2/2002
  misc_feature: MA Experiment 20000495 PARAMETER Experiment Name: At_Guard_Cells_P Parameter: Organism Value: A. thaliana
  misc_feature: MA Experiment 20000495 PARAMETER Experiment Name: At_Guard_Cells_P Parameter: Tissue Value: Guard Cells vs. Leaves
  misc_feature: MA Experiment ID: 20001247 Result: Up-regulated in Transcription
  misc_feature: MA Experiment 20001247 PARAMETER Experiment Name: At_Far-red-induction_P Parameter: Age (day) Value: 7
  misc_feature: MA Experiment 20001247 PARAMETER Experiment Name: At_Far-red-induction_P Parameter: Light Value: Far-red vs. White
  misc_feature: MA Experiment 20001247 PARAMETER Experiment Name: At_Far-red-induction_P Parameter: Organism Value: A. thaliana
  misc_feature: MA Experiment 20001247 PARAMETER Experiment Name: At_Far-red-induction_P Parameter: Plant Line Value: Columbia
  misc_feature: MA Experiment 20001247 PARAMETER Experiment Name: At_Far-red-induction_P Parameter: Timepoint (hr) Value: 1
  misc_feature: MA Experiment 20001247 PARAMETER Experiment Name: At_Far-red-induction_P Parameter: Tissue Value: Whole Plant
atgagagggaggatatgtttcttggcaatagtgattctctgttctttctccttcatcttagtaagatccttaaacgaagaagggcgtgttcttctggagtttaaagctttccttaatgactccaatggctatctcgcaagctggaatcagttggattcaaatccctgcaactggaccggaatcgcgtgtacccatctcagaactgtaacttctgttgatctaaatgggatgaatctatcaggtacactatctcctctcatatgcaagcttcatggtttaaggaaattgaatgtctccaccaacttcatctctggtccaatccctcaagatttatctctctgtcgaagtctagaggttcttgatctctgcacaaataggttccatggagtgataccaattcagctaaccatgatcatcactcttaagaagctgtatctatgcgagaattatcttttcggttctatccctagacaaatcggtaatttgagttcactccaagagcttgtgatctacagcaataatctcaccggtgtaatccctccttccatggcgaaattgagacagctccggatcattagggcaggacggaatggattctcgggtgtgattccgtctgaaatcagcggatgcgagagcctaaaggtacttggattagcagagaatcttcttgagggttctcttcctaagcagctcgagaagcttcaaaatcttactgatttgatactctggcaaaaccgtctatctggtgagatacctccttccgtaggaaacatcagcagactggaggtgcttgcgctgcatgaaaactacttcacgggatcaattccaagagagattgggaagctcacaaagatgaaaaggctgtacctttacacaaaccagttaaccggagagatacctcgcgaaataggcaacttgatagatgcagctgagatagatttttcggagaatcagttaacaggtttcataccaaaagagtttggtcatatcctgaatctcaaattacttcatctttttgagaacattcttctaggtccaattcctagggagcttggggaattgacactgttggagaagctagacttgtctatcaatagactaaacggtactatcccgcaagagcttcagttcctaccttaccttgtagatttgcagctttttgacaaccagcttgaagggaagatacctcctttaatcggtttctatagcaatttttctgttcttgacatgtctgccaattctctgtctggtccaattcctaaccttactgcattagagcttcaccaaaactggttatcagggaatatatctgcagacctgggaaagctgaagaatttggaaagactgcgtctagctaacaacaattttactggtgaaattcctcctgagattgggaatctcacaaagattgttggctttaacatctcctccaatcagctcactggtcacatccctaaagagttgggaagttgtgtcactatccagaggcttgaccttagtggcaacaagttttccggatacatagcacaagagcttggtcagttggtatatttggagattttgagattgtctgataatagattgaccggagaaattcctcatagctttggagatcttactcggctcatggagttacaactaggaggcaatctcttgtctgaaaacatcccagtggagctcgggaagttaacctctctgcaaatctccctcaacattagtcacaataatctctcaggtactattccagacagtttaggaaatctacagatgttggagatactttacctcaacgacaacaagctttcaggtgagatccctgcatcaattgggaatctcatgagcctcctcatctgcaatatctcaaacaataacttggtcggaacagtaccagacacagccgtgttccagcggatggattcatcgaactttgctggaaaccatggtttgtgtaactctcagagaagccattgtcaaccacttgtcccacattctgattcaaagctaaattggttaatcaacggttcgcaaaggcaaaagatcttgacaatcacttgtattgtaatcgggtcggtttttcttatcacttttcttggtctctgttggacaataaagcggcgggaaccagcgtttgttgcacttgaggatcaaacaaaaccagatgtcatggacagctactatttccctaaaaaaggtttcacatatcaaggcctcgtggatgcaaccagaaacttttccgaagacgtggttttagggagaggagcgtgtggaacagtctacaaagctgaaatgtcaggtggcgaggtgatagctgtaaagaagctgaattctcgcggtgaaggagctagttctgataatagtttcagagctgagatatcaactcttggaaagataaggcaccggaatattgtgaagctatatggtttctgctatcaccagaattcaaatcttctcttgtatgagtacatgtcaaaaggaagcctcggcgaacaactacagcgaggtgagaaaaactgtttgttggattggaatgctcggtatagaatcgccctcggtgctgcagagggtttgtgttatctccatcatgattgcagacctcaaatagtccatcgcgacataaaatcgaacaacattcttcttgatgaacggttccaggctcatgttggagattttggcctggctaagttgattgatctctcttactcaaagtccatgtcagctgttgctgggtcttacggatacatcgctccagaatatgcttacacgatgaaggtgacagagaaatgtgatatctatagctttggagttgtgcttctggagctaataacaggaaagcccccagttcaaccgctggagcaaggaggggatctagtcaattgggttcgacgatcgatccgtaacatgattccaaccattgaaatgtttgatgcgaggctagatacaaatgataagagaacagttcatgaaatgtctcttgtcctaaagattgcactgttctgcaccagcaattctccagctagtagaccaactatgagagaagtggtcgctatgattacagaagctcggggatcaagtagcctttcttcctcatccattacatcagaaactcctctagaagaagcaaactcctccaaagaaatttga

SEQ ID NO: 79289 - protein, 1046 aa, Arabidopsis thaliana
  peptide (1)..(1046): Ceres Seq. ID no. 12650655
  misc_feature (744)..(946): Pfam Name: Protein kinase domain Pfam Description: Protein kinase domain
  misc_feature (240)..(909): Homolog of NCBI NO: 26452059 NR Description: putative leucine-rich receptor protein kinase
  misc_feature (1)..(632): Homolog of NCBI NO: 15220056 NR Description: putative leucine-rich receptor protein kinase; id: At1g17230.1 [Arabidopsis thaliana] >gi|25518557|pir||E86308
  misc_feature (21)..(1034): Homolog of NCBI NO: 15237562 NR Description: leucine-rich repeat transmembrane protein kinase, protein id: At5g63930.1 [Arabidopsis thaliana]
  misc_feature (74)..(1036): Homolog of NCBI NO: 15225805 NR Description: putative receptor-like protein kinase; protein id:
  misc_feature (4)..(1021): Homolog of NCBI NO: 16930691 NR Description: AT4g26540/M3E9_30 [Arabidopsis thaliana]
  misc_feature (66)..(1043): Homolog of NCBI NO: 25403209 NR Description: probable Protein kinase [imported] - Arabidopsis >gi|10086466|gb|AAG12526.1|AC015446_7 Putative Protein kinase
  misc_feature (5)..(1013): Homolog of NCBI NO: 18086327 NR Description: AT4g08850/T32A17_160 [Arabidopsis thaliana]
  misc_feature (67)..(1021): Homolog of NCBI NO: 15229457 NR Description: leucine-rich repeat transmembrane protein kinase,
  misc_feature (72)..(1019): Homolog of NCBI NO: 29119651 NR Description: LRR receptor-like kinase 1 [Arabidopsis thaliana]
  misc_feature (120)..(1019): Homolog of NCBI NO: 34915202 NR Description: putative receptor-like protein kinase 1 [Oryza
MRGRICFLAIVILCSFSFILVRSLNEEGRVLLEFKAFLNDSNGYLASWNQLDSNPCNWTGIACTHLRTVTSVDLNGMNLSGTLSPLICKLHGLRKLNVSTNFISGPIPQDLSLCRSLEVLDLCTNRFHGVIPIQLTMIITLKKLYLCENYLFGSIPRQIGNLSSLQELVIYSNNLTGVIPPSMAKLRQLRIIRAGRNGFSGVIPSEISGCESLKVLGLAENLLEGSLPKQLEKLQNLTDLILWQNRLSGEIPPSVGNISRLEVLALHENYFTGSIPREIGKLTKMKRLYLYTNQLTGEIPREIGNLIDAAEIDFSENQLTGFIPKEFGHILNLKLLHLFENILLGPIPRELGELTLLEKLDLSINRLNGTIPQELQFLPYLVDLQLFDNQLEGKIPPLIGFYSNFSVLDMSANSLSGPIPNLTALELHQNWLSGNISADLGKLKNLERLRLANNNFTGEIPPEIGNLTKIVGFNISSNQLTGHIPKELGSCVTIQRLDLSGNKFSGYIAQELGQLVYLEILRLSDNRLTGEIPHSFGDLTRLMELQLGGNLLSENIPVELGKLTSLQISLNISHNNLSGTIPDSLGNLQMLEILYLNDNKLSGEIPASIGNLMSLLICNISNNNLVGTVPDTAVFQRMDSSNFAGNHGLCNSQRSHCQPLVPHSDSKLNWLINGSQRQKILTITCIVIGSVFLITFLGLCWTIKRREPAFVALEDQTKPDVMDSYYFPKKGFTYQGLVDATRNFSEDVVLGRGACGTVYKAEMSGGEVIAVKKLNSRGEGASSDNSFRAEISTLGKIRHRNIVKLYGFCYHQNSNLLLYEYMSKGSLGEQLQRGEKNCLLDWNARYRIALGAAEGLCYLHHDCRPQIVHRDIKSNNILLDERFQAHVGDFGLAKLIDLSYSKSMSAVAGSYGYIAPEYAYTMKVTEKCDIYSFGVVLLELITGKPPVQPLEQGGDLVNWVRRSIRNMIPTIEMFDARLDTNDKRTVHEMSLVLKIALFCTSNSPASRPTMREVVAMITEARGSSSLSSSSITSETPLEEANSSKEI

SEQ ID NO: 79290 - protein, 970 aa, Arabidopsis thaliana
  peptide (1)..(970): Ceres Seq. ID no. 12650656
  misc_feature (668)..(870): Pfam Name: Protein kinase domain Pfam Description: Protein kinase domain
  misc_feature (164)..(833): Homolog of NCBI NO: 26452059 NR Description: putative leucine-rich receptor protein kinase
  misc_feature (1)..(556): Homolog of NCBI NO: 15220056 NR Description: putative leucine-rich receptor protein kinase; id: At1g17230.1 [Arabidopsis thaliana] >gi|25518557|pir||E86308
  misc_feature (1)..(958): Homolog of NCBI NO: 15237562 NR Description: leucine-rich repeat transmembrane protein kinase, protein id: At5g63930.1 [Arabidopsis thaliana]
  misc_feature (1)..(960): Homolog of NCBI NO: 15225805 NR Description: putative receptor-like protein kinase; protein id:
  misc_feature (1)..(945): Homolog of NCBI NO: 16930691 NR Description: AT4g26540/M3E9_30 [Arabidopsis thaliana]
  misc_feature (1)..(967): Homolog of NCBI NO: 25403209 NR Description: probable Protein kinase [imported] - Arabidopsis >gi|10086466|gb|AAG12526.1|AC015446_7 Putative Protein kinase
  misc_feature (1)..(937): Homolog of NCBI NO: 18086327 NR Description: AT4g08850/T32A17_160 [Arabidopsis thaliana]
  misc_feature (1)..(945): Homolog of NCBI NO: 15229457 NR Description: leucine-rich repeat transmembrane protein kinase,
  misc_feature (1)..(943): Homolog of NCBI NO: 29119651 NR Description: LRR receptor-like kinase 1 [Arabidopsis thaliana]
  misc_feature (44)..(943): Homolog of NCBI NO: 34915202 NR Description: putative receptor-like protein kinase 1 [Oryza
MNLSGTLSPLICKLHGLRKLNVSTNFISGPIPQDLSLCRSLEVLDLCTNRFHGVIPIQLTMIITLKKLYLCENYLFGSIPRQIGNLSSLQELVIYSNNLTGVIPPSMAKLRQLRIIRAGRNGFSGVIPSEISGCESLKVLGLAENLLEGSLPKQLEKLQNLTDLILWQNRLSGEIPPSVGNISRLEVLALHENYFTGSIPREIGKLTKMKRLYLYTNQLTGEIPREIGNLIDAAEIDFSENQLTGFIPKEFGHILNLKLLHLFENILLGPIPRELGELTLLEKLDLSINRLNGTIPQELQFLPYLVDLQLFDNQLEGKIPPLIGFYSNFSVLDMSANSLSGPIPNLTALELHQNWLSGNISADLGKLKNLERLRLANNNFTGEIPPEIGNLTKIVGFNISSNQLTGHIPKELGSCVTIQRLDLSGNKFSGYIAQELGQLVYLEILRLSDNRLTGEIPHSFGDLTRLMELQLGGNLLSENIPVELGKLTSLQISLNISHNNLSGTIPDSLGNLQMLEILYLNDNKLSGEIPASIGNLMSLLICNISNNNLVGTVPDTAVFQRMDSSNFAGNHGLCNSQRSHCQPLVPHSDSKLNWLINGSQRQKILTITCIVIGSVFLITFLGLCWTIKRREPAFVALEDQTKPDVMDSYYFPKKGFTYQGLVDATRNFSEDVVLGRGACGTVYKAEMSGGEVIAVKKLNSRGEGASSDNSFRAEISTLGKIRHRNIVKLYGFCYHQNSNLLLYEYMSKGSLGEQLQRGEKNCLLDWNARYRIALGAAEGLCYLHHDCRPQIVHRDIKSNNILLDERFQAHVGDFGLAKLIDLSYSKSMSAVAGSYGYIAPEYAYTMKVTEKCDIYSFGVVLLELITGKPPVQPLEQGGDLVNWVRRSIRNMIPTIEMFDARLDTNDKRTVHEMSLVLKIALFCTSNSPASRPTMREVVAMITEARGSSSLSSSSITSETPLEEANSSKEI

SEQ ID NO: 79291 - protein, 910 aa, Arabidopsis thaliana
  peptide (1)..(910): Ceres Seq. ID no. 12650657
  misc_feature (608)..(810): Pfam Name: Protein kinase domain Pfam Description: Protein kinase domain
  misc_feature (104)..(773): Homolog of NCBI NO: 26452059 NR Description: putative leucine-rich receptor protein kinase
  misc_feature (1)..(496): Homolog of NCBI NO: 15220056 NR Description: putative leucine-rich receptor protein kinase; id: At1g17230.1 [Arabidopsis thaliana] >gi|25518557|pir||E86308
  misc_feature (1)..(898): Homolog of NCBI NO: 15237562 NR Description: leucine-rich repeat transmembrane protein kinase, protein id: At5g63930.1 [Arabidopsis thaliana]
  misc_feature (1)..(900): Homolog of NCBI NO: 15225805 NR Description: putative receptor-like protein kinase; protein id:
  misc_feature (1)..(885): Homolog of NCBI NO: 16930691 NR Description: AT4g26540/M3E9_30 [Arabidopsis thaliana]
  misc_feature (1)..(907): Homolog of NCBI NO: 25403209 NR Description: probable Protein kinase [imported] - Arabidopsis >gi|10086466|gb|AAG12526.1|AC015446_7 Putative Protein kinase
  misc_feature (1)..(877): Homolog of NCBI NO: 18086327 NR Description: AT4g08850/T32A17_160 [Arabidopsis thaliana]
  misc_feature (1)..(885): Homolog of NCBI NO: 15229457 NR Description: leucine-rich repeat transmembrane protein kinase,
  misc_feature (1)..(883): Homolog of NCBI NO: 29119651 NR Description: LRR receptor-like kinase 1 [Arabidopsis thaliana]
  misc_feature (1)..(883): Homolog of NCBI NO: 34915202 NR Description: putative receptor-like protein kinase 1 [Oryza
MIITLKKLYLCENYLFGSIPRQIGNLSSLQELVIYSNNLTGVIPPSMAKLRQLRIIRAGRNGFSGVIPSEISGCESLKVLGLAENLLEGSLPKQLEKLQNLTDLILWQNRLSGEIPPSVGNISRLEVLALHENYFTGSIPREIGKLTKMKRLYLYTNQLTGEIPREIGNLIDAAEIDFSENQLTGFIPKEFGHILNLKLLHLFENILLGPIPRELGELTLLEKLDLSINRLNGTIPQELQFLPYLVDLQLFDNQLEGKIPPLIGFYSNFSVLDMSANSLSGPIPNLTALELHQNWLSGNISADLGKLKNLERLRLANNNFTGEIPPEIGNLTKIVGFNISSNQLTGHIPKELGSCVTIQRLDLSGNKFSGYIAQELGQLVYLEILRLSDNRLTGEIPHSFGDLTRLMELQLGGNLLSENIPVELGKLTSLQISLNISHNNLSGTIPDSLGNLQMLEILYLNDNKLSGEIPASIGNLMSLLICNISNNNLVGTVPDTAVFQRMDSSNFAGNHGLCNSQRSHCQPLVPHSDSKLNWLINGSQRQKILTITCIVIGSVFLITFLGLCWTIKRREPAFVALEDQTKPDVMDSYYFPKKGFTYQGLVDATRNFSEDVVLGRGACGTVYKAEMSGGEVIAVKKLNSRGEGASSDNSFRAEISTLGKIRHRNIVKLYGFCYHQNSNLLLYEYMSKGSLGEQLQRGEKNCLLDWNARYRIALGAAEGLCYLHHDCRPQIVHRDIKSNNILLDERFQAHVGDFGLAKLIDLSYSKSMSAVAGSYGYIAPEYAYTMKVTEKCDIYSFGVVLLELITGKPPVQPLEQGGDLVNWVRRSIRNMIPTIEMFDARLDTNDKRTVHEMSLVLKIALFCTSNSPASRPTMREVVAMITEARGSSSLSSSSITSETPLEEANSSKEI

SEQ ID NO: 79292 - DNA, 861 bp, Arabidopsis thaliana
  misc_feature (1)..(861): Ceres Seq. ID no. 12650724
  misc_feature: MA Experiment ID: 20000173 Result: Down-regulated in Transcription
  misc_feature: MA Experiment 20000173 PARAMETER Experiment Name: At_42deg_Heat_P Parameter: Age (day) Value: 14
  misc_feature: MA Experiment 20000173 PARAMETER Experiment Name: At_42deg_Heat_P Parameter: Organism Value: A. thaliana
  misc_feature: MA Experiment 20000173 PARAMETER Experiment Name: At_42deg_Heat_P Parameter: Plant Line Value: WS
  misc_feature: MA Experiment 20000173 PARAMETER Experiment Name: At_42deg_Heat_P Parameter: Temperature (deg C) Value: 42 vs. 22
  misc_feature: MA Experiment 20000173 PARAMETER Experiment Name: At_42deg_Heat_P Parameter: Timepoint (hr) Value: 6
  misc_feature: MA Experiment 20000173 PARAMETER Experiment Name: At_42deg_Heat_P Parameter: Tissue Value: Aerial
  misc_feature: MA Experiment ID: 20000184 Result: Down-regulated in Transcription
  misc_feature: MA Experiment 20000184 PARAMETER Experiment Name: At_Shoots__P Parameter: Age (day) Value: 7
  misc_feature: MA Experiment 20000184 PARAMETER Experiment Name: At_Shoots__P Parameter: Tissue Value: Shoots vs. Whole Plant
  misc_feature: MA Experiment ID: 20000437 Result: Up-regulated in Transcription
  misc_feature: MA Experiment 20000437 PARAMETER Experiment Name: At_Drought_P Parameter: Age (day) Value: 8
  misc_feature: MA Experiment 20000437 PARAMETER Experiment Name: At_Drought_P Parameter: Organism Value: A. thaliana
  misc_feature: MA Experiment 20000437 PARAMETER Experiment Name: At_Drought_P Parameter: Plant Line Value: WS
  misc_feature: MA Experiment 20000437 PARAMETER Experiment Name: At_Drought_P Parameter: Timepoint (hr) Value: 24
  misc_feature: MA Experiment 20000437 PARAMETER Experiment Name: At_Drought_P Parameter: Tissue Value: Whole Plant
  misc_feature: MA Experiment 20000437 PARAMETER Experiment Name: At_Drought_P Parameter: Treatment Value: Drought vs. No Drought
  misc_feature: MA Experiment ID: 20001911 Result: Up-regulated in Transcription
  misc_feature: MA Experiment 20001911 PARAMETER Experiment Name: At_Drought_Reproduction_P Parameter: Age (day) Value: 40
  misc_feature: MA Experiment 20001911 PARAMETER Experiment Name: At_Drought_Reproduction_P Parameter: Organism Value: A. thaliana
  misc_feature: MA Experiment 20001911 PARAMETER Experiment Name: At_Drought_Reproduction_P Parameter: Plant Line Value: WS
  misc_feature: MA Experiment 20001911 PARAMETER Experiment Name: At_Drought_Reproduction_P Parameter: Timepoint (day) Value: 10
  misc_feature: MA Experiment 20001911 PARAMETER Experiment Name: At_Drought_Reproduction_P Parameter: Tissue Value: Flowers
  misc_feature: MA Experiment 20001911 PARAMETER Experiment Name: At_Drought_Reproduction_P Parameter: Treatment Value: Drought vs. No Drought
atgggaaatcagaagctcaaatggacggcggaggaagaggaggcgttactcgccggagttaggaagcatggccctggaaagtggaagaatattctccgcgatcctgaattagctgagcagctctctagtcgctctaacatcgacctcaaggataaatggcgtaatttaagtgttgctcctggtattcaaggctctaaggataagatacggacaccaaaaatcaaagctgctgcttttcatctggctgccgctgctgctgccgctattgtaactcctactcatagtggtcactcttctccagttgctactcttccccgaagtggatcttctgatttgagcattgatgatagttttaacattgtagttgatccaaagaatgctcccaggtatgatggaatgatatttgaagctctttcaaacttgacggatgctaatggatctgatgtcagcgcaattttcaacttcattgagcaacgacaagaagtgccaccaaatttcaggaggatgcttagttcaagattgaggaggcttgcagctcagggaaagcttgaaaagacacagaacttctataagatgaatgataatagcttggtacaaagaacaccacatgtagcgagaccaaaagagagcaacacgaaatcccggcagcagacaaacagtcagggaccctctatttcacagcagattgttgaagcttcaataacagcagcttataagctcgtagaagtagagaacaaattagatgtgtcgaaaggagctgcagaagagatagagagactgatgaaactggcagaagaggctgatgagatgctagtgatagcgagagagatgcacgaagaatatttgttgtattgcaggtag

SEQ ID NO: 79293 - protein, 286 aa, Arabidopsis thaliana
  peptide (1)..(286): Ceres Seq. ID no. 12650725
  misc_feature (126)..(185): Pfam Name: linker histone H1 and H5 family Pfam Description: linker histone H1 and H5 family
  misc_feature (1)..(280): Homolog of NCBI NO: 30685367 NR Description: myb-related DNA-binding protein -related
  misc_feature (1)..(280): Homolog of NCBI NO: 26452093 NR Description: putative myb-related DNA-binding protein thaliana] >gi|28950861|gb|AAO63354.1| At1g17520 [Arabidopsis
  misc_feature (1)..(185): Homolog of NCBI NO: 8778473 NR Description: F1L3.23 [Arabidopsis thaliana]
  misc_feature (1)..(279): Homolog of NCBI NO: 15218592 NR Description: putative DNA-binding protein; protein id:
  misc_feature (1)..(279): Homolog of NCBI NO: 18463961 NR Description: histone H1-like protein [Zea mays]
  misc_feature (1)..(279): Homolog of NCBI NO: 34105721 NR Description: Single myb histone 4 [Zea mays subsp. mays]
  misc_feature (1)..(279): Homolog of NCBI NO: 34910440 NR Description: histone H1-like protein [Oryza sativa (japonica
  misc_feature (1)..(279): Homolog of NCBI NO: 34105717 NR Description: Single myb histone 3 [Zea mays subsp. mays]
  misc_feature (1)..(279): Homolog of NCBI NO: 27125811 NR Description: MYB28 protein [Oryza sativa (japonica
  misc_feature (1)..(157): Homolog of NCBI NO: 13937143 NR Description: At1g72740/F28P22_7 [Arabidopsis thaliana]
MGNQKLKWTAEEEEALLAGVRKHGPGKWKNILRDPELAEQLSSRSNIDLKDKWRNLSVAPGIQGSKDKIRTPKIKAAAFHLAAAAAAAIVTPTHSGHSSPVATLPRSGSSDLSIDDSFNIVVDPKNAPRYDGMIFEALSNLTDANGSDVSAIFNFIEQRQEVPPNFRRMLSSRLRRLAAQGKLEKTQNFYKMNDNSLVQRTPHVARPKESNTKSRQQTNSQGPSISQQIVEASITAAYKLVEVENKLDVSKGAAEEIERLMKLAEEADEMLVIAREMHEEYLLYCR

SEQ ID NO: 79294 - protein, 154 aa, Arabidopsis thaliana
  peptide (1)..(154): Ceres Seq. ID no. 12650726
  misc_feature (1)..(53): Pfam Name: linker histone H1 and H5 family Pfam Description: linker histone H1 and H5 family
  misc_feature (1)..(148): Homolog of NCBI NO: 30685367 NR Description: myb-related DNA-binding protein -related
  misc_feature (1)..(148): Homolog of NCBI NO: 26452093 NR Description: putative myb-related DNA-binding protein thaliana] >gi|28950861|gb|AAO63354.1| At1g17520 [Arabidopsis
  misc_feature (1)..(53): Homolog of NCBI NO: 8778473 NR Description: F1L3.23 [Arabidopsis thaliana]
  misc_feature (1)..(147): Homolog of NCBI NO: 15218592 NR Description: putative DNA-binding protein; protein id:
  misc_feature (1)..(147): Homolog of NCBI NO: 18463961 NR Description: histone H1-like protein [Zea mays]
  misc_feature (1)..(147): Homolog of NCBI NO: 34105721 NR Description: Single myb histone 4 [Zea mays subsp. mays]
  misc_feature (1)..(147): Homolog of NCBI NO: 34910440 NR Description: histone H1-like protein [Oryza sativa (japonica
  misc_feature (1)..(147): Homolog of NCBI NO: 34105717 NR Description: Single myb histone 3 [Zea mays subsp. mays]
  misc_feature (1)..(147): Homolog of NCBI NO: 27125811 NR Description: MYB28 protein [Oryza sativa (japonica
  misc_feature (1)..(25): Homolog of NCBI NO: 13937143 NR Description: At1g72740/F28P22_7 [Arabidopsis thaliana]
MIFEALSNLTDANGSDVSAIFNFIEQRQEVPPNFRRMLSSRLRRLAAQGKLEKTQNFYKMNDNSLVQRTPHVARPKESNTKSRQQTNSQGPSISQQIVEASITAAYKLVEVENKLDVSKGAAEEIERLMKLAEEADEMLVIAREMHEEYLLYCR

SEQ ID NO: 79295 - DNA, 880 bp, Arabidopsis thaliana
  misc_feature (1)..(880): Ceres Seq. ID no. 12650735
  misc_feature: MA Experiment ID: 108433 Result: Down-regulated in Transcription
  misc_feature: MA Experiment 108433 PARAMETER Experiment Name: At_rhl_Mutant2_cDNA_P Parameter: Age (day) Value: 7
  misc_feature: MA Experiment 108433 PARAMETER Experiment Name: At_rhl_Mutant2_cDNA_P Parameter: Organism Value: A. thaliana
  misc_feature: MA Experiment 108433 PARAMETER Experiment Name: At_rhl_Mutant2_cDNA_P Parameter: Plant Line Value: rhl Mutant vs. wt landsburg
  misc_feature: MA Experiment 108433 PARAMETER Experiment Name: At_rhl_Mutant2_cDNA_P Parameter: Tissue Value: Roots
  misc_feature: MA Experiment ID: 108463 Result: Down-regulated in Transcription
  misc_feature: MA Experiment 108463 PARAMETER Experiment Name: At_Germinating_Seeds_cDNA_P Parameter: Age (day) Value: 3 vs. 0
  misc_feature: MA Experiment 108463 PARAMETER Experiment Name: At_Germinating_Seeds_cDNA_P Parameter: Tissue Value: Germinating Seeds
  misc_feature: MA Experiment ID: 108573 Result: Down-regulated in Transcription
  misc_feature: MA Experiment 108573 PARAMETER Experiment Name: At_Drought_cDNA_P Parameter: Timepoint (hr) Value: 6
  misc_feature: MA Experiment 108573 PARAMETER Experiment Name: At_Drought_cDNA_P Parameter: Tissue Value: Aerial
  misc_feature: MA Experiment 108573 PARAMETER Experiment Name: At_Drought_cDNA_P Parameter: Treatment Value: Drought vs. No Drought
  misc_feature: MA Experiment ID: 108577 Result: Down-regulated in Transcription
  misc_feature: MA Experiment 108577 PARAMETER Experiment Name: At_42deg_Heat_cDNA_P Parameter: Temperature (deg C) Value: 42 vs. 22
  misc_feature: MA Experiment 108577 PARAMETER Experiment Name: At_42deg_Heat_cDNA_P Parameter: Timepoint (hr) Value: 6
  misc_feature: MA Experiment 108577 PARAMETER Experiment Name: At_42deg_Heat_cDNA_P Parameter: Tissue Value: Aerial
  misc_feature: MA Experiment ID: 108595 Result: Up-regulated in Transcription
  misc_feature: MA Experiment 108595 PARAMETER Experiment Name: At_Ler-pi_Ovule_cDNA_P Parameter: Plant Line Value: null
  misc_feature: MA Experiment ID: 20000234 Result: Up-regulated in Transcription
  misc_feature: MA Experiment 20000234 PARAMETER Experiment Name: At_Siliques_P Parameter: Age (day) Value: 21
  misc_feature: MA Experiment 20000234 PARAMETER Experiment Name: At_Siliques_P Parameter: Organism Value: A. thaliana
  misc_feature: MA Experiment 20000234 PARAMETER Experiment Name: At_Siliques_P Parameter: Plant Line Value: WS
  misc_feature: MA Experiment 20000234 PARAMETER Experiment Name: At_Siliques_P Parameter: Tissue Value: Less Than 5mm Siliques vs. Whole Plant
  misc_feature: MA Experiment ID: 20000235 Result: Up-regulated in Transcription
  misc_feature: MA Experiment 20000235 PARAMETER Experiment Name: At_Siliques_P Parameter: Age (day) Value: 21
  misc_feature: MA Experiment 20000235 PARAMETER Experiment Name: At_Siliques_P Parameter: Organism Value: A. thaliana
  misc_feature: MA Experiment 20000235 PARAMETER Experiment Name: At_Siliques_P Parameter: Plant Line Value: WS
  misc_feature: MA Experiment 20000235 PARAMETER Experiment Name: At_Siliques_P Parameter: Tissue Value: 5-10mm Siliques vs. Whole Plant
  misc_feature: MA Experiment ID: 20000264 Result: Up-regulated in Transcription
  misc_feature: MA Experiment 20000264 PARAMETER Experiment Name: At_Open_Flower_P Parameter: Age (day) Value: 21
  misc_feature: MA Experiment 20000264 PARAMETER Experiment Name: At_Open_Flower_P Parameter: Plant Line Value: WS
  misc_feature: MA Experiment 20000264 PARAMETER Experiment Name: At_Open_Flower_P Parameter: Tissue Value: Open Flower vs. Whole Plant
  misc_feature: MA Experiment ID: 20000265 Result: Up-regulated in Transcription
  misc_feature: MA Experiment 20000265 PARAMETER Experiment Name: At_Open_Flower_P Parameter: Age (day) Value: 21
  misc_feature: MA Experiment 20000265 PARAMETER Experiment Name: At_Open_Flower_P Parameter: Plant Line Value: WS
  misc_feature: MA Experiment 20000265 PARAMETER Experiment Name: At_Open_Flower_P Parameter: Tissue Value: Closed Flower vs. Whole Plant
  misc_feature: MA Experiment ID: 20000286 Result: Up-regulated in Transcription
  misc_feature: MA Experiment 20000286 PARAMETER Experiment Name: At_Open_Flower_P Parameter: Age (day) Value: 21
  misc_feature: MA Experiment 20000286 PARAMETER Experiment Name: At_Open_Flower_P Parameter: Plant Line Value: WS
  misc_feature: MA Experiment 20000286 PARAMETER Experiment Name: At_Open_Flower_P Parameter: Tissue Value: Half Open vs. Whole Plant
  misc_feature: MA Experiment ID: 20000437 Result: Down-regulated in Transcription
  misc_feature: MA Experiment 20000437 PARAMETER Experiment Name: At_Drought_P Parameter: Age (day) Value: 8
  misc_feature: MA Experiment 20000437 PARAMETER Experiment Name: At_Drought_P Parameter: Organism Value: A. thaliana
  misc_feature: MA Experiment 20000437 PARAMETER Experiment Name: At_Drought_P Parameter: Plant Line Value: WS
  misc_feature: MA Experiment 20000437 PARAMETER Experiment Name: At_Drought_P Parameter: Timepoint (hr) Value: 24
  misc_feature: MA Experiment 20000437 PARAMETER Experiment Name: At_Drought_P Parameter: Tissue Value: Whole Plant
  misc_feature: MA Experiment 20000437 PARAMETER Experiment Name: At_Drought_P Parameter: Treatment Value: Drought vs. No Drought
  misc_feature: MA Experiment ID: 20001911 Result: Down-regulated in Transcription
  misc_feature: MA Experiment 20001911 PARAMETER Experiment Name: At_Drought_Reproduction_P Parameter: Age (day) Value: 40
  misc_feature: MA Experiment 20001911 PARAMETER Experiment Name: At_Drought_Reproduction_P Parameter: Organism Value: A. thaliana
  misc_feature: MA Experiment 20001911 PARAMETER Experiment Name: At_Drought_Reproduction_P Parameter: Plant Line Value: WS
  misc_feature: MA Experiment 20001911 PARAMETER Experiment Name: At_Drought_Reproduction_P Parameter: Timepoint (day) Value: 10
  misc_feature: MA Experiment 20001911 PARAMETER Experiment Name: At_Drought_Reproduction_P Parameter: Tissue Value: Flowers
  misc_feature: MA Experiment 20001911 PARAMETER Experiment Name: At_Drought_Reproduction_P Parameter: Treatment Value: Drought vs. No Drought
aaatgatcgctgcgacagcgagtgtgtgacgttaaaccctaaatctggtgtctttgtgcaatcgcaagattcattcactctctgcgacactaaagatcgaaacttttgaattgcagaaatggcgacagctttagcttccaagctctccaaaggacgttcattgcttggaggtctttgcaatgctttctctggtttgatgaattcctcctccaatggaatgatgaatggaagcatcctctctcagcaacaacataggacattcattcaaatggggacgattctcaaatgcgtggataactcgtgtgctaaagaggtgatgtgcattcaatccctgagaggtaagaaaggagcaagacttggcgatatcattgttggttcagtgaaagaagctaacccaattgttcaaaaaaaagtaaagaaagacgctatcccaaaaggtaaagtgaagaaagggatggtcgtgtacggtgtggttgtgcgtgctgcgatgcctaaaggacgtgctgatggaagccaagtcaagtttgatgacaatgccattgtagttgttggcattaaggaaaagaaagggcagaataattcacatggttccaagaggaaaatggagtacaaccaaccgactggtacccgagtgtttggtcctgtcccgcacgagatgcgcctcaggaaacagctcaagatcctttctttggctcagcacattgtttgagacaatacaccacactaaaacatcagttatgatctcctttatgtgactctctttgatccattcatcacttgggtttctgttgattcttcaactatccaactcattatttttgttaattctaatgaattatgaaaccttaacgtaccaattatgatctcttatttaggtttc

SEQ ID NO: 79296 - protein, 196 aa, Arabidopsis thaliana; identical to SEQ ID NO: 21071
  peptide (1)..(196): Ceres Seq. ID no. 12650736
  misc_feature (49)..(196): Pfam Name: Ribosomal protein L14p/L23e Pfam Description: Ribosomal protein L14p/L23e
  misc_feature (1)..(196): Homolog of NCBI NO: 8778471 NR Description: F1L3.27 [Arabidopsis thaliana]
  misc_feature (1)..(196): Homolog of NCBI NO: 15220161 NR Description: ribosomal protein, putative; protein id: supported by cDNA: 28484. [Arabidopsis thaliana]
  misc_feature (1)..(196): Homolog of NCBI NO: 18140858 NR Description: HUELLENLOS [Arabidopsis thaliana]
  misc_feature (27)..(196): Homolog of NCBI NO: 21555596 NR Description: ribosomal protein, putative [Arabidopsis thaliana]
  misc_feature (1)..(149): Homolog of NCBI NO: 20260394 NR Description: unknown protein [Arabidopsis thaliana]
  misc_feature (1)..(149): Homolog of NCBI NO: 30694900 NR Description: ribosomal protein L14p family [Arabidopsis
  misc_feature (1)..(149): Homolog of NCBI NO: 30694896 NR Description: ribosomal protein L14p family [Arabidopsis >gi|16604452|gb|AAL24232.1| AT5g46160/MCL19_22 [Arabidopsis >gi|18140860|gb|AAL60452.1|AF402993_1 HUELLENLOS PARALOG
  misc_feature (51)..(195): Homolog of NCBI NO: 9757736 NR Description: 50S ribosomal protein L14 [Arabidopsis thaliana]
  misc_feature (1)..(147): Homolog of NCBI NO: 18140856 NR Description: HUELLENLOS-like protein [Oryza sativa]
  misc_feature (101)..(195): Homolog of NCBI NO: 20260394 NR Description: unknown protein [Arabidopsis thaliana]

SEQ ID NO: 79297 - protein, 170 aa, Arabidopsis thaliana; identical to SEQ ID NO: 21072
  peptide (1)..(170): Ceres Seq. ID no. 12650737
  misc_feature (23)..(170): Pfam Name: Ribosomal protein L14p/L23e Pfam Description: Ribosomal protein L14p/L23e
  misc_feature (1)..(170): Homolog of NCBI NO: 8778471 NR Description: F1L3.27 [Arabidopsis thaliana]
  misc_feature (1)..(170): Homolog of NCBI NO: 15220161 NR Description: ribosomal protein, putative; protein id: supported by cDNA: 28484. [Arabidopsis thaliana]
  misc_feature (1)..(170): Homolog of NCBI NO: 18140858 NR Description: HUELLENLOS [Arabidopsis thaliana]
  misc_feature (1)..(170): Homolog of NCBI NO: 21555596 NR Description: ribosomal protein, putative [Arabidopsis thaliana]
  misc_feature (1)..(123): Homolog of NCBI NO: 20260394 NR Description: unknown protein [Arabidopsis thaliana]
  misc_feature (1)..(123): Homolog of NCBI NO: 30694900 NR Description: ribosomal protein L14p family [Arabidopsis
  misc_feature (1)..(123): Homolog of NCBI NO: 30694896 NR Description: ribosomal protein L14p family [Arabidopsis >gi|16604452|gb|AAL24232.1| AT5g46160/MCL19_22 [Arabidopsis >gi|18140860|gb|AAL60452.1|AF402993_1 HUELLENLOS PARALOG
  misc_feature (25)..(169): Homolog of NCBI NO: 9757736 NR Description: 50S ribosomal protein L14 [Arabidopsis thaliana]
  misc_feature (1)..(121): Homolog of NCBI NO: 18140856 NR Description: HUELLENLOS-like protein [Oryza sativa]
  misc_feature (75)..(169): Homolog of NCBI NO: 20260394 NR Description: unknown protein [Arabidopsis thaliana]

SEQ ID NO: 79298 - protein, 163 aa, Arabidopsis thaliana; identical to SEQ ID NO: 21073
  peptide (1)..(163): Ceres Seq. ID no. 12650738
  misc_feature (16)..(163): Pfam Name: Ribosomal protein L14p/L23e Pfam Description: Ribosomal protein L14p/L23e
  misc_feature (1)..(163): Homolog of NCBI NO: 8778471 NR Description: F1L3.27 [Arabidopsis thaliana]
  misc_feature (1)..(163): Homolog of NCBI NO: 15220161 NR Description: ribosomal protein, putative; protein id: supported by cDNA: 28484. [Arabidopsis thaliana]
  misc_feature (1)..(163): Homolog of NCBI NO: 18140858 NR Description: HUELLENLOS [Arabidopsis thaliana]
  misc_feature (1)..(163): Homolog of NCBI NO: 21555596 NR Description: ribosomal protein, putative [Arabidopsis thaliana]
  misc_feature (1)..(116): Homolog of NCBI NO: 20260394 NR Description: unknown protein [Arabidopsis thaliana]
  misc_feature (1)..(116): Homolog of NCBI NO: 30694900 NR Description: ribosomal protein L14p family [Arabidopsis
  misc_feature (1)..(116): Homolog of NCBI NO: 30694896 NR Description: ribosomal protein L14p family [Arabidopsis >gi|16604452|gb|AAL24232.1| AT5g46160/MCL19_22 [Arabidopsis >gi|18140860|gb|AAL60452.1|AF402993_1 HUELLENLOS PARALOG
  misc_feature (18)..(162): Homolog of NCBI NO: 9757736 NR Description: 50S ribosomal protein L14 [Arabidopsis thaliana]
  misc_feature (1)..(114): Homolog of NCBI NO: 18140856 NR Description: HUELLENLOS-like protein [Oryza sativa]
  misc_feature (68)..(162): Homolog of NCBI NO: 20260394 NR Description: unknown protein [Arabidopsis thaliana]

SEQ ID NO: 79299 - DNA, 2448 bp, Arabidopsis thaliana
  misc_feature (1)..(2448): Ceres Seq. ID no. 12650754
  misc_feature: MA Experiment ID: 20000173 Result: Down-regulated in Transcription
  misc_feature: MA Experiment 20000173 PARAMETER Experiment Name: At_42deg_Heat_P Parameter: Age (day) Value: 14
  misc_feature: MA Experiment 20000173 PARAMETER Experiment Name: At_42deg_Heat_P Parameter: Organism Value: A. thaliana
  misc_feature: MA Experiment 20000173 PARAMETER Experiment Name: At_42deg_Heat_P Parameter: Plant Line Value: WS
  misc_feature: MA Experiment 20000173 PARAMETER Experiment Name: At_42deg_Heat_P Parameter: Temperature (deg C) Value: 42 vs. 22
  misc_feature: MA Experiment 20000173 PARAMETER Experiment Name: At_42deg_Heat_P Parameter: Timepoint (hr) Value: 6
  misc_feature: MA Experiment 20000173 PARAMETER Experiment Name: At_42deg_Heat_P Parameter: Tissue Value: Aerial
  misc_feature: MA Experiment ID: 20000180 Result: Down-regulated in Transcription
  misc_feature: MA Experiment 20000180 PARAMETER Experiment Name: At_Germinating_Seeds_P Parameter: Age (hr) Value: 24 vs. 0
  misc_feature: MA Experiment 20000180 PARAMETER Experiment Name: At_Germinating_Seeds_P Parameter: Tissue Value: Germinating Seeds
  misc_feature: MA Experiment ID: 20000184 Result: Down-regulated in Transcription
  misc_feature: MA Experiment 20000184 PARAMETER Experiment Name: At_Shoots__P Parameter: Age (day) Value: 7
  misc_feature: MA Experiment 20000184 PARAMETER Experiment Name: At_Shoots__P Parameter: Tissue Value: Shoots vs. Whole Plant
atggaagataagggaaagggtgtggtggaaggagatgaggggaacttgatttctgagttagaagaaggtccaagcaatatggaatgtgacaagcaagtacttggtggtgatactaattatgatgataaagacttaaacagtgatgaagaaggtctggtagatgatgatgatgatgatagtgatgatgatgatgagggagatgagtcagaagaagaagatgactttgaagctggaagtgtcccaaacacgtttgaacgacctgagtatgaagctctggctgagaggaaacgcaaagcacttgctgattctcaacgtaatcctagtaacatctcgaatagcacctcgggcgtggagggattcatggaatttatgtcttctggtcgccgacggaaatccaggaagtataagaaaaagggtagaagacctgggtcaaagaaagaagttgcacctgacattctaaagaggtttagggaggctctttttcttcatgcacatggccgtgacattgaggctttacctattttagtagaagttattaagcaagcaccagctttcgatatagcatactattacctttcacgtgtttctgagcaacttggtaagaccgaatcatcctctacggaagcattaaagattgctgcaaatatcaaaggttcaaaatcacctttttggaagttgctttatgagaggttcaaggaacaagagaacatttcggtagcaaggagttatgcgtcgaaagcaattcaagctgatccagatgatatccctttgaaatatgaatatgcagacatctgcctaaatactggaaaatatagagaagctgctgaaacctttgagcaaatatttcgtcggtgtcctgagagaattgaagcactcaagtggggggtacagtatttccttaaatccggtgagggtgaacgagcagcgagcatcttagaggatcatatcaaatcccattcatctgaagtggggcacgatgtcttggatttactggcttctgttttcatgaaaattaatgcgcatgatagagctcttaagtatattcacgatgtgcgccagatttacaatgttggaaaagaattgtcttccagcttgaaaatcagacaagccatctgtcatgttcaccttgaagaaatggagcaggcagagagcgtgttaagcattctaccacaggaggctgtatctgaacatccagagctcatcaccaatttggctgatgagctaacaaacattgggaatttccactctgctctcaaatactatatagaagcaatcagtgaacctgtgaatggcaatttgtttgtaaaaattgctcgctgttatatgtcattggaagaaagaaaacaggccattgttttctattataaagctctgaatgaactcagtgatacggttgatgttcgcataactctggcttcactcctcctggaagatggcaaacgagatgaagctgtattagtgctttctcctccggaaaatccagaagcggtacattgctttattaaacagtactttgacagctttgatgcgaaattttgtgataatgtagatcctgatacggctaaactgaaggcatggtggaaaaacagaaagatcaggatgaatctttgtcagatctatcattcagagggaatgctggaggacttcgccaatacagcactgcagttggtacttaagtcaaggggaaaagaaaacgactggttctttcagagcatcaaagaaacaaaaaacgccgacgtcctagagatgctcaagcttcccaaaatatcttgcgatactatggatccaaagcagtggtttgactgtgtaagatctgtcattcagcaacatccatatcgtttgaatgcctggaactgctattacagtgtcatttcgagactagggaaaagagcatcgactgaagctaagttcatgcatcacttaaggagcaagtaccgagattgcgtaccccccattcttattgctggtcatcacttcaccgtgacaagccgacatcaagatgctgcaagagaataccttgaagcatataaattaatgcctgagagtcctttaattaacctgtgtgtgggagctgcgttaatcaacttagccctcggttttcgactcaaaaacagacacgagtgtcttgctcaaggctttgcatttctgtacaacaatctcagaatttgcagtaacagtcaggaggcgttatacaacgttgctcgagcgtatcagcatgtaggactagtgactcttgcagcttcatactacgagaaggtgttagcgatttacgagaaagattacacgatgccgaaacttcctaacgaggatccgattgttgcggaagagcggaagcctgtgaactgtgacctacgcaaagaagctgcacacaatctgcatttgatctataagcacagtggagcgtttgatctcgcgaggcaagtattaaaggatcactgcactttctga

SEQ ID NO: 79300 - protein, 815 aa, Arabidopsis thaliana
  peptide (1)..(815): Ceres Seq. ID no. 12650755
  misc_feature (255)..(288): Pfam Name: TPR Domain Pfam Description: TPR Domain
  misc_feature (311)..(814): Homolog of NCBI NO: 16359058 NR Description: Similar to general transcription factor IIIC,
  misc_feature (311)..(814): Homolog of NCBI NO: 10440070 NR Description: unnamed protein product [Homo sapiens]
  misc_feature (311)..(813): Homolog of NCBI NO: 34875864 NR Description: similar to general transcription factor IIIC,
  misc_feature (311)..(814): Homolog of NCBI NO: 11360230 NR Description: hypothetical protein DKFZp761E129.1 - human
  misc_feature (311)..(814): Homolog of NCBI NO: 6912398 NR Description: general transcription factor IIIC, polypeptide 3, general transcription factor IIIC, polypeptide 3 (102kD); factor IIIC, 102 kD [Homo sapiens]
  misc_feature (600)..(813): Homolog of NCBI NO: 24654335 NR Description: CG8950-PA [Drosophila melanogaster]
  misc_feature (366)..(495): Homolog of NCBI NO: 24654335 NR Description: CG8950-PA [Drosophila melanogaster]
  misc_feature (614)..(812): Homolog of NCBI NO: 17566944 NR Description: TPR domain containing protein (119.0 kD) elegans] >gi|15718303|emb|CAC70122.1| Hypothetical protein
  misc_feature (46)..(222): Homolog of NCBI NO: 17566944 NR Description: TPR domain containing protein (119.0 kD) elegans] >gi|15718303|emb|CAC70122.1| Hypothetical protein
  misc_feature (614)..(812): Homolog of NCBI NO: 7511370 NR Description: hypothetical protein ZK856.9 - Caenorhabditis
MEDKGKGVVEGDEGNLISELEEGPSNMECDKQVLGGDTNYDDKDLNSDEEGLVDDDDDDSDDDDEGDESEEEDDFEAGSVPNTFERPEYEALAERKRKALADSQRNPSNISNSTSGVEGFMEFMSSGRRRKSRKYKKKGRRPGSKKEVAPDILKRFREALFLHAHGRDIEALPILVEVIKQAPAFDIAYYYLSRVSEQLGKTESSSTEALKIAANIKGSKSPFWKLLYERFKEQENISVARSYASKAIQADPDDIPLKYEYADICLNTGKYREAAETFEQIFRRCPERIEALKWGVQYFLKSGEGERAASILEDHIKSHSSEVGHDVLDLLASVFMKINAHDRALKYIHDVRQIYNVGKELSSSLKIRQAICHVHLEEMEQAESVLSILPQEAVSEHPELITNLADELTNIGNFHSALKYYIEAISEPVNGNLFVKIARCYMSLEERKQAIVFYYKALNELSDTVDVRITLASLLLEDGKRDEAVLVLSPPENPEAVHCFIKQYFDSFDAKFCDNVDPDTAKLKAWWKNRKIRMNLCQIYHSEGMLEDFANTALQLVLKSRGKENDWFFQSIKETKNADVLEMLKLPKISCDTMDPKQWFDCVRSVIQQHPYRLNAWNCYYSVISRLGKRASTEAKFMHHLRSKYRDCVPPILIAGHHFTVTSRHQDAAREYLEAYKLMPESPLINLCVGAALINLALGFRLKNRHECLAQGFAFLYNNLRICSNSQEALYNVARAYQHVGLVTLAASYYEKVLAIYEKDYTMPKLPNEDPIVAEERKPVNCDLRKEAAHNLHLIYKHSGAFDLARQVLKDHCTF

SEQ ID NO: 79301 - protein, 789 aa, Arabidopsis thaliana
  peptide (1)..(789): Ceres Seq. ID no. 12650756
  misc_feature (229)..(262): Pfam Name: TPR Domain Pfam Description: TPR Domain
  misc_feature (285)..(788): Homolog of NCBI NO: 16359058 NR Description: Similar to general transcription factor IIIC,
  misc_feature (285)..(788): Homolog of NCBI NO: 10440070 NR Description: unnamed protein product [Homo sapiens]
  misc_feature (285)..(787): Homolog of NCBI NO: 34875864 NR Description: similar to general transcription factor IIIC,
  misc_feature (285)..(788): Homolog of NCBI NO: 11360230 NR Description: hypothetical protein DKFZp761E129.1 - human
  misc_feature (285)..(788): Homolog of NCBI NO: 6912398 NR Description: general transcription factor IIIC, polypeptide 3, general transcription factor IIIC, polypeptide 3 (102kD); factor IIIC, 102 kD [Homo sapiens]
  misc_feature (574)..(787): Homolog of NCBI NO: 24654335 NR Description: CG8950-PA [Drosophila melanogaster]
  misc_feature (340)..(469): Homolog of NCBI NO: 24654335 NR Description: CG8950-PA [Drosophila melanogaster]
  misc_feature (588)..(786): Homolog of NCBI NO: 17566944 NR Description: TPR domain containing protein (119.0 kD) elegans] >gi|15718303|emb|CAC70122.1| Hypothetical protein
  misc_feature (20)..(196): Homolog of NCBI NO: 17566944 NR Description: TPR domain containing protein (119.0 kD) elegans] >gi|15718303|emb|CAC70122.1| Hypothetical protein
  misc_feature (588)..(786): Homolog of NCBI NO: 7511370 NR Description: hypothetical protein ZK856.9 - Caenorhabditis
MECDKQVLGGDTNYDDKDLNSDEEGLVDDDDDDSDDDDEGDESEEEDDFEAGSVPNTFERPEYEALAERKRKALADSQRNPSNISNSTSGVEGFMEFMSSGRRRKSRKYKKKGRRPGSKKEVAPDILKRFREALFLHAHGRDIEALPILVEVIKQAPAFDIAYYYLSRVSEQLGKTESSSTEALKIAANIKGSKSPFWKLLYERFKEQENISVARSYASKAIQADPDDIPLKYEYADICLNTGKYREAAETFEQIFRRCPERIEALKWGVQYFLKSGEGERAASILEDHIKSHSSEVGHDVLDLLASVFMKINAHDRALKYIHDVRQIYNVGKELSSSLKIRQAICHVHLEEMEQAESVLSILPQEAVSEHPELITNLADELTNIGNFHSALKYYIEAISEPVNGNLFVKIARCYMSLEERKQAIVFYYKALNELSDTVDVRITLASLLLEDGKRDEAVLVLSPPENPEAVHCFIKQYFDSFDAKFCDNVDPDTAKLKAWWKNRKIRMNLCQIYHSEGMLEDFANTALQLVLKSRGKENDWFFQSIKETKNADVLEMLKLPKISCDTMDPKQWFDCVRSVIQQHPYRLNAWNCYYSVISRLGKRASTEAKFMHHLRSKYRDCVPPILIAGHHFTVTSRHQDAAREYLEAYKLMPESPLINLCVGAALINLALGFRLKNRHECLAQGFAFLYNNLRICSNSQEALYNVARAYQHVGLVTLAASYYEKVLAIYEKDYTMPKLPNEDPIVAEERKPVNCDLRKEAAHNLHLIYKHSGAFDLARQVLKDHCTF

SEQ ID NO: 79302 - protein, 695 aa, Arabidopsis thaliana
  peptide (1)..(695): Ceres Seq. ID no. 12650757
  misc_feature (135)..(168): Pfam Name: TPR Domain Pfam Description: TPR Domain
  misc_feature (191)..(694): Homolog of NCBI NO: 16359058 NR Description: Similar to general transcription factor IIIC,
  misc_feature (191)..(694): Homolog of NCBI NO: 10440070 NR Description: unnamed protein product [Homo sapiens]
  misc_feature (191)..(693): Homolog of NCBI NO: 34875864 NR Description: similar to general transcription factor IIIC,
  misc_feature (191)..(694): Homolog of NCBI NO: 11360230 NR Description: hypothetical protein DKFZp761E129.1 - human
  misc_feature (191)..(694): Homolog of NCBI NO: 6912398 NR Description: general transcription factor IIIC, polypeptide 3, general transcription factor IIIC, polypeptide 3 (102kD); factor IIIC, 102 kD [Homo sapiens]
  misc_feature (480)..(693): Homolog of NCBI NO: 24654335 NR Description: CG8950-PA [Drosophila melanogaster]
  misc_feature (246)..(375): Homolog of NCBI NO: 24654335 NR Description: CG8950-PA [Drosophila melanogaster]
  misc_feature (494)..(692): Homolog of NCBI NO: 17566944 NR Description: TPR domain containing protein (119.0 kD) elegans] >gi|15718303|emb|CAC70122.1| Hypothetical protein
  misc_feature (1)..(102): Homolog of NCBI NO: 17566944 NR Description: TPR domain containing protein (119.0 kD) elegans] >gi|15718303|emb|CAC70122.1| Hypothetical protein
  misc_feature (494)..(692): Homolog of NCBI NO: 7511370 NR Description: hypothetical protein ZK856.9 - Caenorhabditis
MEFMSSGRRRKSRKYKKKGRRPGSKKEVAPDILKRFREALFLHAHGRDIEALPILVEVIKQAPAFDIAYYYLSRVSEQLGKTESSSTEALKIAANIKGSKSPFWKLLYERFKEQENISVARSYASKAIQADPDDIPLKYEYADICLNTGKYREAAETFEQIFRRCPERIEALKWGVQYFLKSGEGERAASILEDHIKSHSSEVGHDVLDLLASVFMKINAHDRALKYIHDVRQIYNVGKELSSSLKIRQAICHVHLEEMEQAESVLSILPQEAVSEHPELITNLADELTNIGNFHSALKYYIEAISEPVNGNLFVKIARCYMSLEERKQAIVFYYKALNELSDTVDVRITLASLLLEDGKRDEAVLVLSPPENPEAVHCFIKQYFDSFDAKFCDNVDPDTAKLKAWWKNRKIRMNLCQIYHSEGMLEDFANTALQLVLKSRGKENDWFFQSIKETKNADVLEMLKLPKISCDTMDPKQWFDCVRSVIQQHPYRLNAWNCYYSVISRLGKRASTEAKFMHHLRSKYRDCVPPILIAGHHFTVTSRHQDAAREYLEAYKLMPESPLINLCVGAALINLALGFRLKNRHECLAQGFAFLYNNLRICSNSQEALYNVARAYQHVGLVTLAASYYEKVLAIYEKDYTMPKLPNEDPIVAEERKPVNCDLRKEAAHNLHLIYKHSGAFDLARQVLKDHCTF

SEQ ID NO: 79303 - DNA, 1495 bp, Arabidopsis thaliana
  misc_feature (1)..(1495): Ceres Seq. ID no. 12650788
  misc_feature: MA Experiment ID: 108463 Result: Up-regulated in Transcription
  misc_feature: MA Experiment 108463 PARAMETER Experiment Name: At_Germinating_Seeds_cDNA_P Parameter: Age (day) Value: 3 vs. 0
  misc_feature: MA Experiment 108463 PARAMETER Experiment Name: At_Germinating_Seeds_cDNA_P Parameter: Tissue Value: Germinating Seeds
  misc_feature: MA Experiment ID: 108561 Result: Up-regulated in Transcription
  misc_feature: MA Experiment 108561 PARAMETER Experiment Name: At_100uM_ABA_cDNA_P Parameter: Timepoint (hr) Value: 6
  misc_feature: MA Experiment 108561 PARAMETER Experiment Name: At_100uM_ABA_cDNA_P Parameter: Tissue Value: Aerial
  misc_feature: MA Experiment 108561 PARAMETER Experiment Name: At_100uM_ABA_cDNA_P Parameter: Treatment Value: 100uM ABA vs. No Treatment
  misc_feature: MA Experiment ID: 108572 Result: Up-regulated in Transcription
  misc_feature: MA Experiment 108572 PARAMETER Experiment Name: At_Drought_cDNA_P Parameter: Timepoint (hr) Value: 1
  misc_feature: MA Experiment 108572 PARAMETER Experiment Name: At_Drought_cDNA_P Parameter: Tissue Value: Aerial
  misc_feature: MA Experiment 108572 PARAMETER Experiment Name: At_Drought_cDNA_P Parameter: Treatment Value: Drought vs. No Drought
  misc_feature: MA Experiment ID: 108574 Result: Up-regulated in Transcription
  misc_feature: MA Experiment 108574 PARAMETER Experiment Name: At_Wounding__cDNA_P Parameter: Timepoint (hr) Value: 1
  misc_feature: MA Experiment 108574 PARAMETER Experiment Name: At_Wounding__cDNA_P Parameter: Tissue Value: Aerial
  misc_feature: MA Experiment 108574 PARAMETER Experiment Name: At_Wounding__cDNA_P Parameter: Treatment Value: Wounding vs. No Wounding
  misc_feature: MA Experiment ID: 108579 Result: Up-regulated in Transcription
  misc_feature: MA Experiment 108579 PARAMETER Experiment Name: At_4deg_Cold_cDNA_P Parameter: Temperature (deg C) Value: 4 vs. 22
  misc_feature: MA Experiment 108579 PARAMETER Experiment Name: At_4deg_Cold_cDNA_P Parameter: Timepoint (hr) Value: 6
  misc_feature: MA Experiment 108579 PARAMETER Experiment Name: At_4deg_Cold_cDNA_P Parameter: Tissue Value: Aerial
  misc_feature: MA Experiment ID: 108605 Result: Up-regulated in Transcription
  misc_feature: MA Experiment 108605 PARAMETER Experiment Name: At_100uM_ABA_cDNA_P Parameter: Timepoint (hr) Value: 6
  misc_feature: MA Experiment 108605 PARAMETER Experiment Name: At_100uM_ABA_cDNA_P Parameter: Tissue Value: Aerial
  misc_feature: MA Experiment 108605 PARAMETER Experiment Name: At_100uM_ABA_cDNA_P Parameter: Treatment Value: 100uM ABA vs. No Treatment
  misc_feature: MA Experiment ID: 108607 Result: Up-regulated in Transcription
  misc_feature: MA Experiment 108607 PARAMETER Experiment Name: At_100uM_ABA_cDNA_P Parameter: Timepoint (hr) Value: 4
  misc_feature: MA Experiment 108607 PARAMETER Experiment Name: At_100uM_ABA_cDNA_P Parameter: Tissue Value: Aerial
  misc_feature: MA Experiment 108607 PARAMETER Experiment Name: At_100uM_ABA_cDNA_P Parameter: Treatment Value: 100uM ABA vs. No Treatment
  misc_feature: MA Experiment ID: 20000069 Result: Up-regulated in Transcription
  misc_feature: MA Experiment 20000069 PARAMETER Experiment Name: At_100uM_ABA_Mutants_cDNA_P Parameter: Plant Line Value: CS23
  misc_feature: MA Experiment 20000069 PARAMETER Experiment Name: At_100uM_ABA_Mutants_cDNA_P Parameter: Timepoint (hr) Value: 6
  misc_feature: MA Experiment 20000069 PARAMETER Experiment Name: At_100uM_ABA_Mutants_cDNA_P Parameter: Tissue Value: Aerial
  misc_feature: MA Experiment 20000069 PARAMETER Experiment Name: At_100uM_ABA_Mutants_cDNA_P Parameter: Treatment Value: 100uM ABA vs. No Treatment
  misc_feature: MA Experiment ID: 20000072 Result: Up-regulated in Transcription
  misc_feature: MA Experiment 20000072 PARAMETER Experiment Name: At_100uM_ABA_Mutants_cDNA_P Parameter: Plant Line Value: CS8105
  misc_feature: MA Experiment 20000072 PARAMETER Experiment Name: At_100uM_ABA_Mutants_cDNA_P Parameter: Timepoint (hr) Value: 6
  misc_feature: MA Experiment 20000072 PARAMETER Experiment Name: At_100uM_ABA_Mutants_cDNA_P Parameter: Tissue Value: Aerial
  misc_feature: MA Experiment 20000072 PARAMETER Experiment Name: At_100uM_ABA_Mutants_cDNA_P Parameter: Treatment Value: 100uM ABA vs. No Treatment
  misc_feature: MA Experiment ID: 20000117 Result: Up-regulated in Transcription
  misc_feature: MA Experiment 20000117 PARAMETER Experiment Name: At_100uM_ABA_Mutants_cDNA_P Parameter: Plant Line Value: Columbia
  misc_feature: MA Experiment 20000117 PARAMETER Experiment Name: At_100uM_ABA_Mutants_cDNA_P Parameter: Timepoint (hr) Value: 6
  misc_feature: MA Experiment 20000117 PARAMETER Experiment Name: At_100uM_ABA_Mutants_cDNA_P Parameter: Tissue Value: Aerial
  misc_feature: MA Experiment 20000117 PARAMETER Experiment Name: At_100uM_ABA_Mutants_cDNA_P Parameter: Treatment Value: 100uM ABA vs. No Treatment
  misc_feature: MA Experiment ID: 20000166 Result: Up-regulated in Transcription
  misc_feature: MA Experiment 20000166 PARAMETER Experiment Name: At_100uM_ABA_P Parameter: Age (day) Value: 14
  misc_feature: MA Experiment 20000166 PARAMETER Experiment Name: At_100uM_ABA_P Parameter: Organism Value: A. thaliana
  misc_feature: MA Experiment 20000166 PARAMETER Experiment Name: At_100uM_ABA_P Parameter: Plant Line Value: WS
  misc_feature: MA Experiment 20000166 PARAMETER Experiment Name: At_100uM_ABA_P Parameter: Timepoint (hr) Value: 1
  misc_feature: MA Experiment 20000166 PARAMETER Experiment Name: At_100uM_ABA_P Parameter: Tissue Value: Aerial
  misc_feature: MA Experiment 20000166 PARAMETER Experiment Name: At_100uM_ABA_P Parameter: Treatment Value: 100uM ABA vs. No Treatment
  misc_feature: MA Experiment ID: 20000169 Result: Up-regulated in Transcription
  misc_feature: MA Experiment 20000169 PARAMETER Experiment Name: At_100uM_ABA_P Parameter: Age (day) Value: 14
  misc_feature: MA Experiment 20000169 PARAMETER Experiment Name: At_100uM_ABA_P Parameter: Organism Value: A. thaliana
  misc_feature: MA Experiment 20000169 PARAMETER Experiment Name: At_100uM_ABA_P Parameter: Plant Line Value: WS
  misc_feature: MA Experiment 20000169 PARAMETER Experiment Name: At_100uM_ABA_P Parameter: Timepoint (hr) Value: 6
  misc_feature: MA Experiment 20000169 PARAMETER Experiment Name: At_100uM_ABA_P Parameter: Tissue Value: Aerial
  misc_feature: MA Experiment 20000169 PARAMETER Experiment Name: At_100uM_ABA_P Parameter: Treatment Value: 100uM ABA vs. No Treatment
  misc_feature: MA Experiment ID: 20000184 Result: Down-regulated in Transcription
  misc_feature: MA Experiment 20000184 PARAMETER Experiment Name: At_Shoots__P Parameter: Age (day) Value: 7
  misc_feature: MA Experiment 20000184 PARAMETER Experiment Name: At_Shoots__P Parameter: Tissue Value: Shoots vs. Whole Plant
  misc_feature: MA Experiment ID: 20000234 Result: Down-regulated in Transcription
  misc_feature: MA Experiment 20000234 PARAMETER Experiment Name: At_Siliques_P Parameter: Age (day) Value: 21
  misc_feature: MA Experiment 20000234 PARAMETER Experiment Name: At_Siliques_P Parameter: Organism Value: A. thaliana
  misc_feature: MA Experiment 20000234 PARAMETER Experiment Name: At_Siliques_P Parameter: Plant Line Value: WS
  misc_feature: MA Experiment 20000234 PARAMETER Experiment Name: At_Siliques_P Parameter: Tissue Value: Less Than 5mm Siliques vs. Whole Plant
  misc_feature: MA Experiment ID: 20000235 Result: Down-regulated in Transcription
  misc_feature: MA Experiment 20000235 PARAMETER Experiment Name: At_Siliques_P Parameter: Age (day) Value: 21
  misc_feature: MA Experiment 20000235 PARAMETER Experiment Name: At_Siliques_P Parameter: Organism Value: A. thaliana
  misc_feature: MA Experiment 20000235 PARAMETER Experiment Name: At_Siliques_P Parameter: Plant Line Value: WS
  misc_feature: MA Experiment 20000235 PARAMETER Experiment Name: At_Siliques_P Parameter: Tissue Value: 5-10mm Siliques vs. Whole Plant
  misc_feature: MA Experiment ID: 20000264 Result: Down-regulated in Transcription
  misc_feature: MA Experiment 20000264 PARAMETER Experiment Name: At_Open_Flower_P Parameter: Age (day) Value: 21
  misc_feature: MA Experiment 20000264 PARAMETER Experiment Name: At_Open_Flower_P Parameter: Plant Line Value: WS
  misc_feature: MA Experiment 20000264 PARAMETER Experiment Name: At_Open_Flower_P Parameter: Tissue Value: Open Flower vs. Whole Plant
  misc_feature: MA Experiment ID: 20000265 Result: Down-regulated in Transcription
  misc_feature: MA Experiment 20000265 PARAMETER Experiment Name: At_Open_Flower_P Parameter: Age (day) Value: 21
  misc_feature: MA Experiment 20000265 PARAMETER Experiment Name: At_Open_Flower_P Parameter: Plant Line Value: WS
  misc_feature: MA Experiment 20000265 PARAMETER Experiment Name: At_Open_Flower_P Parameter: Tissue Value: Closed Flower vs. Whole Plant
  misc_feature: MA Experiment ID: 20000267 Result: Up-regulated in Transcription
  misc_feature: MA Experiment 20000267 PARAMETER Experiment Name: At_Drought_P Parameter: Age (day) Value: 7
  misc_feature: MA Experiment 20000267 PARAMETER Experiment Name: At_Drought_P Parameter: Organism Value: A. thaliana
  misc_feature: MA Experiment 20000267 PARAMETER Experiment Name: At_Drought_P Parameter: Plant Line Value: WS
  misc_feature: MA Experiment 20000267 PARAMETER Experiment Name: At_Drought_P Parameter: Timepoint (hr) Value: 6
  misc_feature: MA Experiment 20000267 PARAMETER Experiment Name: At_Drought_P Parameter: Tissue Value: Whole Plant
  misc_feature: MA Experiment 20000267 PARAMETER Experiment Name: At_Drought_P Parameter: Treatment Value: Drought vs. No Drought
  misc_feature: MA Experiment ID: 20000268 Result: Up-regulated in Transcription
  misc_feature: MA Experiment 20000268 PARAMETER Experiment Name: At_100mM_NaCl__P Parameter: Age (day) Value: 14
  misc_feature: MA Experiment 20000268 PARAMETER Experiment Name: At_100mM_NaCl__P Parameter: Organism Value: A. thaliana
  misc_feature: MA Experiment 20000268 PARAMETER Experiment Name: At_100mM_NaCl__P Parameter: Plant Line Value: WS
  misc_feature: MA Experiment 20000268 PARAMETER Experiment Name: At_100mM_NaCl__P Parameter: Timepoint (hr) Value: 6
  misc_feature: MA Experiment 20000268 PARAMETER Experiment Name: At_100mM_NaCl__P Parameter: Tissue Value: Whole Plant
  misc_feature: MA Experiment 20000268 PARAMETER Experiment Name: At_100mM_NaCl__P Parameter: Treatment Value: 100mM NaCl vs. No Treatment
  misc_feature: MA Experiment ID: 20000286 Result: Down-regulated in Transcription
  misc_feature: MA Experiment 20000286 PARAMETER Experiment Name: At_Open_Flower_P Parameter: Age (day) Value: 21
  misc_feature: MA Experiment 20000286 PARAMETER Experiment Name: At_Open_Flower_P Parameter: Plant Line Value: WS
  misc_feature: MA Experiment 20000286 PARAMETER Experiment Name: At_Open_Flower_P Parameter: Tissue Value: Half Open vs. Whole Plant
  misc_feature: MA Experiment ID: 20000436 Result: Up-regulated in Transcription
  misc_feature: MA Experiment 20000436 PARAMETER Experiment Name: At_Drought_P Parameter: Age (day) Value: 7
  misc_feature: MA Experiment 20000436 PARAMETER Experiment Name: At_Drought_P Parameter: Organism Value: A. thaliana
  misc_feature: MA Experiment 20000436 PARAMETER Experiment Name: At_Drought_P Parameter: Plant Line Value: WS
  misc_feature: MA Experiment 20000436 PARAMETER Experiment Name: At_Drought_P Parameter: Timepoint (hr) Value: 12
  misc_feature: MA Experiment 20000436 PARAMETER Experiment Name: At_Drought_P Parameter: Tissue Value: Whole Plant
  misc_feature: MA Experiment 20000436 PARAMETER Experiment Name: At_Drought_P Parameter: Treatment Value: Drought vs. No Drought
  misc_feature: MA Experiment ID: 20000437 Result: Up-regulated in Transcription
  misc_feature: MA Experiment 20000437 PARAMETER Experiment Name: At_Drought_P Parameter: Age (day) Value: 8
  misc_feature: MA Experiment 20000437 PARAMETER Experiment Name: At_Drought_P Parameter: Organism Value: A. thaliana
  misc_feature: MA Experiment 20000437 PARAMETER Experiment Name: At_Drought_P Parameter: Plant Line Value: WS
  misc_feature: MA Experiment 20000437 PARAMETER Experiment Name: At_Drought_P Parameter: Timepoint (hr) Value: 24
  misc_feature: MA Experiment 20000437 PARAMETER Experiment Name: At_Drought_P Parameter: Tissue Value: Whole Plant
  misc_feature: MA Experiment 20000437 PARAMETER Experiment Name: At_Drought_P Parameter: Treatment Value: Drought vs. No Drought
  misc_feature: MA Experiment ID: 20000453 Result: Up-regulated in Transcription
  misc_feature: MA Experiment 20000453 PARAMETER Experiment Name: At_100uM_ABA_P Parameter: Age (day) Value: 15
  misc_feature: MA Experiment 20000453 PARAMETER Experiment Name: At_100uM_ABA_P Parameter: Organism Value: A. thaliana
  misc_feature: MA Experiment 20000453 PARAMETER Experiment Name: At_100uM_ABA_P Parameter: Plant Line Value: WS
  misc_feature: MA Experiment 20000453 PARAMETER Experiment Name: At_100uM_ABA_P Parameter: Timepoint (hr) Value: 24
  misc_feature: MA Experiment 20000453 PARAMETER Experiment Name: At_100uM_ABA_P Parameter: Tissue Value: Aerial
  misc_feature: MA Experiment 20000453 PARAMETER Experiment Name: At_100uM_ABA_P Parameter: Treatment Value: 100uM ABA vs. No Treatment
  misc_feature: MA Experiment ID: 20000794 Result: Down-regulated in Transcription
  misc_feature: MA Experiment 20000794 PARAMETER Experiment Name: At_Petals_P Parameter: Age (day) Value: 23-25 days
  misc_feature: MA Experiment 20000794 PARAMETER Experiment Name: At_Petals_P Parameter: Plant Line Value: WS
  misc_feature: MA Experiment 20000794 PARAMETER Experiment Name: At_Petals_P Parameter: Tissue Value: Petals vs. Whole plant
  misc_feature: MA Experiment ID: 20001554 Result: Up-regulated in Transcription
  misc_feature: MA Experiment 20001554 PARAMETER Experiment Name: At_Drought_Soil_Dry_P Parameter: Age (day) Value: 21
  misc_feature: MA Experiment 20001554 PARAMETER Experiment Name: At_Drought_Soil_Dry_P Parameter: Organism Value: A. thaliana
  misc_feature: MA Experiment 20001554 PARAMETER Experiment Name: At_Drought_Soil_Dry_P Parameter: Plant Line Value: WS
  misc_feature: MA Experiment 20001554 PARAMETER Experiment Name: At_Drought_Soil_Dry_P Parameter: Post Timepoint (hr) Value: None
  misc_feature: MA Experiment 20001554 PARAMETER Experiment Name: At_Drought_Soil_Dry_P Parameter: Post-Treatment Value: None
  misc_feature: MA Experiment 20001554 PARAMETER Experiment Name: At_Drought_Soil_Dry_P Parameter: Timepoint (day) Value: 7
  misc_feature: MA Experiment 20001554 PARAMETER Experiment Name: At_Drought_Soil_Dry_P Parameter: Treatment Value: Drought vs. No Drought
  misc_feature: MA Experiment ID: 20001757 Result: Down-regulated in Transcription
  misc_feature: MA Experiment 20001757 PARAMETER Experiment Name: At_50mM_NH4NO3_L-to-H_P Parameter: Timepoint (hr) Value: 6
  misc_feature: MA Experiment 20001757 PARAMETER Experiment Name: At_50mM_NH4NO3_L-to-H_P Parameter: Tissue Value: Leaf
  misc_feature: MA Experiment 20001757 PARAMETER Experiment Name: At_50mM_NH4NO3_L-to-H_P Parameter: Treatment Value: 50mM NH4NO3 vs 100mM Mannitol
atgggatgctttgcgtcaacgccgaaagactcaggtgggaacagaagaaagccaacaagcatcggtgaggtttcagtatatgtacctggtttaaggatacccagagcggtggattttttgcagtcacttggtgatcaattaccgaagactttagtggaacgcttgacagctttaagaacgcgtatagtagtgatggctaatcaagaaggacctacaattacgagaactaggagaaagacacaacatggaggttcaacgctcttggatctccatcaagctttgctagattatctacctgttgtcttgggattaactaaagatggtagccatctacagtttaaagtgcaatttaattgggtaaatcaggaggatgaggaagaggaaacagagatgtcaaacgtttggtatgaagttttatctgttttgcatctaatggcaatgctacaaatgtctcaagccaatttactgcttcttcctagaggttctagtgatggtcacaatcatccgaaagtatccgaagaaaacagacgaacttcgattgatatcttcttaaaagcagctggatatcttgattgtgccgttaagcatgttctcccccagttttctgctgagcaaaggagaagtttaccagttgacttagcagaaggaactctacgggctctttgcttgcaagcacttggccagggtgttgatatccaacttggcatggcgattgatagctcaaaggccactcttgcagtaaaacgaagactttcatgtgaaatggtgaaatattggcagcaggcacaagataatttaatgaatctcccgttagcaaatggttggggagaaaagcatggactctttgttaagtggaagtatgttgaagctaaggctgcggcttactactatcatggtttgattcttgatgaaggaaacacagagaagtcacatggcatggcagttgctgctttacaagctgcagatgaatgtttcaaagaaagtaagaaagcatccgaagcattcaacgcctctgcgcctacttcaagaacaccgcccctctttggaacaatgaaatatctaactgagaaaatcccgaaagatacttcgagtaaagtcaggataaaccgtgatctctactcctatgaaaaaatcatggagacagcaccaacacttcctgatttcgctttggcattgaaaccagatgagtatcaacttccactcgccgaagcttcgtagtctgaagatgctcaaagcgcttcgaaccaactttaggagcaaacgaagagagagagagatgtgtaaaccttgtatagccaaaaaatcagtggtttccaatgacggcctgcaaattatggtatggctatagaatttacccaacaggtttctatgatctgatctctaccgtgtgagaaaaaacacttatcaaaattgggtttggatcagtttacatgagagagatctttgtatgttaatgtactaatatattccttcaataaagcattatttttttccc

SEQ ID NO: 79304 - protein, 405 aa, Arabidopsis thaliana
  peptide (1)..(405): Ceres Seq. ID no. 12650789
  misc_feature (1)..(405): Homolog of NCBI NO: 25372891 NR Description: protein F2H15.16 [imported] - Arabidopsis >gi|9665071|gb|AAF97273.1|AC034106_16 F2H15.16 [Arabidopsis
  misc_feature (1)..(405): Homolog of NCBI NO: 15220908 NR Description: hypothetical protein; protein id: At1g17940.1
  misc_feature (1)..(405): Homolog of NCBI NO: 15219459 NR Description: hypothetical protein; protein id: At1g73390.1, by cDNA: gi_18252172 [Arabidopsis thaliana]
  misc_feature (1)..(400): Homolog of NCBI NO: 38344447 NR Description: OSJNBa0038O10.19 [Oryza sativa (japonica
  misc_feature (1)..(403): Homolog of NCBI NO: 30684716 NR Description: expressed protein [Arabidopsis thaliana]
MGCFASTPKDSGGNRRKPTSIGEVSVYVPGLRIPRAVDFLQSLGDQLPKTLVERLTALRTRIVVMANQEGPTITRTRRKTQHGGSTLLDLHQALLDYLPVVLGLTKDGSHLQFKVQFNWVNQEDEEEETEMSNVWYEVLSVLHLMAMLQMSQANLLLLPRGSSDGHNHPKVSEENRRTSIDIFLKAAGYLDCAVKHVLPQFSAEQRRSLPVDLAEGTLRALCLQALGQGVDIQLGMAIDSSKATLAVKRRLSCEMVKYWQQAQDNLMNLPLANGWGEKHGLFVKWKYVEAKAAAYYYHGLILDEGNTEKSHGMAVAALQAADECFKESKKASEAFNASAPTSRTPPLFGTMKYLTEKIPKDTSSKVRINRDLYSYEKIMETAPTLPDFALALKPDEYQLPLAEAS

SEQ ID NO: 79305 - protein, 341 aa, Arabidopsis thaliana
  peptide (1)..(341): Ceres Seq. ID no. 12650790
  misc_feature (1)..(341): Homolog of NCBI NO: 25372891 NR Description: protein F2H15.16 [imported] - Arabidopsis >gi|9665071|gb|AAF97273.1|AC034106_16 F2H15.16 [Arabidopsis
  misc_feature (1)..(341): Homolog of NCBI NO: 15220908 NR Description: hypothetical protein; protein id: At1g17940.1
  misc_feature (1)..(341): Homolog of NCBI NO: 15219459 NR Description: hypothetical protein; protein id: At1g73390.1, by cDNA: gi_18252172 [Arabidopsis thaliana]
  misc_feature (1)..(336): Homolog of NCBI NO: 38344447 NR Description: OSJNBa0038O10.19 [Oryza sativa (japonica
  misc_feature (1)..(339): Homolog of NCBI NO: 30684716 NR Description: expressed protein [Arabidopsis thaliana]
MANQEGPTITRTRRKTQHGGSTLLDLHQALLDYLPVVLGLTKDGSHLQFKVQFNWVNQEDEEEETEMSNVWYEVLSVLHLMAMLQMSQANLLLLPRGSSDGHNHPKVSEENRRTSIDIFLKAAGYLDCAVKHVLPQFSAEQRRSLPVDLAEGTLRALCLQALGQGVDIQLGMAIDSSKATLAVKRRLSCEMVKYWQQAQDNLMNLPLANGWGEKHGLFVKWKYVEAKAAAYYYHGLILDEGNTEKSHGMAVAALQAADECFKESKKASEAFNASAPTSRTPPLFGTMKYLTEKIPKDTSSKVRINRDLYSYEKIMETAPTLPDFALALKPDEYQLPLAEAS

SEQ ID NO: 79306 - protein, 275 aa, Arabidopsis thaliana
  peptide (1)..(275): Ceres Seq. ID no. 12650791
  misc_feature (1)..(275): Homolog of NCBI NO: 25372891 NR Description: protein F2H15.16 [imported] - Arabidopsis >gi|9665071|gb|AAF97273.1|AC034106_16 F2H15.16 [Arabidopsis
  misc_feature (1)..(275): Homolog of NCBI NO: 15220908 NR Description: hypothetical protein; protein id: At1g17940.1
  misc_feature (1)..(275): Homolog of NCBI NO: 15219459 NR Description: hypothetical protein; protein id: At1g73390.1, by cDNA: gi_18252172 [Arabidopsis thaliana]
  misc_feature (1)..(270): Homolog of NCBI NO: 38344447 NR Description: OSJNBa0038O10.19 [Oryza sativa (japonica
  misc_feature (1)..(273): Homolog of NCBI NO: 30684716 NR Description: expressed protein [Arabidopsis thaliana]
MSNVWYEVLSVLHLMAMLQMSQANLLLLPRGSSDGHNHPKVSEENRRTSIDIFLKAAGYLDCAVKHVLPQFSAEQRRSLPVDLAEGTLRALCLQALGQGVDIQLGMAIDSSKATLAVKRRLSCEMVKYWQQAQDNLMNLPLANGWGEKHGLFVKWKYVEAKAAAYYYHGLILDEGNTEKSHGMAVAALQAADECFKESKKASEAFNASAPTSRTPPLFGTMKYLTEKIPKDTSSKVRINRDLYSYEKIMETAPTLPDFALALKPDEYQLPLAEAS

SEQ ID NO: 79307 - DNA, 1121 bp, Arabidopsis thaliana
  misc_feature (1)..(1121): Ceres Seq. ID no. 12650792
  misc_feature: MA Experiment ID: 108462 Result: Up-regulated in Transcription
  misc_feature: MA Experiment 108462 PARAMETER Experiment Name: At_Germinating_Seeds_cDNA_P Parameter: Age (day) Value: 2 vs. 0
  misc_feature: MA Experiment 108462 PARAMETER Experiment Name: At_Germinating_Seeds_cDNA_P Parameter: Tissue Value: Germinating Seeds
  misc_feature: MA Experiment ID: 108463 Result: Up-regulated in Transcription
  misc_feature: MA Experiment 108463 PARAMETER Experiment Name: At_Germinating_Seeds_cDNA_P Parameter: Age (day) Value: 3 vs. 0
  misc_feature: MA Experiment 108463 PARAMETER Experiment Name: At_Germinating_Seeds_cDNA_P Parameter: Tissue Value: Germinating Seeds
  misc_feature: MA Experiment ID: 20000185 Result: Up-regulated in Transcription
  misc_feature: MA Experiment 20000185 PARAMETER Experiment Name: At_Roots__P Parameter: Age (day) Value: 7 vs. 21
  misc_feature: MA Experiment 20000185 PARAMETER Experiment Name: At_Roots__P Parameter: Organism Value: A. thaliana
  misc_feature: MA Experiment 20000185 PARAMETER Experiment Name: At_Roots__P Parameter: Tissue Value: Roots vs. Whole Plant
  misc_feature: MA Experiment ID: 20000267 Result: Up-regulated in Transcription
  misc_feature: MA Experiment 20000267 PARAMETER Experiment Name: At_Drought_P Parameter: Age (day) Value: 7
  misc_feature: MA Experiment 20000267 PARAMETER Experiment Name: At_Drought_P Parameter: Organism Value: A. thaliana
  misc_feature: MA Experiment 20000267 PARAMETER Experiment Name: At_Drought_P Parameter: Plant Line Value: WS
  misc_feature: MA Experiment 20000267 PARAMETER Experiment Name: At_Drought_P Parameter: Timepoint (hr) Value: 6
  misc_feature: MA Experiment 20000267 PARAMETER Experiment Name: At_Drought_P Parameter: Tissue Value: Whole Plant
  misc_feature: MA Experiment 20000267 PARAMETER Experiment Name: At_Drought_P Parameter: Treatment Value: Drought vs. No Drought
  misc_feature: MA Experiment ID: 20000439 Result: Up-regulated in Transcription
  misc_feature: MA Experiment 20000439 PARAMETER Experiment Name: At_Roots__P Parameter: Age (day) Value: 14 vs. 21
  misc_feature: MA Experiment 20000439 PARAMETER Experiment Name: At_Roots__P Parameter: Organism Value: A. thaliana
  misc_feature: MA Experiment 20000439 PARAMETER Experiment Name: At_Roots__P Parameter: Tissue Value: Roots vs. Whole Plant
agctttcttcttgttcctacatacccatcttccctcacctacatcaaacctagggtttcttaactatatcaacaacatatataaatttatatataggttgtgatttattgaagatcataaagatcaaaaggagagaggtattaaaaaatgatgtgtagtcgaggccattggagacctgcagaagacgagaagctaagagaactcgtcgaacaatttggtcctcataattggaacgccatagctcagaagctctctggtcgatctggtaagagttgtagattgagatggtttaatcaattggatcctaggattaaccgaaaccctttcacggaggaagaagaagaaaggcttttagcgtctcatcggatccatgggaacagatggtctgtgatcgctagattttttcccggtcgaactgataacgctgttaaaaaccattggcacgtcatcatggctcgtcgtggccgagaacggtccaagctccgtccacgaggccttggccatgatggcacggtggctgcgactgggatgattggtaattataaagactgcgataaggagagaagattggcaaccacaaccgctatcaattttccttatcaattctctcatattaatcattttcaagtcctcaaagagttcttgaccggaaagatcgggttcagaaatagtactactccaatacaagaaggagcaatagaccaaactaaacgaccgatggagttctacaattttcttcaagtaaacacggattcgaagatacacgaattgatagataattcaagaaaagacgaagaagaagatgtcgatcaaaacaaccgaattcctaacgagaattgtgttccatttttcgactttttgtctgttggaaactctgcctctcagggtttatgttaatttgtccgtaccacatgtactataaggtggaccatatgttaattaaagataatgtagaaagtactaatcaattagagctcttgtttgagccaaatgtgaaaattagttaagccatcccaaacatgttcttgtataacaaatataaggttgtacttttccacctttatcaggtctaattttctatttttattttaaggatgtttaatcagactcatcaccattcg

SEQ ID NO: 79308 - protein, 249 aa, Arabidopsis thaliana
  peptide (1)..(249): Ceres Seq. ID no. 12650793
  misc_feature (5)..(51): Pfam Name: Myb-like DNA-binding domain Pfam Description: Myb-like DNA-binding domain
  misc_feature (1)..(249): Homolog of NCBI NO: 15220910 NR Description: myb family trnscription factor; protein id: supported by cDNA: 267121., supported by cDNA: gi_3941467
  misc_feature (2)..(249): Homolog of NCBI NO: 25513679 NR Description: F2H15.17 protein - Arabidopsis thaliana
  misc_feature (1)..(249): Homolog of NCBI NO: 21554916 NR Description: myb-like protein, putative [Arabidopsis thaliana]
  misc_feature (1)..(249): Homolog of NCBI NO: 11358541 NR Description: myb-related transcription factor MYB52 [imported] Arabidopsis thaliana >gi|3941468|gb|AAC83610.1| putative
  misc_feature (1)..(245): Homolog of NCBI NO: 15219462 NR Description: myb family transcription factor(MYB54); protein
  misc_feature (1)..(245): Homolog of NCBI NO: 11358543 NR Description: myb-related transcription factor MYB54 [imported] Arabidopsis thaliana >gi|3941472|gb|AAC83612.1| putative
  misc_feature (2)..(127): Homolog of NCBI NO: 21321780 NR Description: putative Myb/Myb-related protein [Oryza sativa
  misc_feature (3)..(115): Homolog of NCBI NO: 6979341 NR Description: myb-like protein [Oryza sativa]
  misc_feature (2)..(110): Homolog of NCBI NO: 34903242 NR Description: unnamed protein product [Oryza sativa (japonica group)] >gi|6539552|dbj|BAA88169.1| unnamed protein product
  misc_feature (1)..(110): Homolog of NCBI NO: 15222362 NR Description: MYB-family transcription factor, putative; id: At1g69560.1, supported by cDNA: gi_7644365 [Arabidopsis
MMCSRGHWRPAEDEKLRELVEQFGPHNWNAIAQKLSGRSGKSCRLRWFNQLDPRINRNPFTEEEEERLLASHRIHGNRWSVIARFFPGRTDNAVKNHWHVIMARRGRERSKLRPRGLGHDGTVAATGMIGNYKDCDKERRLATTTAINFPYQFSHINHFQVLKEFLTGKIGFRNSTTPIQEGAIDQTKRPMEFYNFLQVNTDSKIHELIDNSRKDEEEDVDQNNRIPNENCVPFFDFLSVGNSASQGLC

SEQ ID NO: 79309 - protein, 248 aa, Arabidopsis thaliana
  peptide (1)..(248): Ceres Seq. ID no. 12650794
  misc_feature (4)..(50): Pfam Name: Myb-like DNA-binding domain Pfam Description: Myb-like DNA-binding domain
  misc_feature (1)..(248): Homolog of NCBI NO: 15220910 NR Description: myb family trnscription factor; protein id: supported by cDNA: 267121., supported by cDNA: gi_3941467
  misc_feature (1)..(248): Homolog of NCBI NO: 25513679 NR Description: F2H15.17 protein - Arabidopsis thaliana
  misc_feature (1)..(248): Homolog of NCBI NO: 21554916 NR Description: myb-like protein, putative [Arabidopsis thaliana]
  misc_feature (1)..(248): Homolog of NCBI NO: 11358541 NR Description: myb-related transcription factor MYB52 [imported] Arabidopsis thaliana >gi|3941468|gb|AAC83610.1| putative
  misc_feature (1)..(244): Homolog of NCBI NO: 15219462 NR Description: myb family transcription factor(MYB54); protein
  misc_feature (1)..(244): Homolog of NCBI NO: 11358543 NR Description: myb-related transcription factor MYB54 [imported] Arabidopsis thaliana >gi|3941472|gb|AAC83612.1| putative
  misc_feature (1)..(126): Homolog of NCBI NO: 21321780 NR Description: putative Myb/Myb-related protein [Oryza sativa
  misc_feature (2)..(114): Homolog of NCBI NO: 6979341 NR Description: myb-like protein [Oryza sativa]
  misc_feature (1)..(109): Homolog of NCBI NO: 34903242 NR Description: unnamed protein product [Oryza sativa (japonica group)] >gi|6539552|dbj|BAA88169.1| unnamed protein product
  misc_feature (1)..(109): Homolog of NCBI NO: 15222362 NR Description: MYB-family transcription factor, putative; id: At1g69560.1, supported by cDNA: gi_7644365 [Arabidopsis
MCSRGHWRPAEDEKLRELVEQFGPHNWNAIAQKLSGRSGKSCRLRWFNQLDPRINRNPFTEEEEERLLASHRIHGNRWSVIARFFPGRTDNAVKNHWHVIMARRGRERSKLRPRGLGHDGTVAATGMIGNYKDCDKERRLATTTAINFPYQFSHINHFQVLKEFLTGKIGFRNSTTPIQEGAIDQTKRPMEFYNFLQVNTDSKIHELIDNSRKDEEEDVDQNNRIPNENCVPFFDFLSVGNSASQGLC

SEQ ID NO: 79310 - protein, 148 aa, Arabidopsis thaliana
  peptide (1)..(148): Ceres Seq. ID no. 12650795
  misc_feature (1)..(148): Homolog of NCBI NO: 15220910 NR Description: myb family trnscription factor; protein id: supported by cDNA: 267121., supported by cDNA: gi_3941467
  misc_feature (1)..(148): Homolog of NCBI NO: 25513679 NR Description: F2H15.17 protein - Arabidopsis thaliana
  misc_feature (1)..(148): Homolog of NCBI NO: 21554916 NR Description: myb-like protein, putative [Arabidopsis thaliana]
  misc_feature (1)..(148): Homolog of NCBI NO: 11358541 NR Description: myb-related transcription factor MYB52 [imported] Arabidopsis thaliana >gi|3941468|gb|AAC83610.1| putative
  misc_feature (1)..(144): Homolog of NCBI NO: 15219462 NR Description: myb family transcription factor(MYB54); protein
  misc_feature (1)..(144): Homolog of NCBI NO: 11358543 NR Description: myb-related transcription factor MYB54 [imported] Arabidopsis thaliana >gi|3941472|gb|AAC83612.1| putative
  misc_feature (1)..(26): Homolog of NCBI NO: 21321780 NR Description: putative Myb/Myb-related protein [Oryza sativa
  misc_feature (1)..(14): Homolog of NCBI NO: 6979341 NR Description: myb-like protein [Oryza sativa]
  misc_feature (1)..(25): Homolog of NCBI NO: 9759057 NR Description: Myb-like transcription factor-like protein
  misc_feature (1)..(25): Homolog of NCBI NO: 15238028 NR Description: MYB56 R2R3-MYB factor family member; protein id:
MARRGRERSKLRPRGLGHDGTVAATGMIGNYKDCDKERRLATTTAINFPYQFSHINHFQVLKEFLTGKIGFRNSTTPIQEGAIDQTKRPMEFYNFLQVNTDSKIHELIDNSRKDEEEDVDQNNRIPNENCVPFFDFLSVGNSASQGLC

SEQ ID NO: 79311 - DNA, 2976 bp, Arabidopsis thaliana
  misc_feature (1)..(2976): Ceres Seq. ID no. 12650823
  misc_feature: MA Experiment ID: 20000173 Result: Down-regulated in Transcription
  misc_feature: MA Experiment 20000173 PARAMETER Experiment Name: At_42deg_Heat_P Parameter: Age (day) Value: 14
  misc_feature: MA Experiment 20000173 PARAMETER Experiment Name: At_42deg_Heat_P Parameter: Organism Value: A. thaliana
  misc_feature: MA Experiment 20000173 PARAMETER Experiment Name: At_42deg_Heat_P Parameter: Plant Line Value: WS
  misc_feature: MA Experiment 20000173 PARAMETER Experiment Name: At_42deg_Heat_P Parameter: Temperature (deg C) Value: 42 vs. 22
  misc_feature: MA Experiment 20000173 PARAMETER Experiment Name: At_42deg_Heat_P Parameter: Timepoint (hr) Value: 6
  misc_feature: MA Experiment 20000173 PARAMETER Experiment Name: At_42deg_Heat_P Parameter: Tissue Value: Aerial
  misc_feature: MA Experiment ID: 20000184 Result: Down-regulated in Transcription
  misc_feature: MA Experiment 20000184 PARAMETER Experiment Name: At_Shoots__P Parameter: Age (day) Value: 7
  misc_feature: MA Experiment 20000184 PARAMETER Experiment Name: At_Shoots__P Parameter: Tissue Value: Shoots vs. Whole Plant
  misc_feature: MA Experiment ID: 20000794 Result: Up-regulated in Transcription
  misc_feature: MA Experiment 20000794 PARAMETER Experiment Name: At_Petals_P Parameter: Age (day) Value: 23-25 days
  misc_feature: MA Experiment 20000794 PARAMETER Experiment Name: At_Petals_P Parameter: Plant Line Value: WS
  misc_feature: MA Experiment 20000794 PARAMETER Experiment Name: At_Petals_P Parameter: Tissue Value: Petals vs. Whole plant
atgaagatgaacatgaagaaatttctcaaaaagcttcgtatcacgcccaatcaacgagacgatggtgaaggttcagtctctaacagaagcaataagtctagtgatgcagaaccatctccttctgattcattgaggtctcaagataactctgaattcaaaccctttttgggtttatcaaattggttaagctctgttactcacaggaaaagcccttcttcttccaatgccaccaatagcaaagaggatgacactaccatggaacatggtggtcccgttgggtcggaatctgggatgcagggtttgggttctagtagtaattccaaggatccagaagttgaagaagaatatcagatacagttggctctagagttaagtgctagggaggatcctgaagctgctcagattgaggctatgaagcagttcagcttaggttctcgtccttctgctcccgagaatactccagctgaactcatggcatatagatattggaattataactgtcttggctatgatgacaagattgtggatggtttctatgacctgtgtggagtaatgaatgaatcttccttaaaaagaatacctcccttagttgatcttcaggggacacttgtgtcagatggtgtaacttgggatgctgttctagtgaacagcagcaaagattctaatctgttgagacttgaacaaatggctcttgatattgcagcaaaatcaaagtcagcgtcttcttcagggtttgtgaacagtgaattggtaaggcaactggcagttttagttgctgattacatgggtggaccagttttggatccagatagcacgttaagagcttggtggagtctgagctacagcttgaaagcaaccctccgtagcatggttctgcccctgggttctctaactattggattggctcgtcatcgtgccttgttattcaaagttttgtgtgatagtgtcggcgttccttgtcgaatagtcaaaggacagcaatataccggttcagatgatgtggcaatgaactccattaagactgatgatggcagttgcaaattattttccttaacgaatccaaatgtgaatttcagggagtacattgttgatctcatgggagatccaggcacgcttatccccgctgatgcagctggactacaaatggactttgatgattctgtctactctgccagtcccagagatgttgattcatctcatgtagcttcttccagcagtggggtcgagagctcaattgaagaacacacagaatcttggtcagcggaacatcgttctaggaccaagggttcccgggaggaaaaccaatctgcaggtggaggggatctcatgattccaaatattagggaagctgtgggaagtcaaaaggctcctgttcaacatctttccagcaagcctactcattctttcactcatgccagatcaccttcgtggactgaaggtgttagctctccagctggacgcaggatgaaagtcaaagatgtttcacaatatatgattgatgctgccaaagagaatccacaactagctcagaagcttcatgatgtgttacttgaaagtggagttgtagctcctcgaaatttattttcggaagtctattcagagtcaatggaggcaacaggtgaaatcaaatctgtggctgaatccaatgatgagaaagggaaagattttggaacaatccagcaaggaagaaaccagagcaaccttggccctgtgaggtttttgcctcctcttccaagaccgcaatctaaagcaattacccatgacctacgtgaacattcaggatctggactcggtcatttgtctgaacattgcaatattgatggtcactctgattcctcacattctgaaacatctactgactatcccagaaatgttcctgttgccgtagctgcagcggctgttgttgcgtcttccatggttgttgctgccgccaagtcagcaaactcggattcctccactttagaactttctgctgcagctgctgctgcagttatggcgacagctgcagcagtgagcaggcagtttgaactagattcacttagcaacggggatgctggttctggtgggcttcatggggtagattcaggaggagaacgaatatccgacagatctattggcaatgaaagttcaaaatctgatgctgcaattgatgatgtagctgaatgcgagattttgtgggaggaaattactgtggctgagcgtatcggactggtggctgtcaagaagttcattgaccaagatattactggagaggcactggaggaattcagaagtgaggtccggatgatgagaaggctcagacaccctaatattgttctcttcatgggagctgtaacccgcccaccaaatctctcaattgttacagaatttcttcctcgaggtagcttgtataggttaattcacaggcctaataaccaattagatgagcgaaagcgtctgaggatggctcttgatgctgctcgtggaatgaattatttacacagctgtaatccggtaattgtccatcgtgatcttaaatctccaaaccttctagttgacaaaaattgggttgtcaaggtgtgcgattttgggttgtctagaatgaaagtaagcacatacctctcttcaaagtcaacagcaggcacggctgaatggatggctccagaagtgcttagaaacgaacccgcagatgagaagtgtgatgtgtacagctacggggtcattctctgggaactctttacgttacagcaaccatggggaaaaatgaacccaatgcaagtggttggcgcggttggttttcaacatcgacgacttgatatccctgaatttgtggatcctggaattgcagatatcatcaggaaatgttggcagacggatccaaggttaagaccaagttttggagagatcatggattctttaaagcagctacagaaacctatccagagagcagcagttcccagttcttctgcattgaccactgatgagcaggaacaataa

SEQ ID NO: 79312 - protein, 991 aa, Arabidopsis thaliana
  peptide (1)..(991): Ceres Seq. ID no. 12650824
  misc_feature (729)..(966): Pfam Name: Protein kinase domain Pfam Description: Protein kinase domain
  misc_feature (628)..(991): Homolog of NCBI NO: 32527767 NR Description: shoot regeneration-related mitogen activated
  misc_feature (59)..(433): Homolog of NCBI NO: 32527767 NR Description: shoot regeneration-related mitogen activated
  misc_feature (41)..(434): Homolog of NCBI NO: 22326737 NR Description: MAP3K delta-1 protein kinase; protein id: supported by cDNA: gi_18700074 [Arabidopsis thaliana]
  misc_feature (670)..(970): Homolog of NCBI NO: 22326737 NR Description: MAP3K delta-1 protein kinase; protein id: supported by cDNA: gi_18700074 [Arabidopsis thaliana]
  misc_feature (1)..(142): Homolog of NCBI NO: 32527767 NR Description: shoot regeneration-related mitogen activated
  misc_feature (154)..(549): Homolog of NCBI NO: 11358502 NR Description: MAP3K delta-1 protein kinase - Arabidopsis
  misc_feature (670)..(951): Homolog of NCBI NO: 11358502 NR Description: MAP3K delta-1 protein kinase - Arabidopsis
  misc_feature (28)..(400): Homolog of NCBI NO: 7489058 NR Description: probable protein kinase TCTR2 - tomato
  misc_feature (704)..(980): Homolog of NCBI NO: 7489058 NR Description: probable protein kinase TCTR2 - tomato
  misc_feature (70)..(442): Homolog of NCBI NO: 7488198 NR Description: probable serine/threonine-specific protein kinase
MKMNMKKFLKKLRITPNQRDDGEGSVSNRSNKSSDAEPSPSDSLRSQDNSEFKPFLGLSNWLSSVTHRKSPSSSNATNSKEDDTTMEHGGPVGSESGMQGLGSSSNSKDPEVEEEYQIQLALELSAREDPEAAQIEAMKQFSLGSRPSAPENTPAELMAYRYWNYNCLGYDDKIVDGFYDLCGVMNESSLKRIPPLVDLQGTLVSDGVTWDAVLVNSSKDSNLLRLEQMALDIAAKSKSASSSGFVNSELVRQLAVLVADYMGGPVLDPDSTLRAWWSLSYSLKATLRSMVLPLGSLTIGLARHRALLFKVLCDSVGVPCRIVKGQQYTGSDDVAMNSIKTDDGSCKLFSLTNPNVNFREYIVDLMGDPGTLIPADAAGLQMDFDDSVYSASPRDVDSSHVASSSSGVESSIEEHTESWSAEHRSRTKGSREENQSAGGGDLMIPNIREAVGSQKAPVQHLSSKPTHSFTHARSPSWTEGVSSPAGRRMKVKDVSQYMIDAAKENPQLAQKLHDVLLESGVVAPRNLFSEVYSESMEATGEIKSVAESNDEKGKDFGTIQQGRNQSNLGPVRFLPPLPRPQSKAITHDLREHSGSGLGHLSEHCNIDGHSDSSHSETSTDYPRNVPVAVAAAAVVASSMVVAAAKSANSDSSTLELSAAAAAAVMATAAAVSRQFELDSLSNGDAGSGGLHGVDSGGERISDRSIGNESSKSDAAIDDVAECEILWEEITVAERIGLVAVKKFIDQDITGEALEEFRSEVRMMRRLRHPNIVLFMGAVTRPPNLSIVTEFLPRGSLYRLIHRPNNQLDERKRLRMALDAARGMNYLHSCNPVIVHRDLKSPNLLVDKNWVVKVCDFGLSRMKVSTYLSSKSTAGTAEWMAPEVLRNEPADEKCDVYSYGVILWELFTLQQPWGKMNPMQVVGAVGFQHRRLDIPEFVDPGIADIIRKCWQTDPRLRPSFGEIMDSLKQLQKPIQRAAVPSSSALTTDEQEQ

SEQ ID NO: 79313 - protein, 989 aa, Arabidopsis thaliana
  peptide (1)..(989): Ceres Seq. ID no. 12650825
  misc_feature (727)..(964): Pfam Name: Protein kinase domain Pfam Description: Protein kinase domain
  misc_feature (626)..(989): Homolog of NCBI NO: 32527767 NR Description: shoot regeneration-related mitogen activated
  misc_feature (57)..(431): Homolog of NCBI NO: 32527767 NR Description: shoot regeneration-related mitogen activated
  misc_feature (39)..(432): Homolog of NCBI NO: 22326737 NR Description: MAP3K delta-1 protein kinase; protein id: supported by cDNA: gi_18700074 [Arabidopsis thaliana]
  misc_feature (668)..(968): Homolog of NCBI NO: 22326737 NR Description: MAP3K delta-1 protein kinase; protein id: supported by cDNA: gi_18700074 [Arabidopsis thaliana]
  misc_feature (1)..(140): Homolog of NCBI NO: 32527767 NR Description: shoot regeneration-related mitogen activated
  misc_feature (152)..(547): Homolog of NCBI NO: 11358502 NR Description: MAP3K delta-1 protein kinase - Arabidopsis
  misc_feature (668)..(949): Homolog of NCBI NO: 11358502 NR Description: MAP3K delta-1 protein kinase - Arabidopsis
  misc_feature (26)..(398): Homolog of NCBI NO: 7489058 NR Description: probable protein kinase TCTR2 - tomato
  misc_feature (702)..(978): Homolog of NCBI NO: 7489058 NR Description: probable protein kinase TCTR2 - tomato
  misc_feature (68)..(440): Homolog of NCBI NO: 7488198 NR Description: probable serine/threonine-specific protein kinase
MNMKKFLKKLRITPNQRDDGEGSVSNRSNKSSDAEPSPSDSLRSQDNSEFKPFLGLSNWLSSVTHRKSPSSSNATNSKEDDTTMEHGGPVGSESGMQGLGSSSNSKDPEVEEEYQIQLALELSAREDPEAAQIEAMKQFSLGSRPSAPENTPAELMAYRYWNYNCLGYDDKIVDGFYDLCGVMNESSLKRIPPLVDLQGTLVSDGVTWDAVLVNSSKDSNLLRLEQMALDIAAKSKSASSSGFVNSELVRQLAVLVADYMGGPVLDPDSTLRAWWSLSYSLKATLRSMVLPLGSLTIGLARHRALLFKVLCDSVGVPCRIVKGQQYTGSDDVAMNSIKTDDGSCKLFSLTNPNVNFREYIVDLMGDPGTLIPADAAGLQMDFDDSVYSASPRDVDSSHVASSSSGVESSIEEHTESWSAEHRSRTKGSREENQSAGGGDLMIPNIREAVGSQKAPVQHLSSKPTHSFTHARSPSWTEGVSSPAGRRMKVKDVSQYMIDAAKENPQLAQKLHDVLLESGVVAPRNLFSEVYSESMEATGEIKSVAESNDEKGKDFGTIQQGRNQSNLGPVRFLPPLPRPQSKAITHDLREHSGSGLGHLSEHCNIDGHSDSSHSETSTDYPRNVPVAVAAAAVVASSMVVAAAKSANSDSSTLELSAAAAAAVMATAAAVSRQFELDSLSNGDAGSGGLHGVDSGGERISDRSIGNESSKSDAAIDDVAECEILWEEITVAERIGLVAVKKFIDQDITGEALEEFRSEVRMMRRLRHPNIVLFMGAVTRPPNLSIVTEFLPRGSLYRLIHRPNNQLDERKRLRMALDAARGMNYLHSCNPVIVHRDLKSPNLLVDKNWVVKVCDFGLSRMKVSTYLSSKSTAGTAEWMAPEVLRNEPADEKCDVYSYGVILWELFTLQQPWGKMNPMQVVGAVGFQHRRLDIPEFVDPGIADIIRKCWQTDPRLRPSFGEIMDSLKQLQKPIQRAAVPSSSALTTDEQEQ

SEQ ID NO: 79314 - protein, 987 aa, Arabidopsis thaliana
  peptide (1)..(987): Ceres Seq. ID no. 12650826
  misc_feature (725)..(962): Pfam Name: Protein kinase domain Pfam Description: Protein kinase domain
  misc_feature (624)..(987): Homolog of NCBI NO: 32527767 NR Description: shoot regeneration-related mitogen activated
  misc_feature (55)..(429): Homolog of NCBI NO: 32527767 NR Description: shoot regeneration-related mitogen activated
  misc_feature (37)..(430): Homolog of NCBI NO: 22326737 NR Description: MAP3K delta-1 protein kinase; protein id: supported by cDNA: gi_18700074 [Arabidopsis thaliana]
  misc_feature (666)..(966): Homolog of NCBI NO: 22326737 NR Description: MAP3K delta-1 protein kinase; protein id: supported by cDNA: gi_18700074 [Arabidopsis thaliana]
  misc_feature (1)..(138): Homolog of NCBI NO: 32527767 NR Description: shoot regeneration-related mitogen activated
  misc_feature (150)..(545): Homolog of NCBI NO: 11358502 NR Description: MAP3K delta-1 protein kinase - Arabidopsis
  misc_feature (666)..(947): Homolog of NCBI NO: 11358502 NR Description: MAP3K delta-1 protein kinase - Arabidopsis
  misc_feature (24)..(396): Homolog of NCBI NO: 7489058 NR Description: probable protein kinase TCTR2 - tomato
  misc_feature (700)..(976): Homolog of NCBI NO: 7489058 NR Description: probable protein kinase TCTR2 - tomato
  misc_feature (66)..(438): Homolog of NCBI NO: 7488198 NR Description: probable serine/threonine-specific protein kinase
MKKFLKKLRITPNQRDDGEGSVSNRSNKSSDAEPSPSDSLRSQDNSEFKPFLGLSNWLSSVTHRKSPSSSNATNSKEDDTTMEHGGPVGSESGMQGLGSSSNSKDPEVEEEYQIQLALELSAREDPEAAQIEAMKQFSLGSRPSAPENTPAELMAYRYWNYNCLGYDDKIVDGFYDLCGVMNESSLKRIPPLVDLQGTLVSDGVTWDAVLVNSSKDSNLLRLEQMALDIAAKSKSASSSGFVNSELVRQLAVLVADYMGGPVLDPDSTLRAWWSLSYSLKATLRSMVLPLGSLTIGLARHRALLFKVLCDSVGVPCRIVKGQQYTGSDDVAMNSIKTDDGSCKLFSLTNPNVNFREYIVDLMGDPGTLIPADAAGLQMDFDDSVYSASPRDVDSSHVASSSSGVESSIEEHTESWSAEHRSRTKGSREENQSAGGGDLMIPNIREAVGSQKAPVQHLSSKPTHSFTHARSPSWTEGVSSPAGRRMKVKDVSQYMIDAAKENPQLAQKLHDVLLESGVVAPRNLFSEVYSESMEATGEIKSVAESNDEKGKDFGTIQQGRNQSNLGPVRFLPPLPRPQSKAITHDLREHSGSGLGHLSEHCNIDGHSDSSHSETSTDYPRNVPVAVAAAAVVASSMVVAAAKSANSDSSTLELSAAAAAAVMATAAAVSRQFELDSLSNGDAGSGGLHGVDSGGERISDRSIGNESSKSDAAIDDVAECEILWEEITVAERIGLVAVKKFIDQDITGEALEEFRSEVRMMRRLRHPNIVLFMGAVTRPPNLSIVTEFLPRGSLYRLIHRPNNQLDERKRLRMALDAARGMNYLHSCNPVIVHRDLKSPNLLVDKNWVVKVCDFGLSRMKVSTYLSSKSTAGTAEWMAPEVLRNEPADEKCDVYSYGVILWELFTLQQPWGKMNPMQVVGAVGFQHRRLDIPEFVDPGIADIIRKCWQTDPRLRPSFGEIMDSLKQLQKPIQRAAVPSSSALTTDEQEQ

SEQ ID NO: 79315 - DNA, 3495 bp, Arabidopsis thaliana
  misc_feature (1)..(3495): Ceres Seq. ID no. 12650857
  misc_feature: MA Experiment ID: 20000332 Result: Up-regulated in Transcription
  misc_feature: MA Experiment 20000332 PARAMETER Experiment Name: At_4deg_Cold_Sub_P Parameter: Age (day) Value: 14
  misc_feature: MA Experiment 20000332 PARAMETER Experiment Name: At_4deg_Cold_Sub_P Parameter: Organism Value: A. thaliana
  misc_feature: MA Experiment 20000332 PARAMETER Experiment Name: At_4deg_Cold_Sub_P Parameter: Plant Line Value: WS
  misc_feature: MA Experiment 20000332 PARAMETER Experiment Name: At_4deg_Cold_Sub_P Parameter: Temperature (deg C) Value: 4 vs. 22
  misc_feature: MA Experiment 20000332 PARAMETER Experiment Name: At_4deg_Cold_Sub_P Parameter: Timepoint (hr) Value: 2
  misc_feature: MA Experiment 20000332 PARAMETER Experiment Name: At_4deg_Cold_Sub_P Parameter: Tissue Value: Aerial
  misc_feature: MA Experiment ID: 20000347 Result: Down-regulated in Transcription
  misc_feature: MA Experiment 20000347 PARAMETER Experiment Name: At_2mM_SA_Sub_P Parameter: Age (day) Value: 14
  misc_feature: MA Experiment 20000347 PARAMETER Experiment Name: At_2mM_SA_Sub_P Parameter: Organism Value: A. thaliana
  misc_feature: MA Experiment 20000347 PARAMETER Experiment Name: At_2mM_SA_Sub_P Parameter: Plant Line Value: WS
  misc_feature: MA Experiment 20000347 PARAMETER Experiment Name: At_2mM_SA_Sub_P Parameter: Timepoint (hr) Value: 6
  misc_feature: MA Experiment 20000347 PARAMETER Experiment Name: At_2mM_SA_Sub_P Parameter: Tissue Value: Aerial
  misc_feature: MA Experiment 20000347 PARAMETER Experiment Name: At_2mM_SA_Sub_P Parameter: Treatment Value: 2mM SA vs. No Treatment
  misc_feature: MA Experiment ID: 20000349 Result: Down-regulated in Transcription
  misc_feature: MA Experiment 20000349 PARAMETER Experiment Name: At_100uM_ABA_Sub_P Parameter: Age (day) Value: 14
  misc_feature: MA Experiment 20000349 PARAMETER Experiment Name: At_100uM_ABA_Sub_P Parameter: Organism Value: A. thaliana
  misc_feature: MA Experiment 20000349 PARAMETER Experiment Name: At_100uM_ABA_Sub_P Parameter: Plant Line Value: WS
  misc_feature: MA Experiment 20000349 PARAMETER Experiment Name: At_100uM_ABA_Sub_P Parameter: Timepoint (hr) Value: 6
  misc_feature: MA Experiment 20000349 PARAMETER Experiment Name: At_100uM_ABA_Sub_P Parameter: Tissue Value: Aerial
  misc_feature: MA Experiment 20000349 PARAMETER Experiment Name: At_100uM_ABA_Sub_P Parameter: Treatment Value: 100uM ABA vs. No Treatment
  misc_feature: MA Experiment ID: 20000352 Result: Down-regulated in Transcription
  misc_feature: MA Experiment 20000352 PARAMETER Experiment Name: At_Drought_Sub_P Parameter: Age (day) Value: 7
  misc_feature: MA Experiment 20000352 PARAMETER Experiment Name: At_Drought_Sub_P Parameter: Organism Value: A. thaliana
  misc_feature: MA Experiment 20000352 PARAMETER Experiment Name: At_Drought_Sub_P Parameter: Plant Line Value: WS
  misc_feature: MA Experiment 20000352 PARAMETER Experiment Name: At_Drought_Sub_P Parameter: Timepoint (hr) Value: 6
  misc_feature: MA Experiment 20000352 PARAMETER Experiment Name: At_Drought_Sub_P Parameter: Tissue Value: Whole Plant
  misc_feature: MA Experiment 20000352 PARAMETER Experiment Name: At_Drought_Sub_P Parameter: Treatment Value: Drought vs. No Drought
  misc_feature: MA Experiment ID: 20000355 Result: Down-regulated in Transcription
  misc_feature: MA Experiment 20000355 PARAMETER Experiment Name: At_Siliques_Sub_P Parameter: Age (day) Value: 21
  misc_feature: MA Experiment 20000355 PARAMETER Experiment Name: At_Siliques_Sub_P Parameter: Organism Value: A. thaliana
  misc_feature: MA Experiment 20000355 PARAMETER Experiment Name: At_Siliques_Sub_P Parameter: Plant Line Value: WS
  misc_feature: MA Experiment 20000355 PARAMETER Experiment Name: At_Siliques_Sub_P Parameter: Tissue Value: Less Than 5mm Siliques vs. Whole Plant
atgtccatcttttttttcttcatcagcttcgtcgtcttctccgtcgctgacctcccgtcgtgcttctcagccgatcaacagtacgaggagtgtcgctcacgtaatctgacatgtggatctggacacagggtattcgagagtaccacgtatccgttctggggtggattcaataaacccaaattctgcggtcattcgtcattcaaactctcctgcgagggtgatcaaaacctaaccctagcgatcgggaacatcactcttcgcgttgtttctgcgaatctggaggatcataaaatttccgttgccgatgatagtctactagacggaggttgcctaaacatttggaacttcaacgggaagaatcagttcacattagactccaacaccgagacgatcgatgtattcgtcaactgttccggcgtagctccgttgcagatttcttgcgaagaaagctacgaggatccggtgacatatcatgtcttgcgatcgtcggattctgacgaaggttgtatgaaatatgcagaaattccgatgctgaggtctgctaaggacgagcttcaacggtccgaactaacttttgtggaagctttgagaaaaggattcgatttgaggtacatcatggaagacaaagcttgccggagatgcattgattccggtgggatttgtggttcggcgttagattcggagagtttccggtgtctatgtgcggacagacctcacaactcctcctgcgacgataacactaaccaagcaactcaaaccctctctcttgatccaaagttcaaggcttgtgagccgaaatcatgcggcaaaggtccccagatctcctatccattttatctatctggaaagcaagaatctttttgtggttatccaagttttgaactcacttgtgatgatgaagaaaagctccctgttctcgggatctccggtgaggaatatgtcatcaagaacatatcttacttaacacagtcgtttcaggtcgtgaactcaaaggcttctcatgatccatgtcccagaccgctgaacaatcttaccctccataggactcctttctttgtgaacccttctcatatcaacttcactatactttacaattgttccgatcacctgctggaggattttaggacataccctcttacttgtgctcgaaacacgagtcttcttcgatcttttggggtctttgacagaaagaaacttggaaaagagaaacaaattgcatccatgtcgtgccagaaactagtggatgttcctgttttagctagtaatgagtctgatgtgatgggtatgacttatgttgagattttgaagaggggttttgttctgaattggactgcaaacagttgcttccgctgcatcaccagcggcgggagatgtggaactgatcaacaagaattcgtatgcttgtgtcctgatggacctaaacttcatgatacttgcacgaatggcaaaaatgataaaagaaggagagtgatagtgaagattacaaaatccatctcaggtgcatccgctgcggtcgtaggattaatagctgcgagcatattttggtatgtataccatcgtagaaaaacaaaaagttacagaaattcttcagcattgcttccaagaaacatctcatcagatccatctgcaaagtcttttgacatcgagaaagcagaggaattattagtcggagttcatattttctcttacgaagaacttgaagaagccactaataacttcgacccatctaaagaactcggtgatggaggctttggtactgtctattacggtaagcttaaagatggacgaagcgtagccgttaaacggttatacgataacaacttcaaaagagcagagcaattcaggaatgaagttgagatcttaacgggtttacgccatccaaacctcgtggctctctttggatgctcctcaaaacagagccgggacttactgctagtgtatgagtatgttgcaaacggcacgttagctgatcatctacatggtccacaggcaaaccctagctcacttccttggtctattcggctcaaaatcgctgttgaaactgcctctgccttgaagtatctccacgcctccaagatcatccaccgtgatgttaaatccaacaacatccttctcgaccaaaacttcaatgtcaaggttgcggattttggactctctagactgtttcctatggataaaacgcacgtatctaccgctccacaaggaactccgggatatgtcgacccggattaccacttatgctatcaactctcaaacaaaagcgacgtgtacagctttgcggtagtgttaatggagcttatctcttcacttccagcagtcgacatcacaagaccgcgccaagagatcaacctctcgaacatggcagtcgttaaaatccagaaccacgagctccgcgacatggtggatccgtcacttgggtttgacacggatacaagagtgagacagacggtgatcgctgtcgctgagctggcgttccaatgcttgcagtcggataaagatcttaggccatgtatgtcgcacgtgcaggatacgttgacgaggatacagaacaatggatttggttcggaaatggatgttgtagatgtgaacaagagtggaccgttggttgcacagtctccagatagtgtcattgtgaaatgggacaagagggaccgtaacatacaaaacttcgtgattgggcctgaccggactaaatcagcaattttgtattgctatttgctgccaactgaaactatttttttattagtgacaatagccatggatatatattcttccataactcaagctgcagatctaaacaacaacaacagtaaccttcattttcaaacatttcatccttcctctacttctctcgaatcgctcttccttcatcatcatcaacaacaattacttcactttcccggaaactctccagacagtagtaacaatttctcttcaacttcaagtttcctccatagtgatcacaacatcgtcgatgagaccaagaagagaaaagctttgttacctactttgtcttcatcagagactagcggcgtctccgataatacgaatgttattgccactgaaacaggttctttgagaagaggtaagaggttgaagaagaagaaggaagaagaagacgagaaagagagagaagttgttcatgtgagagccagaagaggccaagccactgatagccacagcttagcagaacgggttcggcgagggaaaataaacgagagattaagatgcttgcaagatatggtgcccggatgttataaggctatgggaatggctacgatgcttgacgagataattaattatgtccagtctctacagaatcaagtcgagttcctctcgatgaaactcactgcagcaagttcgttttatgactttaactcagagacagatgcagttgattccatgcagagagcaaaggcacgtgagacagtggagatggggagacaaacaagagatgggagtcctgtcttccatttatcaacatggtccctttga

SEQ ID NO: 79316 - protein, 1164 aa, Arabidopsis thaliana
  peptide (1)..(1164): Ceres Seq. ID no. 12650858
  misc_feature (573)..(768): Pfam Name: Protein kinase domain Pfam Description: Protein kinase domain
  misc_feature (1)..(249): Homolog of NCBI NO: 15221762 NR Description: hypothetical protein; protein id: At1g18380.1
  misc_feature (1)..(866): Homolog of NCBI NO: 25404646 NR Description: probable wall-associated kinase T4O24.5
  misc_feature (50)..(866): Homolog of NCBI NO: 12597754 NR Description: protein kinase, putative [Arabidopsis thaliana]
  misc_feature (1)..(242): Homolog of NCBI NO: 20258804 NR Description: unknown protein [Arabidopsis thaliana]
  misc_feature (917)..(1164): Homolog of NCBI NO: 30685840 NR Description: helix-loop-helix protein homolog -related thaliana] >gi|26449635|dbj|BAC41942.1| putative bHLH factor bHLH044 [Arabidopsis thaliana] >gi|28950817|gb|AAO63332.1|
  misc_feature (557)..(863): Homolog of NCBI NO: 10177797 NR Description: contains similarity to protein
  misc_feature (25)..(243): Homolog of NCBI NO: 10177797 NR Description: contains similarity to protein
  misc_feature (286)..(883): Homolog of NCBI NO: 34911340 NR Description: P0034C09.1 [Oryza sativa (japonica
  misc_feature (263)..(866): Homolog of NCBI NO: 24417464 NR Description: unknown [Arabidopsis thaliana]
  misc_feature (262)..(880): Homolog of NCBI NO: 15408730 NR Description: P0443D08.12 [Oryza sativa (japonica
MSIFFFFISFVVFSVADLPSCFSADQQYEECRSRNLTCGSGHRVFESTTYPFWGGFNKPKFCGHSSFKLSCEGDQNLTLAIGNITLRVVSANLEDHKISVADDSLLDGGCLNIWNFNGKNQFTLDSNTETIDVFVNCSGVAPLQISCEESYEDPVTYHVLRSSDSDEGCMKYAEIPMLRSAKDELQRSELTFVEALRKGFDLRYIMEDKACRRCIDSGGICGSALDSESFRCLCADRPHNSSCDDNTNQATQTLSLDPKFKACEPKSCGKGPQISYPFYLSGKQESFCGYPSFELTCDDEEKLPVLGISGEEYVIKNISYLTQSFQVVNSKASHDPCPRPLNNLTLHRTPFFVNPSHINFTILYNCSDHLLEDFRTYPLTCARNTSLLRSFGVFDRKKLGKEKQIASMSCQKLVDVPVLASNESDVMGMTYVEILKRGFVLNWTANSCFRCITSGGRCGTDQQEFVCLCPDGPKLHDTCTNGKNDKRRRVIVKITKSISGASAAVVGLIAASIFWYVYHRRKTKSYRNSSALLPRNISSDPSAKSFDIEKAEELLVGVHIFSYEELEEATNNFDPSKELGDGGFGTVYYGKLKDGRSVAVKRLYDNNFKRAEQFRNEVEILTGLRHPNLVALFGCSSKQSRDLLLVYEYVANGTLADHLHGPQANPSSLPWSIRLKIAVETASALKYLHASKIIHRDVKSNNILLDQNFNVKVADFGLSRLFPMDKTHVSTAPQGTPGYVDPDYHLCYQLSNKSDVYSFAVVLMELISSLPAVDITRPRQEINLSNMAVVKIQNHELRDMVDPSLGFDTDTRVRQTVIAVAELAFQCLQSDKDLRPCMSHVQDTLTRIQNNGFGSEMDVVDVNKSGPLVAQSPDSVIVKWDKRDRNIQNFVIGPDRTKSAILYCYLLPTETIFLLVTIAMDIYSSITQAADLNNNNSNLHFQTFHPSSTSLESLFLHHHQQQLLHFPGNSPDSSNNFSSTSSFLHSDHNIVDETKKRKALLPTLSSSETSGVSDNTNVIATETGSLRRGKRLKKKKEEEDEKEREVVHVRARRGQATDSHSLAERVRRGKINERLRCLQDMVPGCYKAMGMATMLDEIINYVQSLQNQVEFLSMKLTAASSFYDFNSETDAVDSMQRAKARETVEMGRQTRDGSPVFHLSTWSL

SEQ ID NO: 79317 - protein, 995 aa, Arabidopsis thaliana
  peptide (1)..(995): Ceres Seq. ID no. 12650859
  misc_feature (404)..(599): Pfam Name: Protein kinase domain Pfam Description: Protein kinase domain
  misc_feature (1)..(80): Homolog of NCBI NO: 15221762 NR Description: hypothetical protein; protein id: At1g18380.1
  misc_feature (1)..(697): Homolog of NCBI NO: 25404646 NR Description: probable wall-associated kinase T4O24.5
  misc_feature (1)..(697): Homolog of NCBI NO: 12597754 NR Description: protein kinase, putative [Arabidopsis thaliana]
  misc_feature (1)..(73): Homolog of NCBI NO: 20258804 NR Description: unknown protein [Arabidopsis thaliana]
  misc_feature (748)..(995): Homolog of NCBI NO: 30685840 NR Description: helix-loop-helix protein homolog -related thaliana] >gi|26449635|dbj|BAC41942.1| putative bHLH factor bHLH044 [Arabidopsis thaliana] >gi|28950817|gb|AAO63332.1|
  misc_feature (388)..(694): Homolog of NCBI NO: 10177797 NR Description: contains similarity to protein
  misc_feature (1)..(74): Homolog of NCBI NO: 10177797 NR Description: contains similarity to protein
  misc_feature (117)..(714): Homolog of NCBI NO: 34911340 NR Description: P0034C09.1 [Oryza sativa (japonica
  misc_feature (94)..(697): Homolog of NCBI NO: 24417464 NR Description: unknown [Arabidopsis thaliana]
  misc_feature (93)..(711): Homolog of NCBI NO: 15408730 NR Description: P0443D08.12 [Oryza sativa (japonica
MKYAEIPMLRSAKDELQRSELTFVEALRKGFDLRYIMEDKACRRCIDSGGICGSALDSESFRCLCADRPHNSSCDDNTNQATQTLSLDPKFKACEPKSCGKGPQISYPFYLSGKQESFCGYPSFELTCDDEEKLPVLGISGEEYVIKNISYLTQSFQVVNSKASHDPCPRPLNNLTLHRTPFFVNPSHINFTILYNCSDHLLEDFRTYPLTCARNTSLLRSFGVFDRKKLGKEKQIASMSCQKLVDVPVLASNESDVMGMTYVEILKRGFVLNWTANSCFRCITSGGRCGTDQQEFVCLCPDGPKLHDTCTNGKNDKRRRVIVKITKSISGASAAVVGLIAASIFWYVYHRRKTKSYRNSSALLPRNISSDPSAKSFDIEKAEELLVGVHIFSYEELEEATNNFDPSKELGDGGFGTVYYGKLKDGRSVAVKRLYDNNFKRAEQFRNEVEILTGLRHPNLVALFGCSSKQSRDLLLVYEYVANGTLADHLHGPQANPSSLPWSIRLKIAVETASALKYLHASKIIHRDVKSNNILLDQNFNVKVADFGLSRLFPMDKTHVSTAPQGTPGYVDPDYHLCYQLSNKSDVYSFAVVLMELISSLPAVDITRPRQEINLSNMAVVKIQNHELRDMVDPSLGFDTDTRVRQTVIAVAELAFQCLQSDKDLRPCMSHVQDTLTRIQNNGFGSEMDVVDVNKSGPLVAQSPDSVIVKWDKRDRNIQNFVIGPDRTKSAILYCYLLPTETIFLLVTIAMDIYSSITQAADLNNNNSNLHFQTFHPSSTSLESLFLHHHQQQLLHFPGNSPDSSNNFSSTSSFLHSDHNIVDETKKRKALLPTLSSSETSGVSDNTNVIATETGSLRRGKRLKKKKEEEDEKEREVVHVRARRGQATDSHSLAERVRRGKINERLRCLQDMVPGCYKAMGMATMLDEIINYVQSLQNQVEFLSMKLTAASSFYDFNSETDAVDSMQRAKARETVEMGRQTRDGSPVFHLSTWSL

SEQ ID NO: 79318 - protein, 988 aa, Arabidopsis thaliana
  peptide (1)..(988): Ceres Seq. ID no. 12650860
  misc_feature (397)..(592): Pfam Name: Protein kinase domain Pfam Description: Protein kinase domain
  misc_feature (1)..(73): Homolog of NCBI NO: 15221762 NR Description: hypothetical protein; protein id: At1g18380.1
  misc_feature (1)..(690): Homolog of NCBI NO: 25404646 NR Description: probable wall-associated kinase T4O24.5
  misc_feature (1)..(690): Homolog of NCBI NO: 12597754 NR Description: protein kinase, putative [Arabidopsis thaliana]
  misc_feature (1)..(66): Homolog of NCBI NO: 20258804 NR Description: unknown protein [Arabidopsis thaliana]
  misc_feature (741)..(988): Homolog of NCBI NO: 30685840 NR Description: helix-loop-helix protein homolog -related thaliana] >gi|26449635|dbj|BAC41942.1| putative bHLH factor bHLH044 [Arabidopsis thaliana] >gi|28950817|gb|AAO63332.1|
  misc_feature (381)..(687): Homolog of NCBI NO: 10177797 NR Description: contains similarity to protein
  misc_feature (1)..(67): Homolog of NCBI NO: 10177797 NR Description: contains similarity to protein
  misc_feature (110)..(707): Homolog of NCBI NO: 34911340 NR Description: P0034C09.1 [Oryza sativa (japonica
  misc_feature (87)..(690): Homolog of NCBI NO: 24417464 NR Description: unknown [Arabidopsis thaliana]
  misc_feature (86)..(704): Homolog of NCBI NO: 15408730 NR Description: P0443D08.12 [Oryza sativa (japonica
MLRSAKDELQRSELTFVEALRKGFDLRYIMEDKACRRCIDSGGICGSALDSESFRCLCADRPHNSSCDDNTNQATQTLSLDPKFKACEPKSCGKGPQISYPFYLSGKQESFCGYPSFELTCDDEEKLPVLGISGEEYVIKNISYLTQSFQVVNSKASHDPCPRPLNNLTLHRTPFFVNPSHINFTILYNCSDHLLEDFRTYPLTCARNTSLLRSFGVFDRKKLGKEKQIASMSCQKLVDVPVLASNESDVMGMTYVEILKRGFVLNWTANSCFRCITSGGRCGTDQQEFVCLCPDGPKLHDTCTNGKNDKRRRVIVKITKSISGASAAVVGLIAASIFWYVYHRRKTKSYRNSSALLPRNISSDPSAKSFDIEKAEELLVGVHIFSYEELEEATNNFDPSKELGDGGFGTVYYGKLKDGRSVAVKRLYDNNFKRAEQFRNEVEILTGLRHPNLVALFGCSSKQSRDLLLVYEYVANGTLADHLHGPQANPSSLPWSIRLKIAVETASALKYLHASKIIHRDVKSNNILLDQNFNVKVADFGLSRLFPMDKTHVSTAPQGTPGYVDPDYHLCYQLSNKSDVYSFAVVLMELISSLPAVDITRPRQEINLSNMAVVKIQNHELRDMVDPSLGFDTDTRVRQTVIAVAELAFQCLQSDKDLRPCMSHVQDTLTRIQNNGFGSEMDVVDVNKSGPLVAQSPDSVIVKWDKRDRNIQNFVIGPDRTKSAILYCYLLPTETIFLLVTIAMDIYSSITQAADLNNNNSNLHFQTFHPSSTSLESLFLHHHQQQLLHFPGNSPDSSNNFSSTSSFLHSDHNIVDETKKRKALLPTLSSSETSGVSDNTNVIATETGSLRRGKRLKKKKEEEDEKEREVVHVRARRGQATDSHSLAERVRRGKINERLRCLQDMVPGCYKAMGMATMLDEIINYVQSLQNQVEFLSMKLTAASSFYDFNSETDAVDSMQRAKARETVEMGRQTRDGSPVFHLSTWSL

SEQ ID NO: 79319 - DNA, 5109 bp, Arabidopsis thaliana
  misc_feature (1)..(5109): Ceres Seq. ID no. 12650865
  misc_feature: MA Experiment ID: 20000307 Result: Up-regulated in Transcription
  misc_feature: MA Experiment 20000307 PARAMETER Experiment Name: At_Germinating_Seeds_Sub_P Parameter: Age (hr) Value: 24 vs. 0
  misc_feature: MA Experiment 20000307 PARAMETER Experiment Name: At_Germinating_Seeds_Sub_P Parameter: Organism Value: A. thaliana
  misc_feature: MA Experiment 20000307 PARAMETER Experiment Name: At_Germinating_Seeds_Sub_P Parameter: Plant Line Value: WS
  misc_feature: MA Experiment 20000307 PARAMETER Experiment Name: At_Germinating_Seeds_Sub_P Parameter: Tissue Value: Germinating Seeds
  misc_feature: MA Experiment ID: 20000315 Result: Down-regulated in Transcription
  misc_feature: MA Experiment 20000315 PARAMETER Experiment Name: At_14day_Shoots-Roots_Sub_P Parameter: Age (day) Value: 14
  misc_feature: MA Experiment 20000315 PARAMETER Experiment Name: At_14day_Shoots-Roots_Sub_P Parameter: Organism Value: A. thaliana
  misc_feature: MA Experiment 20000315 PARAMETER Experiment Name: At_14day_Shoots-Roots_Sub_P Parameter: Plant Line Value: WS
  misc_feature: MA Experiment 20000315 PARAMETER Experiment Name: At_14day_Shoots-Roots_Sub_P Parameter: Tissue Value: Shoots vs. Whole Plant
atgtcaagcagagaaaaccctagcggaatctgcaaaagcattcccaagctcatctcttccttcgtcgacactttcgttgattactccgtctccggcatcttcctgccccaagatcctagctcacaaaatgagattctgcaaacgaggttcgagaagccggagcgactcgttgcaatcggtgatctccatggcgatctcgagaagtctagagaagcattcaagatcgctggtctgattgattcgtcggacagatggactggtggatcaacgatggttgttcaggtgggcgacgtactagatcgaggtggagaggagttgaagatactttatttcttagagaaattgaaacgagaggctgagagagctggaggtaagattctgactatgaatgggaaccatgagatcatgaatatagaaggtgactttagatatgtgactaagaaaggtttagaggaatttcagatttgggctgattggtattgtttagggaacaagatgaagactttatgcagtggtcttgataaacctaaggatccttacgaagggattccgatgagcttccctcgtatgagagccgactgttttgaaggaattagagctaggattgctgcattgagacctgatggtccgattgcaaagagattcttgactaagaatcaaacagttgctgttgttggtgattcggtttttgttcacggtggtcttttagctgagcatatagagtatggactggagaggattaacgaggaggttcggggttggattaacgggtttaaaggaggaagatatgcgcctgcttattgtagaggagggaactctgtagtttggttgaggaagttctcggaagaaatggctcacaaatgtgattgtgcagctcttgagcatgctctttccactattcccggggttaagaggatgatcatgggacatacaatccaggatgctggtatcaacggtgtttgtaatgataaagccattaggattgatgttggcatgtccaagggatgtgctgatggattgcctgaggttttggagatccgcagggactccggtgaagcttatcttatggcttctgttttgcttccattgccacaagtatttgttttgtttgattatcgcaggagccgtaaagagtcaagctttccccgcgccgtctacaattccaattccatttcttctaattcaaccaatgccaatcatttccttcgccggatttctaacttctgtgaaaccggagacctcgacaagtcctttcgaactgtccaagaattcgttggcgatgacgagagctcgtccgatgcgtttcttcttgtccgagaagctcttgggcttctcttacaagcttctgggaagagaaaagacattgaaatgggaagaaagatccaccagctggtttctgggtcgacccggttaaggaatgatgacgttctctgtactcgtattatcaccatgtacgctatgtgtggctctcctgatgattctcggtttgtgtttgatgccttgcggagtaagaatctcttccagtggaatgctgttatcagctcttactcaagaaacgagctttacgatgaagtattagagacgtttatcgagatgatctcaacgactgatcttttaccggatcatttcacttatccatgtgtgattaaggcttgtgctgggatgtctgatgttgggatcgggcttgcggttcatgggttggtggtgaagaccggattggtggaagatgtttttgtgggtaatgcattggtgtctttctatggaactcatggttttgttactgatgccttgcaactgttcgatataatgcctgagagaaatttggtttcctggaactccatgattcgagtgttctcggataatggtttctcagaagaaagcttcttgcttcttggagaaatgatggaggaaaatggtgatggtgcgtttatgccggatgttgctacacttgttactgtgttgccggtttgtgcaagagaaagagaaatagggttgggaaaaggtgttcatgggtgggcggtgaaattgaggttggacaaggaactagtccttaacaatgccttaatggacatgtactccaaatgcggttgcattactaatgcacaaatgatctttaagatgaacaataacaagaatgtggtttcttggaacacaatggtaggaggtttttcagcagagggtgatacacatgggacgtttgatgttctgagacagatgctggcaggaggcgaagatgtcaaagcggacgaggtaaccattctaaatgcagtgcctgtttgtttccatgaatcattcttaccgagtttaaaggaacttcattgttactccttaaaacaagagtttgtatacaatgagttagtagccaatgcctttgtggcttcttatgcaaagtgtggctcactgagttatgcccagcgtgtgtttcatggtataaggagtaaaacagtgaactcttggaatgctttgattggcggccatgctcagagcaatgatccgagattgtccttggatgctcatttgcagatgaaaatttctggattgctacctgatagttttactgtctgtagtcttctttcagcttgttctaaactaaaatccctgcggttgggaaaggaagtgcatgggtttataatccgaaattggttagaaagagatttgtttgtttatttatcagtactctcattatacattcattgtggggagctatgcactgtacaagcattatttgatgcaatggaagataaaagcttagtatcttggaatactgtaatcaccggttaccttcagaatggatttcctgatagagctttgggcgtctttagacaaatggttttgtatggaatccagctttgtgggatttctatgatgcctgtgtttggtgcgtgttcgctgctaccttctcttcgactggggagagaagcgcatgcttatgctttgaagcacctcctggaggacgatgcgtttattgcatgttctttaattgatatgtatgccaagaatggttctataacacaatcatctaaggttttcaatggcttgaaggagaaaagcacggcatcttggaatgccatgataatgggatatggaatacatggcctagcaaaagaggctataaaactctttgaagagatgcaaagaacaggtcataaccctgatgacctaactttcttaggtgttctaacggcttgcaaccatagtggtctgatccatgaagggctgagatatctggatcaaatgaagtcttcttttgggctaaagccaaatttaaagcattatgcttgtgtcattgacatgttaggccgagctgggcaactagacaaggctctaagggttgttgcagaagagatgtctgaggaagctgacgttggaatttggaagtctctgctcagctcatgcagaatccatcaaaatctggaaatgggagagaaagttgctgctaagttattcgaattagaaccagaaaagcctgagaattatgttctgctttccaacttatatgcaggattggggaaatgggaagacgtgagaaaagtgagacagagaatgaacgagatgagtttacgaaaggatgctggatgctcttggatcgaactaaacaggaaggtatttagctttgttgtcggtgaaagattcttagatggttttgaggaaatcaaaagtctttggagtatattggagatgaagatatcgaagatgggatacagaccagacacaatgtcagtacaacatgatctaagtgaagaggagaagattgaacagttaaggggacacagcgagaagcttgcccttacctacgggttgattaaaacttcagaaggaacaactattagagtttacaagaacctaaggatctgtgtggactgtcacaatgcagcaaagttgatctccaaggtcatggaaagggaaatagttgtgagggacaacaaaaggtttcatcatttcaagaatggggaagagaagcaagacgcaatgaagagttcaatgagcatcattgtcttcttgtttgtgaccatcttcaccatctctgcttcttccttgaaccctgaggaaacttgcatacaaagaaacatcaaccggtcacaacctccaagctcttcactcgaacccaagacatcaaagttcgactttcttgtggacaagttgtgcagagacatggctcgtgccgtcatgttctctgtgaggataaccggaaaattcccatctcactatgtgaaggcgatgtgtaatgtgtttggaaatgacgagaagaaagtgaaagagtatgttgtgaagaaatggttgggaggtgaaaaggttttgtcgaatctcgttagcaagaaagacatttacatggcgtcgaggaatcaggagaaatctcccaaagtgcaagagctttacgacctctgcaaagagactttcactggcaaagctccttctcctgcttccatggctatccaaaagctatgctctgtgttggactcagttagtcctgcagatgttgggcttgaagaggtatctcaagacgatgatcgaggctatggagtttctggggttagccgtttcaatagagtaggacgatgggcacaaccgataacattcttagacattcatgaatgtgatacttttacaatgtgtattttctgcttcccaacgtcttcagtgatcccattgcatgatcatccagagatggctgtgtttagtaaaatcctctatggatcacttcatgttaaagcttacgattgggtcgaacctccatgtattatcacacaagataaaggcgtccccggttctcttccagcaaggttggcgaaattggtgagtgacaaagttataacgcctcagtctgagataccggcgttgtacccaaagactggaggcaatctccattgcttcactgcgttgactccatgtgctgtgctcgacattctctcacctccttacaaagaaagtgttggcaggagttgcagttactacatggactatccgttttccactttcgcattggagaacggaatgaagaaggtggatgaaggaaaggaagacgaatacgcatggcttgtacagattgacacgcccgatgatcttcacatgcgtcccggatcatatactggtccaactatcagagtctag

SEQ ID NO: 79320 - protein, 1702 aa, Arabidopsis thaliana
  peptide (1)..(1702): Ceres Seq. ID no. 12650866
  misc_feature (54)..(314): Pfam Name: Calcineurin-like phosphoesterase Pfam Description: Calcineurin-like phosphoesterase
  misc_feature (1)..(351): Homolog of NCBI NO: 18394613 NR Description: Expressed protein; protein id: At1g18480.1, by cDNA: 107675., supported by cDNA: gi_16226289 [Arabidopsis >gi|16226290|gb|AAL16125.1|AF428293_1 At1g18480/F15H18_1
  misc_feature (1)..(351): Homolog of NCBI NO: 21536655 NR Description: unknown [Arabidopsis thaliana]
  misc_feature (557)..(1317): Homolog of NCBI NO: 25354624 NR Description: protein F3O9.28 [imported] - Arabidopsis thaliana
  misc_feature (458)..(626): Homolog of NCBI NO: 25354624 NR Description: protein F3O9.28 [imported] - Arabidopsis thaliana
  misc_feature (1429)..(1702): Homolog of NCBI NO: 18394617 NR Description: expressed protein; protein id: At1g18490.1,
  misc_feature (486)..(1317): Homolog of NCBI NO: 30694644 NR Description: pentatricopeptide (PPR) repeat-containing protein
  misc_feature (486)..(1317): Homolog of NCBI NO: 30794008 NR Description: unknown protein [Arabidopsis thaliana]
  misc_feature (445)..(1317): Homolog of NCBI NO: 15219258 NR Description: hypothetical protein; protein id: At1g16480.1
  misc_feature (459)..(1317): Homolog of NCBI NO: 15228590 NR Description: hypothetical protein; protein id: At3g03580.1 thaliana] >gi|6091764|gb|AAF03474.1|AC009327_13 hypothetical [Arabidopsis thaliana] >gi|28393735|gb|AAO42278.1| unknown
  misc_feature (540)..(1317): Homolog of NCBI NO: 11281371 NR Description: hypothetical protein T8H10.30 - Arabidopsis >gi|6706414|emb|CAB66100.1| putative protein [Arabidopsis
MSSRENPSGICKSIPKLISSFVDTFVDYSVSGIFLPQDPSSQNEILQTRFEKPERLVAIGDLHGDLEKSREAFKIAGLIDSSDRWTGGSTMVVQVGDVLDRGGEELKILYFLEKLKREAERAGGKILTMNGNHEIMNIEGDFRYVTKKGLEEFQIWADWYCLGNKMKTLCSGLDKPKDPYEGIPMSFPRMRADCFEGIRARIAALRPDGPIAKRFLTKNQTVAVVGDSVFVHGGLLAEHIEYGLERINEEVRGWINGFKGGRYAPAYCRGGNSVVWLRKFSEEMAHKCDCAALEHALSTIPGVKRMIMGHTIQDAGINGVCNDKAIRIDVGMSKGCADGLPEVLEIRRDSGEAYLMASVLLPLPQVFVLFDYRRSRKESSFPRAVYNSNSISSNSTNANHFLRRISNFCETGDLDKSFRTVQEFVGDDESSSDAFLLVREALGLLLQASGKRKDIEMGRKIHQLVSGSTRLRNDDVLCTRIITMYAMCGSPDDSRFVFDALRSKNLFQWNAVISSYSRNELYDEVLETFIEMISTTDLLPDHFTYPCVIKACAGMSDVGIGLAVHGLVVKTGLVEDVFVGNALVSFYGTHGFVTDALQLFDIMPERNLVSWNSMIRVFSDNGFSEESFLLLGEMMEENGDGAFMPDVATLVTVLPVCAREREIGLGKGVHGWAVKLRLDKELVLNNALMDMYSKCGCITNAQMIFKMNNNKNVVSWNTMVGGFSAEGDTHGTFDVLRQMLAGGEDVKADEVTILNAVPVCFHESFLPSLKELHCYSLKQEFVYNELVANAFVASYAKCGSLSYAQRVFHGIRSKTVNSWNALIGGHAQSNDPRLSLDAHLQMKISGLLPDSFTVCSLLSACSKLKSLRLGKEVHGFIIRNWLERDLFVYLSVLSLYIHCGELCTVQALFDAMEDKSLVSWNTVITGYLQNGFPDRALGVFRQMVLYGIQLCGISMMPVFGACSLLPSLRLGREAHAYALKHLLEDDAFIACSLIDMYAKNGSITQSSKVFNGLKEKSTASWNAMIMGYGIHGLAKEAIKLFEEMQRTGHNPDDLTFLGVLTACNHSGLIHEGLRYLDQMKSSFGLKPNLKHYACVIDMLGRAGQLDKALRVVAEEMSEEADVGIWKSLLSSCRIHQNLEMGEKVAAKLFELEPEKPENYVLLSNLYAGLGKWEDVRKVRQRMNEMSLRKDAGCSWIELNRKVFSFVVGERFLDGFEEIKSLWSILEMKISKMGYRPDTMSVQHDLSEEEKIEQLRGHSEKLALTYGLIKTSEGTTIRVYKNLRICVDCHNAAKLISKVMEREIVVRDNKRFHHFKNGEEKQDAMKSSMSIIVFLFVTIFTISASSLNPEETCIQRNINRSQPPSSSLEPKTSKFDFLVDKLCRDMARAVMFSVRITGKFPSHYVKAMCNVFGNDEKKVKEYVVKKWLGGEKVLSNLVSKKDIYMASRNQEKSPKVQELYDLCKETFTGKAPSPASMAIQKLCSVLDSVSPADVGLEEVSQDDDRGYGVSGVSRFNRVGRWAQPITFLDIHECDTFTMCIFCFPTSSVIPLHDHPEMAVFSKILYGSLHVKAYDWVEPPCIITQDKGVPGSLPARLAKLVSDKVITPQSEIPALYPKTGGNLHCFTALTPCAVLDILSPPYKESVGRSCSYYMDYPFSTFALENGMKKVDEGKEDEYAWLVQIDTPDDLHMRPGSYTGPTIRV

SEQ ID NO: 79321 - protein, 1612 aa, Arabidopsis thaliana
  peptide (1)..(1612): Ceres Seq. ID no. 12650867
  misc_feature (1)..(224): Pfam Name: Calcineurin-like phosphoesterase Pfam Description: Calcineurin-like phosphoesterase
  misc_feature (1)..(261): Homolog of NCBI NO: 18394613 NR Description: Expressed protein; protein id: At1g18480.1, by cDNA: 107675., supported by cDNA: gi_16226289 [Arabidopsis >gi|16226290|gb|AAL16125.1|AF428293_1 At1g18480/F15H18_1
  misc_feature (1)..(261): Homolog of NCBI NO: 21536655 NR Description: unknown [Arabidopsis thaliana]
  misc_feature (467)..(1227): Homolog of NCBI NO: 25354624 NR Description: protein F3O9.28 [imported] - Arabidopsis thaliana
  misc_feature (368)..(536): Homolog of NCBI NO: 25354624 NR Description: protein F3O9.28 [imported] - Arabidopsis thaliana
  misc_feature (1339)..(1612): Homolog of NCBI NO: 18394617 NR Description: expressed protein; protein id: At1g18490.1,
  misc_feature (396)..(1227): Homolog of NCBI NO: 30694644 NR Description: pentatricopeptide (PPR) repeat-containing protein
  misc_feature (396)..(1227): Homolog of NCBI NO: 30794008 NR Description: unknown protein [Arabidopsis thaliana]
  misc_feature (355)..(1227): Homolog of NCBI NO: 15219258 NR Description: hypothetical protein; protein id: At1g16480.1
  misc_feature (369)..(1227): Homolog of NCBI NO: 15228590 NR Description: hypothetical protein; protein id: At3g03580.1 thaliana] >gi|6091764|gb|AAF03474.1|AC009327_13 hypothetical [Arabidopsis thaliana] >gi|28393735|gb|AAO42278.1| unknown
  misc_feature (450)..(1227): Homolog of NCBI NO: 11281371 NR Description: hypothetical protein T8H10.30 - Arabidopsis >gi|6706414|emb|CAB66100.1| putative protein [Arabidopsis
MVVQVGDVLDRGGEELKILYFLEKLKREAERAGGKILTMNGNHEIMNIEGDFRYVTKKGLEEFQIWADWYCLGNKMKTLCSGLDKPKDPYEGIPMSFPRMRADCFEGIRARIAALRPDGPIAKRFLTKNQTVAVVGDSVFVHGGLLAEHIEYGLERINEEVRGWINGFKGGRYAPAYCRGGNSVVWLRKFSEEMAHKCDCAALEHALSTIPGVKRMIMGHTIQDAGINGVCNDKAIRIDVGMSKGCADGLPEVLEIRRDSGEAYLMASVLLPLPQVFVLFDYRRSRKESSFPRAVYNSNSISSNSTNANHFLRRISNFCETGDLDKSFRTVQEFVGDDESSSDAFLLVREALGLLLQASGKRKDIEMGRKIHQLVSGSTRLRNDDVLCTRIITMYAMCGSPDDSRFVFDALRSKNLFQWNAVISSYSRNELYDEVLETFIEMISTTDLLPDHFTYPCVIKACAGMSDVGIGLAVHGLVVKTGLVEDVFVGNALVSFYGTHGFVTDALQLFDIMPERNLVSWNSMIRVFSDNGFSEESFLLLGEMMEENGDGAFMPDVATLVTVLPVCAREREIGLGKGVHGWAVKLRLDKELVLNNALMDMYSKCGCITNAQMIFKMNNNKNVVSWNTMVGGFSAEGDTHGTFDVLRQMLAGGEDVKADEVTILNAVPVCFHESFLPSLKELHCYSLKQEFVYNELVANAFVASYAKCGSLSYAQRVFHGIRSKTVNSWNALIGGHAQSNDPRLSLDAHLQMKISGLLPDSFTVCSLLSACSKLKSLRLGKEVHGFIIRNWLERDLFVYLSVLSLYIHCGELCTVQALFDAMEDKSLVSWNTVITGYLQNGFPDRALGVFRQMVLYGIQLCGISMMPVFGACSLLPSLRLGREAHAYALKHLLEDDAFIACSLIDMYAKNGSITQSSKVFNGLKEKSTASWNAMIMGYGIHGLAKEAIKLFEEMQRTGHNPDDLTFLGVLTACNHSGLIHEGLRYLDQMKSSFGLKPNLKHYACVIDMLGRAGQLDKALRVVAEEMSEEADVGIWKSLLSSCRIHQNLEMGEKVAAKLFELEPEKPENYVLLSNLYAGLGKWEDVRKVRQRMNEMSLRKDAGCSWIELNRKVFSFVVGERFLDGFEEIKSLWSILEMKISKMGYRPDTMSVQHDLSEEEKIEQLRGHSEKLALTYGLIKTSEGTTIRVYKNLRICVDCHNAAKLISKVMEREIVVRDNKRFHHFKNGEEKQDAMKSSMSIIVFLFVTIFTISASSLNPEETCIQRNINRSQPPSSSLEPKTSKFDFLVDKLCRDMARAVMFSVRITGKFPSHYVKAMCNVFGNDEKKVKEYVVKKWLGGEKVLSNLVSKKDIYMASRNQEKSPKVQELYDLCKETFTGKAPSPASMAIQKLCSVLDSVSPADVGLEEVSQDDDRGYGVSGVSRFNRVGRWAQPITFLDIHECDTFTMCIFCFPTSSVIPLHDHPEMAVFSKILYGSLHVKAYDWVEPPCIITQDKGVPGSLPARLAKLVSDKVITPQSEIPALYPKTGGNLHCFTALTPCAVLDILSPPYKESVGRSCSYYMDYPFSTFALENGMKKVDEGKEDEYAWLVQIDTPDDLHMRPGSYTGPTIRV

SEQ ID NO: 79322 - protein, 1574 aa, Arabidopsis thaliana
  peptide (1)..(1574): Ceres Seq. ID no. 12650868
  misc_feature (1)..(186): Pfam Name: Calcineurin-like phosphoesterase Pfam Description: Calcineurin-like phosphoesterase
  misc_feature (1)..(223): Homolog of NCBI NO: 18394613 NR Description: Expressed protein; protein id: At1g18480.1, by cDNA: 107675., supported by cDNA: gi_16226289 [Arabidopsis >gi|16226290|gb|AAL16125.1|AF428293_1 At1g18480/F15H18_1
  misc_feature (1)..(223): Homolog of NCBI NO: 21536655 NR Description: unknown [Arabidopsis thaliana]
  misc_feature (429)..(1189): Homolog of NCBI NO: 25354624 NR Description: protein F3O9.28 [imported] - Arabidopsis thaliana
  misc_feature (330)..(498): Homolog of NCBI NO: 25354624 NR Description: protein F3O9.28 [imported] - Arabidopsis thaliana
  misc_feature (1301)..(1574): Homolog of NCBI NO: 18394617 NR Description: expressed protein; protein id: At1g18490.1,
  misc_feature (358)..(1189): Homolog of NCBI NO: 30694644 NR Description: pentatricopeptide (PPR) repeat-containing protein
  misc_feature (358)..(1189): Homolog of NCBI NO: 30794008 NR Description: unknown protein [Arabidopsis thaliana]
  misc_feature (317)..(1189): Homolog of NCBI NO: 15219258 NR Description: hypothetical protein; protein id: At1g16480.1
  misc_feature (331)..(1189): Homolog of NCBI NO: 15228590 NR Description: hypothetical protein; protein id: At3g03580.1 thaliana] >gi|6091764|gb|AAF03474.1|AC009327_13 hypothetical [Arabidopsis thaliana] >gi|28393735|gb|AAO42278.1| unknown
  misc_feature (412)..(1189): Homolog of NCBI NO: 11281371 NR Description: hypothetical protein T8H10.30 - Arabidopsis >gi|6706414|emb|CAB66100.1| putative protein [Arabidopsis
MNGNHEIMNIEGDFRYVTKKGLEEFQIWADWYCLGNKMKTLCSGLDKPKDPYEGIPMSFPRMRADCFEGIRARIAALRPDGPIAKRFLTKNQTVAVVGDSVFVHGGLLAEHIEYGLERINEEVRGWINGFKGGRYAPAYCRGGNSVVWLRKFSEEMAHKCDCAALEHALSTIPGVKRMIMGHTIQDAGINGVCNDKAIRIDVGMSKGCADGLPEVLEIRRDSGEAYLMASVLLPLPQVFVLFDYRRSRKESSFPRAVYNSNSISSNSTNANHFLRRISNFCETGDLDKSFRTVQEFVGDDESSSDAFLLVREALGLLLQASGKRKDIEMGRKIHQLVSGSTRLRNDDVLCTRIITMYAMCGSPDDSRFVFDALRSKNLFQWNAVISSYSRNELYDEVLETFIEMISTTDLLPDHFTYPCVIKACAGMSDVGIGLAVHGLVVKTGLVEDVFVGNALVSFYGTHGFVTDALQLFDIMPERNLVSWNSMIRVFSDNGFSEESFLLLGEMMEENGDGAFMPDVATLVTVLPVCAREREIGLGKGVHGWAVKLRLDKELVLNNALMDMYSKCGCITNAQMIFKMNNNKNVVSWNTMVGGFSAEGDTHGTFDVLRQMLAGGEDVKADEVTILNAVPVCFHESFLPSLKELHCYSLKQEFVYNELVANAFVASYAKCGSLSYAQRVFHGIRSKTVNSWNALIGGHAQSNDPRLSLDAHLQMKISGLLPDSFTVCSLLSACSKLKSLRLGKEVHGFIIRNWLERDLFVYLSVLSLYIHCGELCTVQALFDAMEDKSLVSWNTVITGYLQNGFPDRALGVFRQMVLYGIQLCGISMMPVFGACSLLPSLRLGREAHAYALKHLLEDDAFIACSLIDMYAKNGSITQSSKVFNGLKEKSTASWNAMIMGYGIHGLAKEAIKLFEEMQRTGHNPDDLTFLGVLTACNHSGLIHEGLRYLDQMKSSFGLKPNLKHYACVIDMLGRAGQLDKALRVVAEEMSEEADVGIWKSLLSSCRIHQNLEMGEKVAAKLFELEPEKPENYVLLSNLYAGLGKWEDVRKVRQRMNEMSLRKDAGCSWIELNRKVFSFVVGERFLDGFEEIKSLWSILEMKISKMGYRPDTMSVQHDLSEEEKIEQLRGHSEKLALTYGLIKTSEGTTIRVYKNLRICVDCHNAAKLISKVMEREIVVRDNKRFHHFKNGEEKQDAMKSSMSIIVFLFVTIFTISASSLNPEETCIQRNINRSQPPSSSLEPKTSKFDFLVDKLCRDMARAVMFSVRITGKFPSHYVKAMCNVFGNDEKKVKEYVVKKWLGGEKVLSNLVSKKDIYMASRNQEKSPKVQELYDLCKETFTGKAPSPASMAIQKLCSVLDSVSPADVGLEEVSQDDDRGYGVSGVSRFNRVGRWAQPITFLDIHECDTFTMCIFCFPTSSVIPLHDHPEMAVFSKILYGSLHVKAYDWVEPPCIITQDKGVPGSLPARLAKLVSDKVITPQSEIPALYPKTGGNLHCFTALTPCAVLDILSPPYKESVGRSCSYYMDYPFSTFALENGMKKVDEGKEDEYAWLVQIDTPDDLHMRPGSYTGPTIRV

SEQ ID NO: 79323 - DNA, 1482 bp, Arabidopsis thaliana
  misc_feature (1)..(1482): Ceres Seq. ID no. 12650893
  misc_feature: MA Experiment ID: 108434 Result: Down-regulated in Transcription
  misc_feature: MA Experiment 108434 PARAMETER Experiment Name: At_Root_Tips_cDNA_P Parameter: Tissue Value: Root Tips
  misc_feature: MA Experiment ID: 108461 Result: Up-regulated in Transcription
  misc_feature: MA Experiment 108461 PARAMETER Experiment Name: At_Germinating_Seeds_cDNA_P Parameter: Age (day) Value: 1 vs. 0
  misc_feature: MA Experiment 108461 PARAMETER Experiment Name: At_Germinating_Seeds_cDNA_P Parameter: Tissue Value: Germinating Seeds
  misc_feature: MA Experiment ID: 108462 Result: Up-regulated in Transcription
  misc_feature: MA Experiment 108462 PARAMETER Experiment Name: At_Germinating_Seeds_cDNA_P Parameter: Age (day) Value: 2 vs. 0
  misc_feature: MA Experiment 108462 PARAMETER Experiment Name: At_Germinating_Seeds_cDNA_P Parameter: Tissue Value: Germinating Seeds
  misc_feature: MA Experiment ID: 108463 Result: Up-regulated in Transcription
  misc_feature: MA Experiment 108463 PARAMETER Experiment Name: At_Germinating_Seeds_cDNA_P Parameter: Age (day) Value: 3 vs. 0
  misc_feature: MA Experiment 108463 PARAMETER Experiment Name: At_Germinating_Seeds_cDNA_P Parameter: Tissue Value: Germinating Seeds
  misc_feature: MA Experiment ID: 108464 Result: Up-regulated in Transcription
  misc_feature: MA Experiment 108464 PARAMETER Experiment Name: At_Germinating_Seeds_cDNA_P Parameter: Age (day) Value: 4 vs. 0
  misc_feature: MA Experiment 108464 PARAMETER Experiment Name: At_Germinating_Seeds_cDNA_P Parameter: Tissue Value: Germinating Seeds
  misc_feature: MA Experiment ID: 108488 Result: Down-regulated in Transcription
  misc_feature: MA Experiment ID: 108574 Result: Up-regulated in Transcription
  misc_feature: MA Experiment 108574 PARAMETER Experiment Name: At_Wounding__cDNA_P Parameter: Timepoint (hr) Value: 1
  misc_feature: MA Experiment 108574 PARAMETER Experiment Name: At_Wounding__cDNA_P Parameter: Tissue Value: Aerial
  misc_feature: MA Experiment 108574 PARAMETER Experiment Name: At_Wounding__cDNA_P Parameter: Treatment Value: Wounding vs. No Wounding
  misc_feature: MA Experiment ID: 108577 Result: Down-regulated in Transcription
  misc_feature: MA Experiment 108577 PARAMETER Experiment Name: At_42deg_Heat_cDNA_P Parameter: Temperature (deg C) Value: 42 vs. 22
  misc_feature: MA Experiment 108577 PARAMETER Experiment Name: At_42deg_Heat_cDNA_P Parameter: Timepoint (hr) Value: 6
  misc_feature: MA Experiment 108577 PARAMETER Experiment Name: At_42deg_Heat_cDNA_P Parameter: Tissue Value: Aerial
  misc_feature: MA Experiment ID: 108579 Result: Up-regulated in Transcription
  misc_feature: MA Experiment 108579 PARAMETER Experiment Name: At_4deg_Cold_cDNA_P Parameter: Temperature (deg C) Value: 4 vs. 22
  misc_feature: MA Experiment 108579 PARAMETER Experiment Name: At_4deg_Cold_cDNA_P Parameter: Timepoint (hr) Value: 6
  misc_feature: MA Experiment 108579 PARAMETER Experiment Name: At_4deg_Cold_cDNA_P Parameter: Tissue Value: Aerial
  misc_feature: MA Experiment ID: 108585 Result: Up-regulated in Transcription
  misc_feature: MA Experiment 108585 PARAMETER Experiment Name: At_5mM_NaNP_cDNA_P Parameter: Timepoint (hr) Value: 6
  misc_feature: MA Experiment 108585 PARAMETER Experiment Name: At_5mM_NaNP_cDNA_P Parameter: Tissue Value: Aerial
  misc_feature: MA Experiment 108585 PARAMETER Experiment Name: At_5mM_NaNP_cDNA_P Parameter: Treatment Value: null
  misc_feature: MA Experiment ID: 108595 Result: Up-regulated in Transcription
  misc_feature: MA Experiment 108595 PARAMETER Experiment Name: At_Ler-pi_Ovule_cDNA_P Parameter: Plant Line Value: null
  misc_feature: MA Experiment ID: 108667 Result: Up-regulated in Transcription
  misc_feature: MA Experiment 108667 PARAMETER Experiment Name: At_2mM_SA_cDNA_P Parameter: Plant Line Value: WS
  misc_feature: MA Experiment 108667 PARAMETER Experiment Name: At_2mM_SA_cDNA_P Parameter: Timepoint (hr) Value: 1
  misc_feature: MA Experiment 108667 PARAMETER Experiment Name: At_2mM_SA_cDNA_P Parameter: Treatment Value: 2mM SA vs. No Treatment
  misc_feature: MA Experiment ID: 20000089 Result: Down-regulated in Transcription
  misc_feature: MA Experiment ID: 20000093 Result: Up-regulated in Transcription
  misc_feature: MA Experiment 20000093 PARAMETER Experiment Name: At_42deg_Heat_cDNA_P Parameter: Temperature (deg C) Value: 42 vs. 22
  misc_feature: MA Experiment 20000093 PARAMETER Experiment Name: At_42deg_Heat_cDNA_P Parameter: Timepoint (hr) Value: 0.5
  misc_feature: MA Experiment 20000093 PARAMETER Experiment Name: At_42deg_Heat_cDNA_P Parameter: Tissue Value: Aerial
  misc_feature: MA Experiment ID: 20000113 Result: Up-regulated in Transcription
  misc_feature: MA Experiment 20000113 PARAMETER Experiment Name: At_42deg_Heat_cDNA_P Parameter: Temperature (deg C) Value: 42 vs. 22
  misc_feature: MA Experiment 20000113 PARAMETER Experiment Name: At_42deg_Heat_cDNA_P Parameter: Timepoint (hr) Value: 8
  misc_feature: MA Experiment 20000113 PARAMETER Experiment Name: At_42deg_Heat_cDNA_P Parameter: Tissue Value: Aerial
  misc_feature: MA Experiment ID: 20000185 Result: Down-regulated in Transcription
  misc_feature: MA Experiment 20000185 PARAMETER Experiment Name: At_Roots__P Parameter: Age (day) Value: 7 vs. 21
  misc_feature: MA Experiment 20000185 PARAMETER Experiment Name: At_Roots__P Parameter: Organism Value: A. thaliana
  misc_feature: MA Experiment 20000185 PARAMETER Experiment Name: At_Roots__P Parameter: Tissue Value: Roots vs. Whole Plant
  misc_feature: MA Experiment ID: 20000213 Result: Up-regulated in Transcription
  misc_feature: MA Experiment 20000213 PARAMETER Experiment Name: At_4deg_Cold_P Parameter: Timepoint (hr) Value: 2
  misc_feature: MA Experiment ID: 20000234 Result: Down-regulated in Transcription
  misc_feature: MA Experiment 20000234 PARAMETER Experiment Name: At_Siliques_P Parameter: Age (day) Value: 21
  misc_feature: MA Experiment 20000234 PARAMETER Experiment Name: At_Siliques_P Parameter: Organism Value: A. thaliana
  misc_feature: MA Experiment 20000234 PARAMETER Experiment Name: At_Siliques_P Parameter: Plant Line Value: WS
  misc_feature: MA Experiment 20000234 PARAMETER Experiment Name: At_Siliques_P Parameter: Tissue Value: Less Than 5mm Siliques vs. Whole Plant
  misc_feature: MA Experiment ID: 20000235 Result: Down-regulated in Transcription
  misc_feature: MA Experiment 20000235 PARAMETER Experiment Name: At_Siliques_P Parameter: Age (day) Value: 21
  misc_feature: MA Experiment 20000235 PARAMETER Experiment Name: At_Siliques_P Parameter: Organism Value: A. thaliana
  misc_feature: MA Experiment 20000235 PARAMETER Experiment Name: At_Siliques_P Parameter: Plant Line Value: WS
  misc_feature: MA Experiment 20000235 PARAMETER Experiment Name: At_Siliques_P Parameter: Tissue Value: 5-10mm Siliques vs. Whole Plant
  misc_feature: MA Experiment ID: 20000264 Result: Down-regulated in Transcription
  misc_feature: MA Experiment 20000264 PARAMETER Experiment Name: At_Open_Flower_P Parameter: Age (day) Value: 21
  misc_feature: MA Experiment 20000264 PARAMETER Experiment Name: At_Open_Flower_P Parameter: Plant Line Value: WS
  misc_feature: MA Experiment 20000264 PARAMETER Experiment Name: At_Open_Flower_P Parameter: Tissue Value: Open Flower vs. Whole Plant
  misc_feature: MA Experiment ID: 20000265 Result: Down-regulated in Transcription
  misc_feature: MA Experiment 20000265 PARAMETER Experiment Name: At_Open_Flower_P Parameter: Age (day) Value: 21
  misc_feature: MA Experiment 20000265 PARAMETER Experiment Name: At_Open_Flower_P Parameter: Plant Line Value: WS
  misc_feature: MA Experiment 20000265 PARAMETER Experiment Name: At_Open_Flower_P Parameter: Tissue Value: Closed Flower vs. Whole Plant
  misc_feature: MA Experiment ID: 20000267 Result: Up-regulated in Transcription
  misc_feature: MA Experiment 20000267 PARAMETER Experiment Name: At_Drought_P Parameter: Age (day) Value: 7
  misc_feature: MA Experiment 20000267 PARAMETER Experiment Name: At_Drought_P Parameter: Organism Value: A. thaliana
  misc_feature: MA Experiment 20000267 PARAMETER Experiment Name: At_Drought_P Parameter: Plant Line Value: WS
  misc_feature: MA Experiment 20000267 PARAMETER Experiment Name: At_Drought_P Parameter: Timepoint (hr) Value: 6
  misc_feature: MA Experiment 20000267 PARAMETER Experiment Name: At_Drought_P Parameter: Tissue Value: Whole Plant
  misc_feature: MA Experiment 20000267 PARAMETER Experiment Name: At_Drought_P Parameter: Treatment Value: Drought vs. No Drought
  misc_feature: MA Experiment ID: 20000286 Result: Down-regulated in Transcription
  misc_feature: MA Experiment 20000286 PARAMETER Experiment Name: At_Open_Flower_P Parameter: Age (day) Value: 21
  misc_feature: MA Experiment 20000286 PARAMETER Experiment Name: At_Open_Flower_P Parameter: Plant Line Value: WS
  misc_feature: MA Experiment 20000286 PARAMETER Experiment Name: At_Open_Flower_P Parameter: Tissue Value: Half Open vs. Whole Plant
  misc_feature: MA Experiment ID: 20000438 Result: Down-regulated in Transcription
  misc_feature: MA Experiment 20000438 PARAMETER Experiment Name: At_Shoots__P Parameter: Age (day) Value: 14
  misc_feature: MA Experiment 20000438 PARAMETER Experiment Name: At_Shoots__P Parameter: Tissue Value: Shoots vs. Whole Plant
  misc_feature: MA Experiment ID: 20000439 Result: Down-regulated in Transcription
  misc_feature: MA Experiment 20000439 PARAMETER Experiment Name: At_Roots__P Parameter: Age (day) Value: 14 vs. 21
  misc_feature: MA Experiment 20000439 PARAMETER Experiment Name: At_Roots__P Parameter: Organism Value: A. thaliana
  misc_feature: MA Experiment 20000439 PARAMETER Experiment Name: At_Roots__P Parameter: Tissue Value: Roots vs. Whole Plant
  misc_feature: MA Experiment ID: 20000441 Result: Up-regulated in Transcription
  misc_feature: MA Experiment 20000441 PARAMETER Experiment Name: At_1uM_BR-BRZ__P Parameter: Tissue Value: Shoot Apices
  misc_feature: MA Experiment 20000441 PARAMETER Experiment Name: At_1uM_BR-BRZ__P Parameter: Treatment Value: 1uM BR vs. No Treatment
  misc_feature: MA Experiment ID: 20000443 Result: Up-regulated in Transcription
  misc_feature: MA Experiment 20000443 PARAMETER Experiment Name: At_1uM_BR-BRZ__P Parameter: Tissue Value: Shoot Apices
  misc_feature: MA Experiment 20000443 PARAMETER Experiment Name: At_1uM_BR-BRZ__P Parameter: Treatment Value: 1uM BRZ vs. No Treatment
  misc_feature: MA Experiment ID: 20000460 Result: Up-regulated in Transcription
  misc_feature: MA Experiment 20000460 PARAMETER Experiment Name: At_10percent_PEG_P Parameter: Age (day) Value: 12
  misc_feature: MA Experiment 20000460 PARAMETER Experiment Name: At_10percent_PEG_P Parameter: Organism Value: A. thaliana
  misc_feature: MA Experiment 20000460 PARAMETER Experiment Name: At_10percent_PEG_P Parameter: Plant Line Value: WS
  misc_feature: MA Experiment 20000460 PARAMETER Experiment Name: At_10percent_PEG_P Parameter: Timepoint (day) Value: 12
  misc_feature: MA Experiment 20000460 PARAMETER Experiment Name: At_10percent_PEG_P Parameter: Tissue Value: Whole Plant
  misc_feature: MA Experiment 20000460 PARAMETER Experiment Name: At_10percent_PEG_P Parameter: Treatment Value: 10percent PEG vs. No Treatment
  misc_feature: MA Experiment ID: 20000495 Result: Down-regulated in Transcription
  misc_feature: MA Experiment 20000495 PARAMETER Experiment Name: At_Guard_Cells_P Parameter: Harvest Date Value: 8/2/2002
  misc_feature: MA Experiment 20000495 PARAMETER Experiment Name: At_Guard_Cells_P Parameter: Organism Value: A. thaliana
  misc_feature: MA Experiment 20000495 PARAMETER Experiment Name: At_Guard_Cells_P Parameter: Tissue Value: Guard Cells vs. Leaves
  misc_feature: MA Experiment ID: 20000573 Result: Down-regulated in Transcription
  misc_feature: MA Experiment 20000573 PARAMETER Experiment Name: At_100uM_ABA_Mutants__P Parameter: Organism Value: A. thaliana
  misc_feature: MA Experiment 20000573 PARAMETER Experiment Name: At_100uM_ABA_Mutants__P Parameter: Plant Line Value: CS22 vs. Ler wt
  misc_feature: MA Experiment 20000573 PARAMETER Experiment Name: At_100uM_ABA_Mutants__P Parameter: Timepoint (hr) Value: N/A
  misc_feature: MA Experiment 20000573 PARAMETER Experiment Name: At_100uM_ABA_Mutants__P Parameter: Tissue Value: Whole Plant
  misc_feature: MA Experiment 20000573 PARAMETER Experiment Name: At_100uM_ABA_Mutants__P Parameter: Treatment Value: None
  misc_feature: MA Experiment ID: 20000574 Result: Down-regulated in Transcription
  misc_feature: MA Experiment 20000574 PARAMETER Experiment Name: At_100uM_ABA_Mutants__P Parameter: Organism Value: A. thaliana
  misc_feature: MA Experiment 20000574 PARAMETER Experiment Name: At_100uM_ABA_Mutants__P Parameter: Plant Line Value: CS23 vs. Ler wt
  misc_feature: MA Experiment 20000574 PARAMETER Experiment Name: At_100uM_ABA_Mutants__P Parameter: Timepoint (hr) Value: N/A
  misc_feature: MA Experiment 20000574 PARAMETER Experiment Name: At_100uM_ABA_Mutants__P Parameter: Tissue Value: Whole Plant
  misc_feature: MA Experiment 20000574 PARAMETER Experiment Name: At_100uM_ABA_Mutants__P Parameter: Treatment Value: None
  misc_feature: MA Experiment ID: 20000794 Result: Down-regulated in Transcription
  misc_feature: MA Experiment 20000794 PARAMETER Experiment Name: At_Petals_P Parameter: Age (day) Value: 23-25 days
  misc_feature: MA Experiment 20000794 PARAMETER Experiment Name: At_Petals_P Parameter: Plant Line Value: WS
  misc_feature: MA Experiment 20000794 PARAMETER Experiment Name: At_Petals_P Parameter: Tissue Value: Petals vs. Whole plant
  misc_feature: MA Experiment ID: 20001556 Result: Down-regulated in Transcription
  misc_feature: MA Experiment 20001556 PARAMETER Experiment Name: At_Drought_Soil_Dry_P Parameter: Age (day) Value: 26
  misc_feature: MA Experiment 20001556 PARAMETER Experiment Name: At_Drought_Soil_Dry_P Parameter: Organism Value: A. thaliana
  misc_feature: MA Experiment 20001556 PARAMETER Experiment Name: At_Drought_Soil_Dry_P Parameter: Plant Line Value: WS
  misc_feature: MA Experiment 20001556 PARAMETER Experiment Name: At_Drought_Soil_Dry_P Parameter: Post Timepoint (hr) Value: None
  misc_feature: MA Experiment 20001556 PARAMETER Experiment Name: At_Drought_Soil_Dry_P Parameter: Post-Treatment Value: None
  misc_feature: MA Experiment 20001556 PARAMETER Experiment Name: At_Drought_Soil_Dry_P Parameter: Timepoint (day) Value: 12
  misc_feature: MA Experiment 20001556 PARAMETER Experiment Name: At_Drought_Soil_Dry_P Parameter: Treatment Value: Drought vs. No Drought
  misc_feature: MA Experiment ID: 20001757 Result: Down-regulated in Transcription
  misc_feature: MA Experiment 20001757 PARAMETER Experiment Name: At_50mM_NH4NO3_L-to-H_P Parameter: Timepoint (hr) Value: 6
  misc_feature: MA Experiment 20001757 PARAMETER Experiment Name: At_50mM_NH4NO3_L-to-H_P Parameter: Tissue Value: Leaf
  misc_feature: MA Experiment 20001757 PARAMETER Experiment Name: At_50mM_NH4NO3_L-to-H_P Parameter: Treatment Value: 50mM NH4NO3 vs 100mM Mannitol
atcaatcatcatcatcactctctctcaatccaacaaagaaaaaaaaagtcttcttctttttttacaagtctgagaattttctacagaaacaaaaatctgattgtttttcccactttgcatctgttttgaggatgccagctacggattttcaaggatcatttggaaggtcgttgctaagtttacggcgagaccaagttgactcatcaacagtcgtctccggaagtagtagccaccacgagccaagcaccatggaggttgagctagattcgtttcaaagacaagtcgctgagaaattcatcgatctcaacgcttcttcaaacgaccttctctctctcgaatggatcggaaagcttcttgattctttcctctgttgtcaagaagagtttcgagctatcgtattcaaccaccgatctcagatctctaaatctccgatggaccgtttgatttcagattacttcgaacggagcatcaaagctctagatgtctgtaacgccatccgcgacggtatcgaacagatccgtcaatgggagaaacttgccgatattgtgatctctgctttagatagtcaccgtccgatcggagaaggtcagctccggcgagctaagaaagctctgattgatttagcaatcggaatgcttgacgagaaagatcatccttctggaaccaatctagctcatcgtaaccgttcattcggaagagtcaaagacagtcaccaccgttcgattggtcatttcagatctctttcttggagtgtttcaagatcatggtcagcttctaagcagttacaagctttagcgagtaacttggcaacgcctcgaccaaacgatgtcgttgctagcaatggtttagctgtaccggtttacacaatgacttcggttttgctttttgtgatgtgggttttggtagctgcgattccttgtcaagaccgtggattgcaagttaacttctttgtgcctaggcatttccaatgggcagctccggttatgtcgttgcacgataagattgttgaggaatctaagagaagagataggaagaattgttgtggtttgcttaaggagattgataggattgagaagagttcgaggttgatgaatgaattgatcgattcgattcatttcccgttgaatgatgacaaggaagttgaggtgaaacagagagttgatgagcttgttcaagttcgtgaagctttgagaaatggtttggatccgtttgagaggaaagtaagagaagttttccatcggattgtgagaagcagaactgagagtcttgattctctttgatcttgcacatgtttgtctgaatatgatgaatgattcatgtttggattttttgttttgtttttgtttttctctatttatcctttttgatcacttgtaaaaaagaaactcaaagagtgtagaagtgtcatcttctctttgtgatgctgatagtgattctgttcttctttgtgtagctacttgcttagattgaagttattttttc

SEQ ID NO: 79324 - protein, 425 aa, Arabidopsis thaliana; identical to SEQ ID NO: 25498
  peptide (1)..(425): Ceres Seq. ID no. 12650894
  misc_feature (44)..(425): Pfam Name: Protein of unknown function (DUF793) Pfam Description: Protein of unknown function (DUF793)
  misc_feature (44)..(425): Homolog of NCBI NO: 18394649 NR Description: expressed protein; protein id: At1g18740.1, by cDNA: 40753., supported by cDNA: gi_14517471 [Arabidopsis
  misc_feature (44)..(425): Homolog of NCBI NO: 21593634 NR Description: unknown [Arabidopsis thaliana]
  misc_feature (44)..(425): Homolog of NCBI NO: 18410617 NR Description: expressed protein; protein id: At1g74450.1, by cDNA: 108193., supported by cDNA: gi_16226873, supported by gi_18176415 [Arabidopsis thaliana] >gi|25354336|pir||D96773
  misc_feature (44)..(425): Homolog of NCBI NO: 21536674 NR Description: unknown [Arabidopsis thaliana]
  misc_feature (44)..(425): Homolog of NCBI NO: 15218428 NR Description: hypothetical protein; protein id: At1g43630.1
  misc_feature (44)..(425): Homolog of NCBI NO: 38345505 NR Description: OSJNBa0039K24.3 [Oryza sativa (japonica
  misc_feature (103)..(425): Homolog of NCBI NO: 15222577 NR Description: hypothetical protein; protein id: At1g63930.1
  misc_feature (46)..(425): Homolog of NCBI NO: 15236522 NR Description: putative protein; protein id: At4g23530.1, by cDNA: gi_17380709 [Arabidopsis thaliana]
  misc_feature (45)..(423): Homolog of NCBI NO: 15237130 NR Description: putative protein; protein id: At4g11300.1, by cDNA: 17771. [Arabidopsis thaliana] >gi|7486699|pir||T13021
  misc_feature (45)..(423): Homolog of NCBI NO: 21553882 NR Description: unknown [Arabidopsis thaliana]

SEQ ID NO: 79325 - protein, 382 aa, Arabidopsis thaliana; identical to SEQ ID NO: 25499
  peptide (1)..(382): Ceres Seq. ID no. 12650895
  misc_feature (1)..(382): Pfam Name: Protein of unknown function (DUF793) Pfam Description: Protein of unknown function (DUF793)
  misc_feature (1)..(382): Homolog of NCBI NO: 18394649 NR Description: expressed protein; protein id: At1g18740.1, by cDNA: 40753., supported by cDNA: gi_14517471 [Arabidopsis
  misc_feature (1)..(382): Homolog of NCBI NO: 21593634 NR Description: unknown [Arabidopsis thaliana]
  misc_feature (1)..(382): Homolog of NCBI NO: 18410617 NR Description: expressed protein; protein id: At1g74450.1, by cDNA: 108193., supported by cDNA: gi_16226873, supported by gi_18176415 [Arabidopsis thaliana] >gi|25354336|pir||D96773
  misc_feature (1)..(382): Homolog of NCBI NO: 21536674 NR Description: unknown [Arabidopsis thaliana]
  misc_feature (1)..(382): Homolog of NCBI NO: 15218428 NR Description: hypothetical protein; protein id: At1g43630.1
  misc_feature (1)..(382): Homolog of NCBI NO: 38345505 NR Description: OSJNBa0039K24.3 [Oryza sativa (japonica
  misc_feature (60)..(382): Homolog of NCBI NO: 15222577 NR Description: hypothetical protein; protein id: At1g63930.1
  misc_feature (3)..(382): Homolog of NCBI NO: 15236522 NR Description: putative protein; protein id: At4g23530.1, by cDNA: gi_17380709 [Arabidopsis thaliana]
  misc_feature (2)..(380): Homolog of NCBI NO: 15237130 NR Description: putative protein; protein id: At4g11300.1, by cDNA: 17771. [Arabidopsis thaliana] >gi|7486699|pir||T13021
  misc_feature (2)..(380): Homolog of NCBI NO: 21553882 NR Description: unknown [Arabidopsis thaliana]

SEQ ID NO: 79326 - protein, 343 aa, Arabidopsis thaliana; identical to SEQ ID NO: 25500
  peptide (1)..(343): Ceres Seq. ID no. 12650896
  misc_feature (1)..(343): Pfam Name: Protein of unknown function (DUF793) Pfam Description: Protein of unknown function (DUF793)
  misc_feature (1)..(343): Homolog of NCBI NO: 18394649 NR Description: expressed protein; protein id: At1g18740.1, by cDNA: 40753., supported by cDNA: gi_14517471 [Arabidopsis
  misc_feature (1)..(343): Homolog of NCBI NO: 21593634 NR Description: unknown [Arabidopsis thaliana]
  misc_feature (1)..(343): Homolog of NCBI NO: 18410617 NR Description: expressed protein; protein id: At1g74450.1, by cDNA: 108193., supported by cDNA: gi_16226873, supported by gi_18176415 [Arabidopsis thaliana] >gi|25354336|pir||D96773
  misc_feature (1)..(343): Homolog of NCBI NO: 21536674 NR Description: unknown [Arabidopsis thaliana]
  misc_feature (1)..(343): Homolog of NCBI NO: 15218428 NR Description: hypothetical protein; protein id: At1g43630.1
  misc_feature (1)..(343): Homolog of NCBI NO: 38345505 NR Description: OSJNBa0039K24.3 [Oryza sativa (japonica
  misc_feature (21)..(343): Homolog of NCBI NO: 15222577 NR Description: hypothetical protein; protein id: At1g63930.1
  misc_feature (1)..(343): Homolog of NCBI NO: 15236522 NR Description: putative protein; protein id: At4g23530.1, by cDNA: gi_17380709 [Arabidopsis thaliana]
  misc_feature (1)..(341): Homolog of NCBI NO: 15237130 NR Description: putative protein; protein id: At4g11300.1, by cDNA: 17771. [Arabidopsis thaliana] >gi|7486699|pir||T13021
  misc_feature (1)..(341): Homolog of NCBI NO: 21553882 NR Description: unknown [Arabidopsis thaliana]

SEQ ID NO: 79327 - DNA, 1493 bp, Arabidopsis thaliana
  misc_feature (1)..(1493): Ceres Seq. ID no. 12650914
  misc_feature: MA Experiment ID: 20000265 Result: Up-regulated in Transcription
  misc_feature: MA Experiment 20000265 PARAMETER Experiment Name: At_Open_Flower_P Parameter: Age (day) Value: 21
  misc_feature: MA Experiment 20000265 PARAMETER Experiment Name: At_Open_Flower_P Parameter: Plant Line Value: WS
  misc_feature: MA Experiment 20000265 PARAMETER Experiment Name: At_Open_Flower_P Parameter: Tissue Value: Closed Flower vs. Whole Plant
  misc_feature: MA Experiment ID: 20001557 Result: Up-regulated in Transcription
  misc_feature: MA Experiment 20001557 PARAMETER Experiment Name: At_Drought_Soil_Dry_P Parameter: Age (day) Value: 27
  misc_feature: MA Experiment 20001557 PARAMETER Experiment Name: At_Drought_Soil_Dry_P Parameter: Organism Value: A. thaliana
  misc_feature: MA Experiment 20001557 PARAMETER Experiment Name: At_Drought_Soil_Dry_P Parameter: Plant Line Value: WS
  misc_feature: MA Experiment 20001557 PARAMETER Experiment Name: At_Drought_Soil_Dry_P Parameter: Post Timepoint (hr) Value: 3
  misc_feature: MA Experiment 20001557 PARAMETER Experiment Name: At_Drought_Soil_Dry_P Parameter: Post-Treatment Value: Re-Water vs. No Drought
  misc_feature: MA Experiment 20001557 PARAMETER Experiment Name: At_Drought_Soil_Dry_P Parameter: Timepoint (day) Value: 13
  misc_feature: MA Experiment 20001557 PARAMETER Experiment Name: At_Drought_Soil_Dry_P Parameter: Treatment Value: Drought vs. No Drought
  misc_feature: MA Experiment ID: 20001558 Result: Up-regulated in Transcription
  misc_feature: MA Experiment 20001558 PARAMETER Experiment Name: At_Drought_Soil_Dry_P Parameter: Age (day) Value: 27
  misc_feature: MA Experiment 20001558 PARAMETER Experiment Name: At_Drought_Soil_Dry_P Parameter: Organism Value: A. thaliana
  misc_feature: MA Experiment 20001558 PARAMETER Experiment Name: At_Drought_Soil_Dry_P Parameter: Plant Line Value: WS
  misc_feature: MA Experiment 20001558 PARAMETER Experiment Name: At_Drought_Soil_Dry_P Parameter: Post Timepoint (hr) Value: 6
  misc_feature: MA Experiment 20001558 PARAMETER Experiment Name: At_Drought_Soil_Dry_P Parameter: Post-Treatment Value: Re-Water vs. No Drought
  misc_feature: MA Experiment 20001558 PARAMETER Experiment Name: At_Drought_Soil_Dry_P Parameter: Timepoint (day) Value: 13
  misc_feature: MA Experiment 20001558 PARAMETER Experiment Name: At_Drought_Soil_Dry_P Parameter: Treatment Value: Drought vs. No Drought
  misc_feature: MA Experiment ID: 20001757 Result: Down-regulated in Transcription
  misc_feature: MA Experiment 20001757 PARAMETER Experiment Name: At_50mM_NH4NO3_L-to-H_P Parameter: Timepoint (hr) Value: 6
  misc_feature: MA Experiment 20001757 PARAMETER Experiment Name: At_50mM_NH4NO3_L-to-H_P Parameter: Tissue Value: Leaf
  misc_feature: MA Experiment 20001757 PARAMETER Experiment Name: At_50mM_NH4NO3_L-to-H_P Parameter: Treatment Value: 50mM NH4NO3 vs 100mM Mannitol
ctttttttttgttgttggtgtaatgatatcacagagagaagaaagagaagagaagaagcagagagtgatgggagataagaaattgatttcatcttcttcttcttcctcggtttacgatactcgtatcaatcatcatcttcatcatcctccgtcttcttccgacgaaatctctcagtttctccggcatattttcgaccgttcttctcctttaccttcttactactccccggcgacgactacaacgacggcgtctttgattggtgtgcacgggagcggtgacccacatgcagataactcgagaagtctcgtttctcatcatccaccgtcagattctgtgcttatgtcgaaacgtgtcggagatttctctgaggttttaatcggcggaggatcaggctcagccgccgcgtgttttggtttctccggtggtggtaataataacaacgttcaaggaaatagctctgggactcgagtatcgtcttcttccgttggagctagtggcaacgagacagatgagtatgactgtgaaagcgaggaaggaggagaagctgtagttgatgaagctccctcttccaagtcaggtccttcttctcgtagttcatctaaaagatgcagagctgctgaagttcataatctctctgagaagaggaggagaagtagaattaatgaaaaaatgaaagctttacaaagtctcatccctaattcaaataagacggataaggcttcaatgcttgatgaagccattgagtatctgaaacagcttcagctccaagttcagatgttgactatgagaaatggaataaacttgcatcctttgtgtttacctggaactacattacacccattgcaactctctcagattcgaccccctgaagcaaccaatgatcctctgcttaatcataccaatcagtttgcttcgacttctaatgcaccggaaatgatcaatactgtggcttcttcatacgctttggaaccttctattcgcagtcactttggacctttccctctccttacttcacccgtggagatgagtcgggaaggtgggttaactcatccaaggttgaacattggtcattccaacgcaaacataaccggggaacaagctctgtttgatggacaacctgacctaaaagatcgaattacttgaacagtgtcccaacttcgggatctctatgtgttcttgtttcttagaacgcaagccataaagctgtctgacaatggagatgcatttaactgtctttattttttctaaggttctatttaaaatcaattgttggtgacacgaattctagagtctaatcttttggatctaatagctatatataaaaaggactgaaattttattacaaagtaattgactaattgttagattgttgtatgtttatggtggatgtaaattttctagatcatcttcgtattgtatttgagagtttgatactcgatggctttggatatgtaaattaccccgataagcttctagagaagttttcgattct

SEQ ID NO: 79328 - protein, 380 aa, Arabidopsis thaliana
  peptide (1)..(380): Ceres Seq. ID no. 12650915
  misc_feature (205)..(254): Pfam Name: Helix-loop-helix DNA-binding domain Pfam Description: Helix-loop-helix DNA-binding domain
  misc_feature (8)..(363): Homolog of NCBI NO: 25407777 NR Description: hypothetical protein AT4g36930 [imported] - thaliana >gi|4006880|emb|CAB16798.1| putative protein thaliana] >gi|7270642|emb|CAB80359.1| putative protein
  misc_feature (8)..(380): Homolog of NCBI NO: 18419937 NR Description: bHLH protein, SPATULA; protein id: At4g36930.1 thaliana] >gi|11245494|gb|AAG33640.1|AF319540_1 SPATULA
  misc_feature (153)..(274): Homolog of NCBI NO: 21536863 NR Description: unknown [Arabidopsis thaliana]
  misc_feature (49)..(84): Homolog of NCBI NO: 21536863 NR Description: unknown [Arabidopsis thaliana]
  misc_feature (174)..(324): Homolog of NCBI NO: 15451582 NR Description: Putative SPATULA [Oryza sativa]
  misc_feature (149)..(363): Homolog of NCBI NO: 34899612 NR Description: putative phytochrome interacting factor 4 [Oryza
  misc_feature (153)..(274): Homolog of NCBI NO: 15240202 NR Description: putative protein; protein id: At5g67110.1, by cDNA: 11375. [Arabidopsis thaliana] emb|CAB16798.1~gene_id:K21H1.7~similar to unknown protein
  misc_feature (115)..(264): Homolog of NCBI NO: 20127012 NR Description: putative bHLH transcription factor [Arabidopsis
  misc_feature (115)..(264): Homolog of NCBI NO: 30678541 NR Description: bHLH protein family [Arabidopsis thaliana]
  misc_feature (130)..(280): Homolog of NCBI NO: 15217533 NR Description: putative phytochrome-associated protein 3; id: At1g09530.1, supported by cDNA: gi_18026963, supported by gi_3929585, supported by cDNA: gi_4093152 [Arabidopsis thaliana]
FFFVVGVMISQREEREEKKQRVMGDKKLISSSSSSSVYDTRINHHLHHPPSSSDEISQFLRHIFDRSSPLPSYYSPATTTTTASLIGVHGSGDPHADNSRSLVSHHPPSDSVLMSKRVGDFSEVLIGGGSGSAAACFGFSGGGNNNNVQGNSSGTRVSSSSVGASGNETDEYDCESEEGGEAVVDEAPSSKSGPSSRSSSKRCRAAEVHNLSEKRRRSRINEKMKALQSLIPNSNKTDKASMLDEAIEYLKQLQLQVQMLTMRNGINLHPLCLPGTTLHPLQLSQIRPPEATNDPLLNHTNQFASTSNAPEMINTVASSYALEPSIRSHFGPFPLLTSPVEMSREGGLTHPRLNIGHSNANITGEQALFDGQPDLKDRIT

SEQ ID NO: 79329 - protein, 373 aa, Arabidopsis thaliana
  peptide (1)..(373): Ceres Seq. ID no. 12650916
  misc_feature (198)..(247): Pfam Name: Helix-loop-helix DNA-binding domain Pfam Description: Helix-loop-helix DNA-binding domain
  misc_feature (1)..(356): Homolog of NCBI NO: 25407777 NR Description: hypothetical protein AT4g36930 [imported] - thaliana >gi|4006880|emb|CAB16798.1| putative protein thaliana] >gi|7270642|emb|CAB80359.1| putative protein
  misc_feature (1)..(373): Homolog of NCBI NO: 18419937 NR Description: bHLH protein, SPATULA; protein id: At4g36930.1 thaliana] >gi|11245494|gb|AAG33640.1|AF319540_1 SPATULA
  misc_feature (146)..(267): Homolog of NCBI NO: 21536863 NR Description: unknown [Arabidopsis thaliana]
  misc_feature (42)..(77): Homolog of NCBI NO: 21536863 NR Description: unknown [Arabidopsis thaliana]
  misc_feature (167)..(317): Homolog of NCBI NO: 15451582 NR Description: Putative SPATULA [Oryza sativa]
  misc_feature (142)..(356): Homolog of NCBI NO: 34899612 NR Description: putative phytochrome interacting factor 4 [Oryza
  misc_feature (146)..(267): Homolog of NCBI NO: 15240202 NR Description: putative protein; protein id: At5g67110.1, by cDNA: 11375. [Arabidopsis thaliana] emb|CAB16798.1~gene_id:K21H1.7~similar to unknown protein
  misc_feature (108)..(257): Homolog of NCBI NO: 20127012 NR Description: putative bHLH transcription factor [Arabidopsis
  misc_feature (108)..(257): Homolog of NCBI NO: 30678541 NR Description: bHLH protein family [Arabidopsis thaliana]
  misc_feature (123)..(273): Homolog of NCBI NO: 15217533 NR Description: putative phytochrome-associated protein 3; id: At1g09530.1, supported by cDNA: gi_18026963, supported by gi_3929585, supported by cDNA: gi_4093152 [Arabidopsis thaliana]
MISQREEREEKKQRVMGDKKLISSSSSSSVYDTRINHHLHHPPSSSDEISQFLRHIFDRSSPLPSYYSPATTTTTASLIGVHGSGDPHADNSRSLVSHHPPSDSVLMSKRVGDFSEVLIGGGSGSAAACFGFSGGGNNNNVQGNSSGTRVSSSSVGASGNETDEYDCESEEGGEAVVDEAPSSKSGPSSRSSSKRCRAAEVHNLSEKRRRSRINEKMKALQSLIPNSNKTDKASMLDEAIEYLKQLQLQVQMLTMRNGINLHPLCLPGTTLHPLQLSQIRPPEATNDPLLNHTNQFASTSNAPEMINTVASSYALEPSIRSHFGPFPLLTSPVEMSREGGLTHPRLNIGHSNANITGEQALFDGQPDLKDRIT

SEQ ID NO: 79330 - protein, 358 aa, Arabidopsis thaliana
  peptide (1)..(358): Ceres Seq. ID no. 12650917
  misc_feature (183)..(232): Pfam Name: Helix-loop-helix DNA-binding domain Pfam Description: Helix-loop-helix DNA-binding domain
  misc_feature (1)..(341): Homolog of NCBI NO: 25407777 NR Description: hypothetical protein AT4g36930 [imported] - thaliana >gi|4006880|emb|CAB16798.1| putative protein thaliana] >gi|7270642|emb|CAB80359.1| putative protein
  misc_feature (1)..(358): Homolog of NCBI NO: 18419937 NR Description: bHLH protein, SPATULA; protein id: At4g36930.1 thaliana] >gi|11245494|gb|AAG33640.1|AF319540_1 SPATULA
  misc_feature (131)..(252): Homolog of NCBI NO: 21536863 NR Description: unknown [Arabidopsis thaliana]
  misc_feature (27)..(62): Homolog of NCBI NO: 21536863 NR Description: unknown [Arabidopsis thaliana]
  misc_feature (152)..(302): Homolog of NCBI NO: 15451582 NR Description: Putative SPATULA [Oryza sativa]
  misc_feature (127)..(341): Homolog of NCBI NO: 34899612 NR Description: putative phytochrome interacting factor 4 [Oryza
  misc_feature (131)..(252): Homolog of NCBI NO: 15240202 NR Description: putative protein; protein id: At5g67110.1, by cDNA: 11375. [Arabidopsis thaliana] emb|CAB16798.1~gene_id:K21H1.7~similar to unknown protein
  misc_feature (93)..(242): Homolog of NCBI NO: 20127012 NR Description: putative bHLH transcription factor [Arabidopsis
  misc_feature (93)..(242): Homolog of NCBI NO: 30678541 NR Description: bHLH protein family [Arabidopsis thaliana]
  misc_feature (108)..(258): Homolog of NCBI NO: 15217533 NR Description: putative phytochrome-associated protein 3; id: At1g09530.1, supported by cDNA: gi_18026963, supported by gi_3929585, supported by cDNA: gi_4093152 [Arabidopsis thaliana]
MGDKKLISSSSSSSVYDTRINHHLHHPPSSSDEISQFLRHIFDRSSPLPSYYSPATTTTTASLIGVHGSGDPHADNSRSLVSHHPPSDSVLMSKRVGDFSEVLIGGGSGSAAACFGFSGGGNNNNVQGNSSGTRVSSSSVGASGNETDEYDCESEEGGEAVVDEAPSSKSGPSSRSSSKRCRAAEVHNLSEKRRRSRINEKMKALQSLIPNSNKTDKASMLDEAIEYLKQLQLQVQMLTMRNGINLHPLCLPGTTLHPLQLSQIRPPEATNDPLLNHTNQFASTSNAPEMINTVASSYALEPSIRSHFGPFPLLTSPVEMSREGGLTHPRLNIGHSNANITGEQALFDGQPDLKDRIT

SEQ ID NO: 79331 - DNA, 1500 bp, Arabidopsis thaliana
  misc_feature (1)..(1500): Ceres Seq. ID no. 12650918
  misc_feature: MA Experiment ID: 20000171 Result: Up-regulated in Transcription
  misc_feature: MA Experiment 20000171 PARAMETER Experiment Name: At_42deg_Heat_P Parameter: Age (day) Value: 14
  misc_feature: MA Experiment 20000171 PARAMETER Experiment Name: At_42deg_Heat_P Parameter: Organism Value: A. thaliana
  misc_feature: MA Experiment 20000171 PARAMETER Experiment Name: At_42deg_Heat_P Parameter: Plant Line Value: WS
  misc_feature: MA Experiment 20000171 PARAMETER Experiment Name: At_42deg_Heat_P Parameter: Temperature (deg C) Value: 42 vs. 22
  misc_feature: MA Experiment 20000171 PARAMETER Experiment Name: At_42deg_Heat_P Parameter: Timepoint (hr) Value: 1
  misc_feature: MA Experiment 20000171 PARAMETER Experiment Name: At_42deg_Heat_P Parameter: Tissue Value: Aerial
  misc_feature: MA Experiment ID: 20000173 Result: Up-regulated in Transcription
  misc_feature: MA Experiment 20000173 PARAMETER Experiment Name: At_42deg_Heat_P Parameter: Age (day) Value: 14
  misc_feature: MA Experiment 20000173 PARAMETER Experiment Name: At_42deg_Heat_P Parameter: Organism Value: A. thaliana
  misc_feature: MA Experiment 20000173 PARAMETER Experiment Name: At_42deg_Heat_P Parameter: Plant Line Value: WS
  misc_feature: MA Experiment 20000173 PARAMETER Experiment Name: At_42deg_Heat_P Parameter: Temperature (deg C) Value: 42 vs. 22
  misc_feature: MA Experiment 20000173 PARAMETER Experiment Name: At_42deg_Heat_P Parameter: Timepoint (hr) Value: 6
  misc_feature: MA Experiment 20000173 PARAMETER Experiment Name: At_42deg_Heat_P Parameter: Tissue Value: Aerial
  misc_feature: MA Experiment ID: 20000182 Result: Up-regulated in Transcription
  misc_feature: MA Experiment 20000182 PARAMETER Experiment Name: At_2mM_SA_P Parameter: Age (day) Value: 14
  misc_feature: MA Experiment 20000182 PARAMETER Experiment Name: At_2mM_SA_P Parameter: Organism Value: A. thaliana
  misc_feature: MA Experiment 20000182 PARAMETER Experiment Name: At_2mM_SA_P Parameter: Plant Line Value: WS
  misc_feature: MA Experiment 20000182 PARAMETER Experiment Name: At_2mM_SA_P Parameter: Timepoint (hr) Value: 6
  misc_feature: MA Experiment 20000182 PARAMETER Experiment Name: At_2mM_SA_P Parameter: Tissue Value: Aerial
  misc_feature: MA Experiment 20000182 PARAMETER Experiment Name: At_2mM_SA_P Parameter: Treatment Value: 2mM SA vs. No Treatment
  misc_feature: MA Experiment ID: 20000184 Result: Down-regulated in Transcription
  misc_feature: MA Experiment 20000184 PARAMETER Experiment Name: At_Shoots__P Parameter: Age (day) Value: 7
  misc_feature: MA Experiment 20000184 PARAMETER Experiment Name: At_Shoots__P Parameter: Tissue Value: Shoots vs. Whole Plant
  misc_feature: MA Experiment ID: 20000234 Result: Down-regulated in Transcription
  misc_feature: MA Experiment 20000234 PARAMETER Experiment Name: At_Siliques_P Parameter: Age (day) Value: 21
  misc_feature: MA Experiment 20000234 PARAMETER Experiment Name: At_Siliques_P Parameter: Organism Value: A. thaliana
  misc_feature: MA Experiment 20000234 PARAMETER Experiment Name: At_Siliques_P Parameter: Plant Line Value: WS
  misc_feature: MA Experiment 20000234 PARAMETER Experiment Name: At_Siliques_P Parameter: Tissue Value: Less Than 5mm Siliques vs. Whole Plant
  misc_feature: MA Experiment ID: 20000235 Result: Down-regulated in Transcription
  misc_feature: MA Experiment 20000235 PARAMETER Experiment Name: At_Siliques_P Parameter: Age (day) Value: 21
  misc_feature: MA Experiment 20000235 PARAMETER Experiment Name: At_Siliques_P Parameter: Organism Value: A. thaliana
  misc_feature: MA Experiment 20000235 PARAMETER Experiment Name: At_Siliques_P Parameter: Plant Line Value: WS
  misc_feature: MA Experiment 20000235 PARAMETER Experiment Name: At_Siliques_P Parameter: Tissue Value: 5-10mm Siliques vs. Whole Plant
  misc_feature: MA Experiment ID: 20000264 Result: Down-regulated in Transcription
  misc_feature: MA Experiment 20000264 PARAMETER Experiment Name: At_Open_Flower_P Parameter: Age (day) Value: 21
  misc_feature: MA Experiment 20000264 PARAMETER Experiment Name: At_Open_Flower_P Parameter: Plant Line Value: WS
  misc_feature: MA Experiment 20000264 PARAMETER Experiment Name: At_Open_Flower_P Parameter: Tissue Value: Open Flower vs. Whole Plant
  misc_feature: MA Experiment ID: 20000265 Result: Down-regulated in Transcription
  misc_feature: MA Experiment 20000265 PARAMETER Experiment Name: At_Open_Flower_P Parameter: Age (day) Value: 21
  misc_feature: MA Experiment 20000265 PARAMETER Experiment Name: At_Open_Flower_P Parameter: Plant Line Value: WS
  misc_feature: MA Experiment 20000265 PARAMETER Experiment Name: At_Open_Flower_P Parameter: Tissue Value: Closed Flower vs. Whole Plant
  misc_feature: MA Experiment ID: 20000286 Result: Down-regulated in Transcription
  misc_feature: MA Experiment 20000286 PARAMETER Experiment Name: At_Open_Flower_P Parameter: Age (day) Value: 21
  misc_feature: MA Experiment 20000286 PARAMETER Experiment Name: At_Open_Flower_P Parameter: Plant Line Value: WS
  misc_feature: MA Experiment 20000286 PARAMETER Experiment Name: At_Open_Flower_P Parameter: Tissue Value: Half Open vs. Whole Plant
  misc_feature: MA Experiment ID: 20000438 Result: Down-regulated in Transcription
  misc_feature: MA Experiment 20000438 PARAMETER Experiment Name: At_Shoots__P Parameter: Age (day) Value: 14
  misc_feature: MA Experiment 20000438 PARAMETER Experiment Name: At_Shoots__P Parameter: Tissue Value: Shoots vs. Whole Plant
  misc_feature: MA Experiment ID: 20000453 Result: Up-regulated in Transcription
  misc_feature: MA Experiment 20000453 PARAMETER Experiment Name: At_100uM_ABA_P Parameter: Age (day) Value: 15
  misc_feature: MA Experiment 20000453 PARAMETER Experiment Name: At_100uM_ABA_P Parameter: Organism Value: A. thaliana
  misc_feature: MA Experiment 20000453 PARAMETER Experiment Name: At_100uM_ABA_P Parameter: Plant Line Value: WS
  misc_feature: MA Experiment 20000453 PARAMETER Experiment Name: At_100uM_ABA_P Parameter: Timepoint (hr) Value: 24
  misc_feature: MA Experiment 20000453 PARAMETER Experiment Name: At_100uM_ABA_P Parameter: Tissue Value: Aerial
  misc_feature: MA Experiment 20000453 PARAMETER Experiment Name: At_100uM_ABA_P Parameter: Treatment Value: 100uM ABA vs. No Treatment
  misc_feature: MA Experiment ID: 20000527 Result: Down-regulated in Transcription
  misc_feature: MA Experiment 20000527 PARAMETER Experiment Name: At_10percent_PEG_P Parameter: Age (day) Value: 20
  misc_feature: MA Experiment 20000527 PARAMETER Experiment Name: At_10percent_PEG_P Parameter: Organism Value: A. thaliana
  misc_feature: MA Experiment 20000527 PARAMETER Experiment Name: At_10percent_PEG_P Parameter: Plant Line Value: WS
  misc_feature: MA Experiment 20000527 PARAMETER Experiment Name: At_10percent_PEG_P Parameter: Timepoint (day) Value: 20
  misc_feature: MA Experiment 20000527 PARAMETER Experiment Name: At_10percent_PEG_P Parameter: Tissue Value: Whole Plant
  misc_feature: MA Experiment 20000527 PARAMETER Experiment Name: At_10percent_PEG_P Parameter: Treatment Value: 10percent PEG vs. No Treatment
  misc_feature: MA Experiment ID: 20001450 Result: Down-regulated in Transcription
  misc_feature: MA Experiment 20001450 PARAMETER Experiment Name: At_Far-red-induction_P Parameter: Age (day) Value: 7
  misc_feature: MA Experiment 20001450 PARAMETER Experiment Name: At_Far-red-induction_P Parameter: Light Value: Far-red vs. White
  misc_feature: MA Experiment 20001450 PARAMETER Experiment Name: At_Far-red-induction_P Parameter: Organism Value: A. thaliana
  misc_feature: MA Experiment 20001450 PARAMETER Experiment Name: At_Far-red-induction_P Parameter: Plant Line Value: Columbia
  misc_feature: MA Experiment 20001450 PARAMETER Experiment Name: At_Far-red-induction_P Parameter: Timepoint (hr) Value: 8
  misc_feature: MA Experiment 20001450 PARAMETER Experiment Name: At_Far-red-induction_P Parameter: Tissue Value: Whole Plant
  misc_feature: MA Experiment ID: 20001451 Result: Up-regulated in Transcription
  misc_feature: MA Experiment 20001451 PARAMETER Experiment Name: At_Far-red-induction_P Parameter: Age (day) Value: 7
  misc_feature: MA Experiment 20001451 PARAMETER Experiment Name: At_Far-red-induction_P Parameter: Light Value: Far-red vs. White
  misc_feature: MA Experiment 20001451 PARAMETER Experiment Name: At_Far-red-induction_P Parameter: Organism Value: A. thaliana
  misc_feature: MA Experiment 20001451 PARAMETER Experiment Name: At_Far-red-induction_P Parameter: Plant Line Value: Columbia
  misc_feature: MA Experiment 20001451 PARAMETER Experiment Name: At_Far-red-induction_P Parameter: Timepoint (hr) Value: 24
  misc_feature: MA Experiment 20001451 PARAMETER Experiment Name: At_Far-red-induction_P Parameter: Tissue Value: Whole Plant
  misc_feature: MA Experiment ID: 20001558 Result: Down-regulated in Transcription
  misc_feature: MA Experiment 20001558 PARAMETER Experiment Name: At_Drought_Soil_Dry_P Parameter: Age (day) Value: 27
  misc_feature: MA Experiment 20001558 PARAMETER Experiment Name: At_Drought_Soil_Dry_P Parameter: Organism Value: A. thaliana
  misc_feature: MA Experiment 20001558 PARAMETER Experiment Name: At_Drought_Soil_Dry_P Parameter: Plant Line Value: WS
  misc_feature: MA Experiment 20001558 PARAMETER Experiment Name: At_Drought_Soil_Dry_P Parameter: Post Timepoint (hr) Value: 6
  misc_feature: MA Experiment 20001558 PARAMETER Experiment Name: At_Drought_Soil_Dry_P Parameter: Post-Treatment Value: Re-Water vs. No Drought
  misc_feature: MA Experiment 20001558 PARAMETER Experiment Name: At_Drought_Soil_Dry_P Parameter: Timepoint (day) Value: 13
  misc_feature: MA Experiment 20001558 PARAMETER Experiment Name: At_Drought_Soil_Dry_P Parameter: Treatment Value: Drought vs. No Drought
  misc_feature: MA Experiment ID: 20001560 Result: Down-regulated in Transcription
  misc_feature: MA Experiment 20001560 PARAMETER Experiment Name: At_Drought_Soil_Dry_P Parameter: Age (day) Value: 28
  misc_feature: MA Experiment 20001560 PARAMETER Experiment Name: At_Drought_Soil_Dry_P Parameter: Organism Value: A. thaliana
  misc_feature: MA Experiment 20001560 PARAMETER Experiment Name: At_Drought_Soil_Dry_P Parameter: Plant Line Value: WS
  misc_feature: MA Experiment 20001560 PARAMETER Experiment Name: At_Drought_Soil_Dry_P Parameter: Post Timepoint (hr) Value: None
  misc_feature: MA Experiment 20001560 PARAMETER Experiment Name: At_Drought_Soil_Dry_P Parameter: Post-Treatment Value: None
  misc_feature: MA Experiment 20001560 PARAMETER Experiment Name: At_Drought_Soil_Dry_P Parameter: Timepoint (day) Value: 14
  misc_feature: MA Experiment 20001560 PARAMETER Experiment Name: At_Drought_Soil_Dry_P Parameter: Treatment Value: Drought vs. No Drought
tcgtttatatatttgttttacttgttttgcacatacacacaaaaataaaaaagactttatatttatttactttttaatcacacggattagctccggcgaagtatggtcgtcgtcttcatcttcttcctccatcatcagatttttccttaaatggaagaaaccaaacgaaactccgatcttctccgttctcgtgttttcctctctggcttttattgctgggattgggaatttctcaccgctctcttgctttttagttgctgattctttttccttcgactttctatttccaatctttcttcttctctttgtgtattagattatttttagttttatttttctgtggtaaaataaaaaaagttcgccggagatgacggctgtgacggcggcgcaaagatcagttccggcgccgtttttaagcaaaacgtatcagctagttgatgatcatagcacagacgacgtcgtttcatggaacgaagaaggaacagcttttgtcgtgtggaaaacagcagagtttgctaaagatcttcttcctcaatacttcaagcataataatttctcaagcttcattcgtcagctcaacacttacggatttcgtaaaactgtaccggataaatgggaatttgcaaacgattatttccggagaggcggggaggatctgttgacggacatacgacggcgtaaatcggtgattgcttcaacggcggggaaatgtgttgttgttggttcgccttctgagtctaattctggtggtggtgatgatcacggttcaagctccacgtcatcacccggttcgtcgaagaatcctggttcggtggagaacatggttgctgatttatcaggagagaacgagaagcttaaacgtgaaaacaataacttgagctcggagctcgcggcggcgaagaagcagcgcgatgagctagtgacgttcttgacgggtcatctgaaagtaagaccggaacaaatcgataaaatgatcaaaggagggaaatttaaaccggtggagtctgacgaagagagtgagtgcgaaggttgcgacggcggcggaggagcagaggagggggtaggtgaaggattgaaattgtttggggtgtggttgaaaggagagagaaaaaagagggaccgggatgaaaagaattatgtggtgagtgggtcccgtatgacggaaataaagaacgtggactttcacgcgccgttgtggaaaagcagcaaagtctgcaactaaaaaaagagtagaagactgttcaaaccagcgtgtgacacgtcatcgacgacgacgaaaaaaatgatttaaaaaactatttttttccgtaaggaagaaaagttatttttatgttttaaaaaggtgaagaaggtccagaaggatcaacgcaaatatataaatggattttcatgtattatataatttaattagtgtattaagaaaataaaacagatgttgaagttttattgttgcttaatttatgtcttcataatgtaaaaaagcatgtgaaatacttggtc

SEQ ID NO: 79332 - protein, 284 aa, Arabidopsis thaliana
  peptide (1)..(284): Ceres Seq. ID no. 12650919
  misc_feature (12)..(203): Pfam Name: HSF-type DNA-binding Pfam Description: HSF-type DNA-binding
  misc_feature (1)..(284): Homolog of NCBI NO: 15234583 NR Description: heat shock transcription factor HSF4; protein id: [Arabidopsis thaliana] >gi|12643794|sp|Q96320|HSF4_ARATH Heat factor protein 4 (HSF 4) (Heat shock transcription factor 4)
  misc_feature (1)..(284): Homolog of NCBI NO: 2129612 NR Description: heat shock transcription factor HSF4 - thaliana >gi|1619921|gb|AAC31756.1| heat shock transcription
  misc_feature (7)..(284): Homolog of NCBI NO: 5821136 NR Description: heat shock factor [Nicotiana tabacum]
  misc_feature (7)..(280): Homolog of NCBI NO: 123684 NR Description: HEAT SHOCK FACTOR PROTEIN HSF24 (HEAT SHOCK FACTOR 24) (HSTF 24) (HEAT STRESS TRANSCRIPTION FACTOR)
MTAVTAAQRSVPAPFLSKTYQLVDDHSTDDVVSWNEEGTAFVVWKTAEFAKDLLPQYFKHNNFSSFIRQLNTYGFRKTVPDKWEFANDYFRRGGEDLLTDIRRRKSVIASTAGKCVVVGSPSESNSGGGDDHGSSSTSSPGSSKNPGSVENMVADLSGENEKLKRENNNLSSELAAAKKQRDELVTFLTGHLKVRPEQIDKMIKGGKFKPVESDEESECEGCDGGGGAEEGVGEGLKLFGVWLKGERKKRDRDEKNYVVSGSRMTEIKNVDFHAPLWKSSKVCN

SEQ ID NO: 79333 - DNA, 1245 bp, Arabidopsis thaliana
  misc_feature (1)..(1245): Ceres Seq. ID no. 12650924
  misc_feature: MA Experiment ID: 108434 Result: Down-regulated in Transcription
  misc_feature: MA Experiment 108434 PARAMETER Experiment Name: At_Root_Tips_cDNA_P Parameter: Tissue Value: Root Tips
  misc_feature: MA Experiment ID: 108462 Result: Up-regulated in Transcription
  misc_feature: MA Experiment 108462 PARAMETER Experiment Name: At_Germinating_Seeds_cDNA_P Parameter: Age (day) Value: 2 vs. 0
  misc_feature: MA Experiment 108462 PARAMETER Experiment Name: At_Germinating_Seeds_cDNA_P Parameter: Tissue Value: Germinating Seeds
  misc_feature: MA Experiment ID: 108463 Result: Up-regulated in Transcription
  misc_feature: MA Experiment 108463 PARAMETER Experiment Name: At_Germinating_Seeds_cDNA_P Parameter: Age (day) Value: 3 vs. 0
  misc_feature: MA Experiment 108463 PARAMETER Experiment Name: At_Germinating_Seeds_cDNA_P Parameter: Tissue Value: Germinating Seeds
  misc_feature: MA Experiment ID: 108464 Result: Up-regulated in Transcription
  misc_feature: MA Experiment 108464 PARAMETER Experiment Name: At_Germinating_Seeds_cDNA_P Parameter: Age (day) Value: 4 vs. 0
  misc_feature: MA Experiment 108464 PARAMETER Experiment Name: At_Germinating_Seeds_cDNA_P Parameter: Tissue Value: Germinating Seeds
  misc_feature: MA Experiment ID: 108594 Result: Down-regulated in Transcription
  misc_feature: MA Experiment 108594 PARAMETER Experiment Name: At_Ler-rhl_Root_cDNA_P Parameter: Plant Line Value: null
atggagaacgaatcgccctccaagaaaaacatgccgccatcgtgcggaacactcgtaaccatcctcagcctcgatggtggtggagtcagaggaatcatcgccggagtaatccttgcctatctcgaaaaacaacttcaggaactagatggagaacacgtgagggtagctgattatttcgacgtgatagccggaactagcaccggtggtcttgtgacggcgatgttgactgcaccggacgagaacggtagacctcgtttcgcggctaaagaaattgtgccgttttaccttgaacattgtcccaagatatttccccagcccacaggcgtgcttgctctgttaccgaagcttcctaagcttctgtctggtccaaagtacagcggaaactatctgcgaactacacttggtaagcttcttggagagacaaaacttcgccagacactcacaaacgttgttatacctaccttcgacatcaagacacttcaacccactattttctcatcttaccaggcgttgactgatcctagcttggacgtcaaggtatcggacatatgcatcggcacatcagctgctcccacttactttcctccttattacttttccaacgaagacagtcaaggcaagactaggcattttaacctcgttgatggcggggttactgctaataacccgactttggtggccatgactgctgtgacgaagcagattgtgaataataaccctgatatgggtactctcaatccgttaggttacgaccagtttctcgttatatcgataggaacaggatctgcaaaaaaagaagagaggtacagcgcaaagaaggctgcaaaatggggaatcatatcttggttatatgaagatggaactactccgatattagacattacctttgaatcaagccgcgacatagtccattatcacagctctgttgtgtttaaagccctacaatctgaagacaagtacctcagaatcgatgatgatacattggaaggagatgcaagcactctggatctatcgacaaagtctaatttagaaaatcttataaaacttggagagaagatgctgacaaacagagtcatgcaaatgaacatcgacactggtacatatgaacctgctgctgaaaatattaacaatgatgaacaactcaagaggtttgcgaaaatcctctccgaggaaaggaaattaaggagaaagaggagcgacaaaatgactaaagattcatcaatcggatcacaagagatcaagtaa

SEQ ID NO: 79334 - protein, 414 aa, Arabidopsis thaliana
  peptide (1)..(414): Ceres Seq. ID no. 12650925
  misc_feature (22)..(228): Pfam Name: Patatin-like phospholipase Pfam Description: Patatin-like phospholipase
  misc_feature (1)..(414): Homolog of NCBI NO: 15234602 NR Description: patatin, putative; protein id: At4g37060.1
  misc_feature (1)..(414): Homolog of NCBI NO: 30690843 NR Description: patatin, putative [Arabidopsis thaliana]
  misc_feature (5)..(414): Homolog of NCBI NO: 25296168 NR Description: patatin-like protein [imported] - Arabidopsis
  misc_feature (1)..(383): Homolog of NCBI NO: 18419963 NR Description: patatin, putative; protein id: At4g37070.1
  misc_feature (1)..(383): Homolog of NCBI NO: 21592617 NR Description: patatin-like protein [Arabidopsis thaliana]
  misc_feature (1)..(383): Homolog of NCBI NO: 30690848 NR Description: patatin, putative [Arabidopsis thaliana]
  misc_feature (8)..(407): Homolog of NCBI NO: 15239919 NR Description: patatin, putative; protein id: At5g43590.1
  misc_feature (11)..(402): Homolog of NCBI NO: 25296165 NR Description: patatin-like protein [imported] - Arabidopsis
  misc_feature (4)..(407): Homolog of NCBI NO: 9794868 NR Description: patatin-like protein 1 [Nicotiana tabacum]
  misc_feature (1)..(399): Homolog of NCBI NO: 15225332 NR Description: patatin, putative; protein id: At2g26560.1, by cDNA: 1999., supported by cDNA: gi_17065135, supported by gi_20259913 [Arabidopsis thaliana] >gi|7442020|pir||T00989
MENESPSKKNMPPSCGTLVTILSLDGGGVRGIIAGVILAYLEKQLQELDGEHVRVADYFDVIAGTSTGGLVTAMLTAPDENGRPRFAAKEIVPFYLEHCPKIFPQPTGVLALLPKLPKLLSGPKYSGNYLRTTLGKLLGETKLRQTLTNVVIPTFDIKTLQPTIFSSYQALTDPSLDVKVSDICIGTSAAPTYFPPYYFSNEDSQGKTRHFNLVDGGVTANNPTLVAMTAVTKQIVNNNPDMGTLNPLGYDQFLVISIGTGSAKKEERYSAKKAAKWGIISWLYEDGTTPILDITFESSRDIVHYHSSVVFKALQSEDKYLRIDDDTLEGDASTLDLSTKSNLENLIKLGEKMLTNRVMQMNIDTGTYEPAAENINNDEQLKRFAKILSEERKLRRKRSDKMTKDSSIGSQEIK

SEQ ID NO: 79335 - protein, 404 aa, Arabidopsis thaliana
  peptide (1)..(404): Ceres Seq. ID no. 12650926
  misc_feature (12)..(218): Pfam Name: Patatin-like phospholipase Pfam Description: Patatin-like phospholipase
  misc_feature (1)..(404): Homolog of NCBI NO: 15234602 NR Description: patatin, putative; protein id: At4g37060.1
  misc_feature (1)..(404): Homolog of NCBI NO: 30690843 NR Description: patatin, putative [Arabidopsis thaliana]
  misc_feature (1)..(404): Homolog of NCBI NO: 25296168 NR Description: patatin-like protein [imported] - Arabidopsis
  misc_feature (1)..(373): Homolog of NCBI NO: 18419963 NR Description: patatin, putative; protein id: At4g37070.1
  misc_feature (1)..(373): Homolog of NCBI NO: 21592617 NR Description: patatin-like protein [Arabidopsis thaliana]
  misc_feature (1)..(373): Homolog of NCBI NO: 30690848 NR Description: patatin, putative [Arabidopsis thaliana]
  misc_feature (1)..(397): Homolog of NCBI NO: 15239919 NR Description: patatin, putative; protein id: At5g43590.1
  misc_feature (1)..(392): Homolog of NCBI NO: 25296165 NR Description: patatin-like protein [imported] - Arabidopsis
  misc_feature (1)..(397): Homolog of NCBI NO: 9794868 NR Description: patatin-like protein 1 [Nicotiana tabacum]
  misc_feature (1)..(389): Homolog of NCBI NO: 15225332 NR Description: patatin, putative; protein id: At2g26560.1, by cDNA: 1999., supported by cDNA: gi_17065135, supported by gi_20259913 [Arabidopsis thaliana] >gi|7442020|pir||T00989
MPPSCGTLVTILSLDGGGVRGIIAGVILAYLEKQLQELDGEHVRVADYFDVIAGTSTGGLVTAMLTAPDENGRPRFAAKEIVPFYLEHCPKIFPQPTGVLALLPKLPKLLSGPKYSGNYLRTTLGKLLGETKLRQTLTNVVIPTFDIKTLQPTIFSSYQALTDPSLDVKVSDICIGTSAAPTYFPPYYFSNEDSQGKTRHFNLVDGGVTANNPTLVAMTAVTKQIVNNNPDMGTLNPLGYDQFLVISIGTGSAKKEERYSAKKAAKWGIISWLYEDGTTPILDITFESSRDIVHYHSSVVFKALQSEDKYLRIDDDTLEGDASTLDLSTKSNLENLIKLGEKMLTNRVMQMNIDTGTYEPAAENINNDEQLKRFAKILSEERKLRRKRSDKMTKDSSIGSQEIK

SEQ ID NO: 79336 - protein, 341 aa, Arabidopsis thaliana
  peptide (1)..(341): Ceres Seq. ID no. 12650927
  misc_feature (1)..(155): Pfam Name: Patatin-like phospholipase Pfam Description: Patatin-like phospholipase
  misc_feature (1)..(341): Homolog of NCBI NO: 15234602 NR Description: patatin, putative; protein id: At4g37060.1
  misc_feature (1)..(341): Homolog of NCBI NO: 30690843 NR Description: patatin, putative [Arabidopsis thaliana]
  misc_feature (1)..(341): Homolog of NCBI NO: 25296168 NR Description: patatin-like protein [imported] - Arabidopsis
  misc_feature (1)..(310): Homolog of NCBI NO: 18419963 NR Description: patatin, putative; protein id: At4g37070.1
  misc_feature (1)..(310): Homolog of NCBI NO: 21592617 NR Description: patatin-like protein [Arabidopsis thaliana]
  misc_feature (1)..(310): Homolog of NCBI NO: 30690848 NR Description: patatin, putative [Arabidopsis thaliana]
  misc_feature (1)..(334): Homolog of NCBI NO: 15239919 NR Description: patatin, putative; protein id: At5g43590.1
  misc_feature (1)..(329): Homolog of NCBI NO: 25296165 NR Description: patatin-like protein [imported] - Arabidopsis
  misc_feature (1)..(334): Homolog of NCBI NO: 9794868 NR Description: patatin-like protein 1 [Nicotiana tabacum]
  misc_feature (1)..(326): Homolog of NCBI NO: 15225332 NR Description: patatin, putative; protein id: At2g26560.1, by cDNA: 1999., supported by cDNA: gi_17065135, supported by gi_20259913 [Arabidopsis thaliana] >gi|7442020|pir||T00989
MLTAPDENGRPRFAAKEIVPFYLEHCPKIFPQPTGVLALLPKLPKLLSGPKYSGNYLRTTLGKLLGETKLRQTLTNVVIPTFDIKTLQPTIFSSYQALTDPSLDVKVSDICIGTSAAPTYFPPYYFSNEDSQGKTRHFNLVDGGVTANNPTLVAMTAVTKQIVNNNPDMGTLNPLGYDQFLVISIGTGSAKKEERYSAKKAAKWGIISWLYEDGTTPILDITFESSRDIVHYHSSVVFKALQSEDKYLRIDDDTLEGDASTLDLSTKSNLENLIKLGEKMLTNRVMQMNIDTGTYEPAAENINNDEQLKRFAKILSEERKLRRKRSDKMTKDSSIGSQEIK

SEQ ID NO: 79337 - DNA, 1626 bp, Arabidopsis thaliana
  misc_feature (1)..(1626): Ceres Seq. ID no. 12650932
  misc_feature: MA Experiment ID: 20000307 Result: Up-regulated in Transcription
  misc_feature: MA Experiment 20000307 PARAMETER Experiment Name: At_Germinating_Seeds_Sub_P Parameter: Age (hr) Value: 24 vs. 0
  misc_feature: MA Experiment 20000307 PARAMETER Experiment Name: At_Germinating_Seeds_Sub_P Parameter: Organism Value: A. thaliana
  misc_feature: MA Experiment 20000307 PARAMETER Experiment Name: At_Germinating_Seeds_Sub_P Parameter: Plant Line Value: WS
  misc_feature: MA Experiment 20000307 PARAMETER Experiment Name: At_Germinating_Seeds_Sub_P Parameter: Tissue Value: Germinating Seeds
  misc_feature: MA Experiment ID: 20000352 Result: Down-regulated in Transcription
  misc_feature: MA Experiment 20000352 PARAMETER Experiment Name: At_Drought_Sub_P Parameter: Age (day) Value: 7
  misc_feature: MA Experiment 20000352 PARAMETER Experiment Name: At_Drought_Sub_P Parameter: Organism Value: A. thaliana
  misc_feature: MA Experiment 20000352 PARAMETER Experiment Name: At_Drought_Sub_P Parameter: Plant Line Value: WS
  misc_feature: MA Experiment 20000352 PARAMETER Experiment Name: At_Drought_Sub_P Parameter: Timepoint (hr) Value: 6
  misc_feature: MA Experiment 20000352 PARAMETER Experiment Name: At_Drought_Sub_P Parameter: Tissue Value: Whole Plant
  misc_feature: MA Experiment 20000352 PARAMETER Experiment Name: At_Drought_Sub_P Parameter: Treatment Value: Drought vs. No Drought
atgaaacagaccaatctcctggtatgtaaattattcataggagccctgttttggttaggctctgttttggttaatgcagaagacccatatatgttctacacttggactgttacttatggtacaagatctcctttaggtgttcctcaacaggtcattcttatcaatggacagttccctggtccagcgattgaagcggtcacaaacaacaacattgttgttaatctcattaacaagctggacgagccattcctcatcacctggaatggagtgaagcagaggaggacatcgtggcaagatggagtattgggaacaaactgtccgatccaaccaaactcgaactggacttaccagtttcaacttaaagatcaaatcggtacttacacttacttcgcttccacgtcactgcaccgagccagtggtgcttttggtgctctcaacattaaccagagatctgttattacgactccttatccaacacccgatggagatttcaccctcctcgtctctgactggttctcaaatatgacccacaaggacttgcgaaaatcgctcgacgcaggctctgctcttcctcttcctgatgctcttctcatcaatggagtctctaaaggtttaatctttaccggtcaacaaggtaaaacatacaagttccgggtatccaatgtcggtatagctacatcgataaattttaggattcaaaatcacacaatgagcctcattgaagtagaaggcgctcacactcttcaggagagttatgagtcgcttgacgtccacgttggtcagtccatgaccgtcctggtcactttaaaagcttctgtgagggactatttcatcgtggcctcaacccggtttacaaaaccggtactaaccacaaccgcgagtctccgttaccaaggctccaaaaacgctgcatatgggcctctccccattggtcctacttaccatatccattggtccatgaaacaagcaagaaccattaggatgaatttgacggcaaatgctgcaaggccaaacccacaaggatcatttcattacgggaccataccaataaaccgaactctagtcctagccaatgcagccacattgatctacgggaagcttcggtacacagtaaaccgaatatcatacatcaacccaacaacaccattgaaactcgctgattggtacaacatctcgggcgtgttcgatttcaagacaatcattagcactccaacaaccggaccggctcatattggtacatcggttatcgacgttgaacttcatgagttcgtcgaaatcgttttccaaaacgacgaaagatcaattcaatcttggcacatggacggtactagcgcctatgctgtcggatacgggtcagggacatggaacgtgaccatgaggaaacgttacaacttggttgatgctgttccaagacacacttttcaggtgtatccgttatcgtggacaaccatattggtgtcgttggataacaaaggaatgtggaatctaaggtcacaaatatggtcgaggaggtatttaggacaagagctctatgttcgtgtttggaacgatgagaagtctctctacactgaagctgagcctcctcttaacgttctttattgcggcaaagccaaacgtcccctttag

SEQ ID NO: 79338 - protein, 541 aa, Arabidopsis thaliana
  peptide (1)..(541): Ceres Seq. ID no. 12650933
  misc_feature (1)..(541): Homolog of NCBI NO: 15235448 NR Description: pectinesterase (pectin methylesterase) family; id: At4g37160.1 [Arabidopsis thaliana] >gi|25285553|pir||A85439
  misc_feature (1)..(540): Homolog of NCBI NO: 18400335 NR Description: pectinesterase (pectin methylesterase) family; id: At2g23630.1 [Arabidopsis thaliana] >gi|7432991|pir||T01152
  misc_feature (2)..(537): Homolog of NCBI NO: 21536987 NR Description: pectinesterase-like protein [Arabidopsis thaliana]
  misc_feature (2)..(537): Homolog of NCBI NO: 9758142 NR Description: pectinesterase like protein [Arabidopsis thaliana]
  misc_feature (2)..(537): Homolog of NCBI NO: 18425129 NR Description: pectinesterase (pectin methylesterase) family; id: At5g66920.1, supported by cDNA: 116979., supported by cDNA: [Arabidopsis thaliana] >gi|20453070|gb|AAM19780.1|
  misc_feature (208)..(537): Homolog of NCBI NO: 34394659 NR Description: putative PS60 [Oryza sativa (japonica
  misc_feature (1)..(248): Homolog of NCBI NO: 34394659 NR Description: putative PS60 [Oryza sativa (japonica
  misc_feature (9)..(538): Homolog of NCBI NO: 15234688 NR Description: pectinesterase (pectin methylesterase), putative; id: At4g22010.1, supported by cDNA: gi_19698976 [Arabidopsis
  misc_feature (4)..(541): Homolog of NCBI NO: 16648889 NR Description: Unknown protein [Arabidopsis thaliana]
  misc_feature (4)..(541): Homolog of NCBI NO: 18400509 NR Description: pectinesterase (pectin methylesterase), putative; id: At1g41830.1, supported by cDNA: gi_16648888 [Arabidopsis
MKQTNLLVCKLFIGALFWLGSVLVNAEDPYMFYTWTVTYGTRSPLGVPQQVILINGQFPGPAIEAVTNNNIVVNLINKLDEPFLITWNGVKQRRTSWQDGVLGTNCPIQPNSNWTYQFQLKDQIGTYTYFASTSLHRASGAFGALNINQRSVITTPYPTPDGDFTLLVSDWFSNMTHKDLRKSLDAGSALPLPDALLINGVSKGLIFTGQQGKTYKFRVSNVGIATSINFRIQNHTMSLIEVEGAHTLQESYESLDVHVGQSMTVLVTLKASVRDYFIVASTRFTKPVLTTTASLRYQGSKNAAYGPLPIGPTYHIHWSMKQARTIRMNLTANAARPNPQGSFHYGTIPINRTLVLANAATLIYGKLRYTVNRISYINPTTPLKLADWYNISGVFDFKTIISTPTTGPAHIGTSVIDVELHEFVEIVFQNDERSIQSWHMDGTSAYAVGYGSGTWNVTMRKRYNLVDAVPRHTFQVYPLSWTTILVSLDNKGMWNLRSQIWSRRYLGQELYVRVWNDEKSLYTEAEPPLNVLYCGKAKRPL

SEQ ID NO: 79339 - protein, 511 aa, Arabidopsis thaliana
  peptide (1)..(511): Ceres Seq. ID no. 12650934
  misc_feature (1)..(511): Homolog of NCBI NO: 15235448 NR Description: pectinesterase (pectin methylesterase) family; id: At4g37160.1 [Arabidopsis thaliana] >gi|25285553|pir||A85439
  misc_feature (1)..(510): Homolog of NCBI NO: 18400335 NR Description: pectinesterase (pectin methylesterase) family; id: At2g23630.1 [Arabidopsis thaliana] >gi|7432991|pir||T01152
  misc_feature (1)..(507): Homolog of NCBI NO: 21536987 NR Description: pectinesterase-like protein [Arabidopsis thaliana]
  misc_feature (1)..(507): Homolog of NCBI NO: 9758142 NR Description: pectinesterase like protein [Arabidopsis thaliana]
  misc_feature (1)..(507): Homolog of NCBI NO: 18425129 NR Description: pectinesterase (pectin methylesterase) family; id: At5g66920.1, supported by cDNA: 116979., supported by cDNA: [Arabidopsis thaliana] >gi|20453070|gb|AAM19780.1|
  misc_feature (178)..(507): Homolog of NCBI NO: 34394659 NR Description: putative PS60 [Oryza sativa (japonica
  misc_feature (1)..(218): Homolog of NCBI NO: 34394659 NR Description: putative PS60 [Oryza sativa (japonica
  misc_feature (1)..(508): Homolog of NCBI NO: 15234688 NR Description: pectinesterase (pectin methylesterase), putative; id: At4g22010.1, supported by cDNA: gi_19698976 [Arabidopsis
  misc_feature (1)..(511): Homolog of NCBI NO: 16648889 NR Description: Unknown protein [Arabidopsis thaliana]
  misc_feature (1)..(511): Homolog of NCBI NO: 25285550 NR Description: probable pectinesterase [imported] - Arabidopsis >gi|9802764|gb|AAF99833.1|AC008046_5 Putative pectinesterase
MFYTWTVTYGTRSPLGVPQQVILINGQFPGPAIEAVTNNNIVVNLINKLDEPFLITWNGVKQRRTSWQDGVLGTNCPIQPNSNWTYQFQLKDQIGTYTYFASTSLHRASGAFGALNINQRSVITTPYPTPDGDFTLLVSDWFSNMTHKDLRKSLDAGSALPLPDALLINGVSKGLIFTGQQGKTYKFRVSNVGIATSINFRIQNHTMSLIEVEGAHTLQESYESLDVHVGQSMTVLVTLKASVRDYFIVASTRFTKPVLTTTASLRYQGSKNAAYGPLPIGPTYHIHWSMKQARTIRMNLTANAARPNPQGSFHYGTIPINRTLVLANAATLIYGKLRYTVNRISYINPTTPLKLADWYNISGVFDFKTIISTPTTGPAHIGTSVIDVELHEFVEIVFQNDERSIQSWHMDGTSAYAVGYGSGTWNVTMRKRYNLVDAVPRHTFQVYPLSWTTILVSLDNKGMWNLRSQIWSRRYLGQELYVRVWNDEKSLYTEAEPPLNVLYCGKAKRPL

SEQ ID NO: 79340 - protein, 367 aa, Arabidopsis thaliana
  peptide (1)..(367): Ceres Seq. ID no. 12650935
  misc_feature (1)..(367): Homolog of NCBI NO: 15235448 NR Description: pectinesterase (pectin methylesterase) family; id: At4g37160.1 [Arabidopsis thaliana] >gi|25285553|pir||A85439
  misc_feature (1)..(366): Homolog of NCBI NO: 18400335 NR Description: pectinesterase (pectin methylesterase) family; id: At2g23630.1 [Arabidopsis thaliana] >gi|7432991|pir||T01152
  misc_feature (1)..(363): Homolog of NCBI NO: 21536987 NR Description: pectinesterase-like protein [Arabidopsis thaliana]
  misc_feature (1)..(363): Homolog of NCBI NO: 9758142 NR Description: pectinesterase like protein [Arabidopsis thaliana]
  misc_feature (1)..(363): Homolog of NCBI NO: 18425129 NR Description: pectinesterase (pectin methylesterase) family; id: At5g66920.1, supported by cDNA: 116979., supported by cDNA: [Arabidopsis thaliana] >gi|20453070|gb|AAM19780.1|
  misc_feature (34)..(363): Homolog of NCBI NO: 34394659 NR Description: putative PS60 [Oryza sativa (japonica
  misc_feature (1)..(74): Homolog of NCBI NO: 34394659 NR Description: putative PS60 [Oryza sativa (japonica
  misc_feature (1)..(364): Homolog of NCBI NO: 15234688 NR Description: pectinesterase (pectin methylesterase), putative; id: At4g22010.1, supported by cDNA: gi_19698976 [Arabidopsis
  misc_feature (1)..(367): Homolog of NCBI NO: 16648889 NR Description: Unknown protein [Arabidopsis thaliana]
  misc_feature (1)..(367): Homolog of NCBI NO: 18400509 NR Description: pectinesterase (pectin methylesterase), putative; id: At1g41830.1, supported by cDNA: gi_16648888 [Arabidopsis
MTHKDLRKSLDAGSALPLPDALLINGVSKGLIFTGQQGKTYKFRVSNVGIATSINFRIQNHTMSLIEVEGAHTLQESYESLDVHVGQSMTVLVTLKASVRDYFIVASTRFTKPVLTTTASLRYQGSKNAAYGPLPIGPTYHIHWSMKQARTIRMNLTANAARPNPQGSFHYGTIPINRTLVLANAATLIYGKLRYTVNRISYINPTTPLKLADWYNISGVFDFKTIISTPTTGPAHIGTSVIDVELHEFVEIVFQNDERSIQSWHMDGTSAYAVGYGSGTWNVTMRKRYNLVDAVPRHTFQVYPLSWTTILVSLDNKGMWNLRSQIWSRRYLGQELYVRVWNDEKSLYTEAEPPLNVLYCGKAKRPL

SEQ ID NO: 79341 - DNA, 2076 bp, Arabidopsis thaliana
  misc_feature (1)..(2076): Ceres Seq. ID no. 12650936
  misc_feature: MA Experiment ID: 20001451 Result: Down-regulated in Transcription
  misc_feature: MA Experiment 20001451 PARAMETER Experiment Name: At_Far-red-induction_P Parameter: Age (day) Value: 7
  misc_feature: MA Experiment 20001451 PARAMETER Experiment Name: At_Far-red-induction_P Parameter: Light Value: Far-red vs. White
  misc_feature: MA Experiment 20001451 PARAMETER Experiment Name: At_Far-red-induction_P Parameter: Organism Value: A. thaliana
  misc_feature: MA Experiment 20001451 PARAMETER Experiment Name: At_Far-red-induction_P Parameter: Plant Line Value: Columbia
  misc_feature: MA Experiment 20001451 PARAMETER Experiment Name: At_Far-red-induction_P Parameter: Timepoint (hr) Value: 24
  misc_feature: MA Experiment 20001451 PARAMETER Experiment Name: At_Far-red-induction_P Parameter: Tissue Value: Whole Plant
atgaatcattcaaatgcgagaaagttaactactctccatggatttatattaaagagaaatctatcatcttttcacgcctcactgaagcggttttcagataaaaagttcttcaatccgaaccatgaggacggtggtgttgtggtggagcgattatgtagagctaatagatttggtgaagccattgatgtattatgtggacagaagctcttaagagaagctgttcaacttctgggtcgggctaagaagccacctgcttctacttattgcaatctcattcaagtttgtagccaaacacgtgctcttgaagaaggtaagaaggtccatgaacacattaggacttctgggtttgtacctgggattgttatatggaaccgtcttttgagaatgtatgcgaaatgtggtagcttggttgatgcacggaaggtgttcgacgaaatgccgaatagagatttgtgttcgtggaatgtaatggttaatgggtatgcggaggttgggttgcttgaggaagcgaggaagttgtttgatgaaatgactgaaaaagatagttattcgtggacggctatggttacgggttatgttaagaaggatcagcctgaagaggcattggtgttgtatagtttgatgcaacgggtaccgaattcaagaccaaacatttttacagtttctattgcagtagctgctgctgctgcggttaaatgtatccgtagagggaaagagattcatgggcatatcgttcgagctggtttggattcagatgaagtgctttggagttcattgatggatatgtatggaaaatgtggctgtatcgatgaagcaagaaacatatttgataagattgttgagaaagatgttgtctcgtggacatcaatgatagatagatatttcaagtctagtagatggcgggaagggttttctttgttttccgagttggtaggttcttgtgaacggcccaatgaatacacttttgctggagtcttgaatgcttgtgctgatctcacaacagaagagctagggaagcaagttcatggatatatgacaagagttgggtttgatccttactcttttgcatcaagctctcttgtagatatgtacaccaaatgtggaaatattgaaagtgcaaaacacgttgtcgatggatgtcctaaacccgatttagtttcttggacttctttgatcggagggtgtgctcagaatgggcaacctgatgaagccttgaaatatttcgacttgctcctcaaatccggcactaaacctgaccatgttacctttgtaaacgtcctctccgcttgtactcatgccggattggtcgaaaaaggactcgaattcttctattctataactgagaaacacaggttatctcatacttctgatcattacacttgtcttgttgatcttttagctcggtctggaagattcgaacagttaaagagcgtcattagtgaaatgccgatgaaaccgagtaagtttctgtgggcttctgtgctcggtgggtgtagcacttacggaaacattgacctagcagaggaagcggctcaagaactgttcaagatagaacccgaaaatcctgttacttatgttacaatggctaacatctatgctgcagcaggtaaatgggaggaagaagggaaaatgagaaagagaatgcaagaaatcggagtcaccaaaaggcctggttcaagctggaccgagataaaacggaagcgtcatgtattcatagcagcggatacttcgcatccaatgtataaccaaatagttgagttcttgagggaattgaggaagaagatgaaagaagaagggtatgttccggctacgagtcttgtattgcacgatgtagaagatgaacaaaaagaagagaatcttgtgtatcatagcgagaaacttgctgttgcatttgcaattctatcgacagaagaaggaacggcgattaaggtgtttaagaacttgaggtcttgtgtggattgtcacggtgctattaagttcatatcgaacatcacaaagaggaagataaccgtaagggactctactcggtttcattgctttgagaatggacaatgttcttgtggagattattggtaa

SEQ ID NO: 79342 - protein, 691 aa, Arabidopsis thaliana
  peptide (1)..(691): Ceres Seq. ID no. 12650937
  misc_feature (121)..(155): Pfam Name: PPR repeat Pfam Description: PPR repeat
  misc_feature (68)..(691): Homolog of NCBI NO: 15229426 NR Description: hypothetical protein; protein id: At3g23330.1 thaliana] >gi|11994318|dbj|BAB02277.1|
  misc_feature (155)..(691): Homolog of NCBI NO: 34903762 NR Description: unnamed protein product [Oryza sativa (japonica group)] >gi|7340873|dbj|BAA92963.1| unnamed protein product
  misc_feature (43)..(177): Homolog of NCBI NO: 34903762 NR Description: unnamed protein product [Oryza sativa (japonica group)] >gi|7340873|dbj|BAA92963.1| unnamed protein product
  misc_feature (120)..(691): Homolog of NCBI NO: 15235498 NR Description: hypothetical protein; protein id: At4g02750.1
  misc_feature (83)..(691): Homolog of NCBI NO: 15223099 NR Description: unknown protein; protein id: At1g08070.1 thaliana] >gi|8778839|gb|AAF79838.1|AC026875_18 T6D22.15
  misc_feature (155)..(691): Homolog of NCBI NO: 15242550 NR Description: selenium-binding protein-like; protein id:
  misc_feature (101)..(181): Homolog of NCBI NO: 15242550 NR Description: selenium-binding protein-like; protein id:
  misc_feature (155)..(691): Homolog of NCBI NO: 15227724 NR Description: putative selenium-binding protein; protein id:
  misc_feature (64)..(173): Homolog of NCBI NO: 15227724 NR Description: putative selenium-binding protein; protein id:
  misc_feature (155)..(691): Homolog of NCBI NO: 28392910 NR Description: putative selenium-binding protein [Arabidopsis
MNHSNARKLTTLHGFILKRNLSSFHASLKRFSDKKFFNPNHEDGGVVVERLCRANRFGEAIDVLCGQKLLREAVQLLGRAKKPPASTYCNLIQVCSQTRALEEGKKVHEHIRTSGFVPGIVIWNRLLRMYAKCGSLVDARKVFDEMPNRDLCSWNVMVNGYAEVGLLEEARKLFDEMTEKDSYSWTAMVTGYVKKDQPEEALVLYSLMQRVPNSRPNIFTVSIAVAAAAAVKCIRRGKEIHGHIVRAGLDSDEVLWSSLMDMYGKCGCIDEARNIFDKIVEKDVVSWTSMIDRYFKSSRWREGFSLFSELVGSCERPNEYTFAGVLNACADLTTEELGKQVHGYMTRVGFDPYSFASSSLVDMYTKCGNIESAKHVVDGCPKPDLVSWTSLIGGCAQNGQPDEALKYFDLLLKSGTKPDHVTFVNVLSACTHAGLVEKGLEFFYSITEKHRLSHTSDHYTCLVDLLARSGRFEQLKSVISEMPMKPSKFLWASVLGGCSTYGNIDLAEEAAQELFKIEPENPVTYVTMANIYAAAGKWEEEGKMRKRMQEIGVTKRPGSSWTEIKRKRHVFIAADTSHPMYNQIVEFLRELRKKMKEEGYVPATSLVLHDVEDEQKEENLVYHSEKLAVAFAILSTEEGTAIKVFKNLRSCVDCHGAIKFISNITKRKITVRDSTRFHCFENGQCSCGDYW

SEQ ID NO: 79343 - protein, 563 aa, Arabidopsis thaliana
  peptide (1)..(563): Ceres Seq. ID no. 12650938
  misc_feature (1)..(27): Pfam Name: PPR repeat Pfam Description: PPR repeat
  misc_feature (1)..(563): Homolog of NCBI NO: 15229426 NR Description: hypothetical protein; protein id: At3g23330.1 thaliana] >gi|11994318|dbj|BAB02277.1|
  misc_feature (27)..(563): Homolog of NCBI NO: 34903762 NR Description: unnamed protein product [Oryza sativa (japonica group)] >gi|7340873|dbj|BAA92963.1| unnamed protein product
  misc_feature (1)..(49): Homolog of NCBI NO: 34903762 NR Description: unnamed protein product [Oryza sativa (japonica group)] >gi|7340873|dbj|BAA92963.1| unnamed protein product
  misc_feature (1)..(563): Homolog of NCBI NO: 15235498 NR Description: hypothetical protein; protein id: At4g02750.1
  misc_feature (1)..(563): Homolog of NCBI NO: 15223099 NR Description: unknown protein; protein id: At1g08070.1 thaliana] >gi|8778839|gb|AAF79838.1|AC026875_18 T6D22.15
  misc_feature (27)..(563): Homolog of NCBI NO: 15242550 NR Description: selenium-binding protein-like; protein id:
  misc_feature (1)..(53): Homolog of NCBI NO: 15242550 NR Description: selenium-binding protein-like; protein id:
  misc_feature (27)..(563): Homolog of NCBI NO: 15227724 NR Description: putative selenium-binding protein; protein id:
  misc_feature (1)..(45): Homolog of NCBI NO: 15227724 NR Description: putative selenium-binding protein; protein id:
  misc_feature (27)..(563): Homolog of NCBI NO: 28392910 NR Description: putative selenium-binding protein [Arabidopsis
MYAKCGSLVDARKVFDEMPNRDLCSWNVMVNGYAEVGLLEEARKLFDEMTEKDSYSWTAMVTGYVKKDQPEEALVLYSLMQRVPNSRPNIFTVSIAVAAAAAVKCIRRGKEIHGHIVRAGLDSDEVLWSSLMDMYGKCGCIDEARNIFDKIVEKDVVSWTSMIDRYFKSSRWREGFSLFSELVGSCERPNEYTFAGVLNACADLTTEELGKQVHGYMTRVGFDPYSFASSSLVDMYTKCGNIESAKHVVDGCPKPDLVSWTSLIGGCAQNGQPDEALKYFDLLLKSGTKPDHVTFVNVLSACTHAGLVEKGLEFFYSITEKHRLSHTSDHYTCLVDLLARSGRFEQLKSVISEMPMKPSKFLWASVLGGCSTYGNIDLAEEAAQELFKIEPENPVTYVTMANIYAAAGKWEEEGKMRKRMQEIGVTKRPGSSWTEIKRKRHVFIAADTSHPMYNQIVEFLRELRKKMKEEGYVPATSLVLHDVEDEQKEENLVYHSEKLAVAFAILSTEEGTAIKVFKNLRSCVDCHGAIKFISNITKRKITVRDSTRFHCFENGQCSCGDYW

SEQ ID NO: 79344 - protein, 546 aa, Arabidopsis thaliana
  peptide (1)..(546): Ceres Seq. ID no. 12650939
  misc_feature (1)..(546): Homolog of NCBI NO: 15229426 NR Description: hypothetical protein; protein id: At3g23330.1 thaliana] >gi|11994318|dbj|BAB02277.1|
  misc_feature (10)..(546): Homolog of NCBI NO: 34903762 NR Description: unnamed protein product [Oryza sativa (japonica group)] >gi|7340873|dbj|BAA92963.1| unnamed protein product
  misc_feature (1)..(32): Homolog of NCBI NO: 34903762 NR Description: unnamed protein product [Oryza sativa (japonica group)] >gi|7340873|dbj|BAA92963.1| unnamed protein product
  misc_feature (1)..(546): Homolog of NCBI NO: 15235498 NR Description: hypothetical protein; protein id: At4g02750.1
  misc_feature (1)..(546): Homolog of NCBI NO: 15223099 NR Description: unknown protein; protein id: At1g08070.1 thaliana] >gi|8778839|gb|AAF79838.1|AC026875_18 T6D22.15
  misc_feature (10)..(546): Homolog of NCBI NO: 15242550 NR Description: selenium-binding protein-like; protein id:
  misc_feature (1)..(36): Homolog of NCBI NO: 15242550 NR Description: selenium-binding protein-like; protein id:
  misc_feature (10)..(546): Homolog of NCBI NO: 15227724 NR Description: putative selenium-binding protein; protein id:
  misc_feature (1)..(28): Homolog of NCBI NO: 15227724 NR Description: putative selenium-binding protein; protein id:
  misc_feature (10)..(546): Homolog of NCBI NO: 28392910 NR Description: putative selenium-binding protein [Arabidopsis
MPNRDLCSWNVMVNGYAEVGLLEEARKLFDEMTEKDSYSWTAMVTGYVKKDQPEEALVLYSLMQRVPNSRPNIFTVSIAVAAAAAVKCIRRGKEIHGHIVRAGLDSDEVLWSSLMDMYGKCGCIDEARNIFDKIVEKDVVSWTSMIDRYFKSSRWREGFSLFSELVGSCERPNEYTFAGVLNACADLTTEELGKQVHGYMTRVGFDPYSFASSSLVDMYTKCGNIESAKHVVDGCPKPDLVSWTSLIGGCAQNGQPDEALKYFDLLLKSGTKPDHVTFVNVLSACTHAGLVEKGLEFFYSITEKHRLSHTSDHYTCLVDLLARSGRFEQLKSVISEMPMKPSKFLWASVLGGCSTYGNIDLAEEAAQELFKIEPENPVTYVTMANIYAAAGKWEEEGKMRKRMQEIGVTKRPGSSWTEIKRKRHVFIAADTSHPMYNQIVEFLRELRKKMKEEGYVPATSLVLHDVEDEQKEENLVYHSEKLAVAFAILSTEEGTAIKVFKNLRSCVDCHGAIKFISNITKRKITVRDSTRFHCFENGQCSCGDYW

SEQ ID NO: 79345 - DNA, 2301 bp, Arabidopsis thaliana
  misc_feature (1)..(2301): Ceres Seq. ID no. 12650944
  misc_feature: MA Experiment ID: 20000171 Result: Up-regulated in Transcription
  misc_feature: MA Experiment 20000171 PARAMETER Experiment Name: At_42deg_Heat_P Parameter: Age (day) Value: 14
  misc_feature: MA Experiment 20000171 PARAMETER Experiment Name: At_42deg_Heat_P Parameter: Organism Value: A. thaliana
  misc_feature: MA Experiment 20000171 PARAMETER Experiment Name: At_42deg_Heat_P Parameter: Plant Line Value: WS
  misc_feature: MA Experiment 20000171 PARAMETER Experiment Name: At_42deg_Heat_P Parameter: Temperature (deg C) Value: 42 vs. 22
  misc_feature: MA Experiment 20000171 PARAMETER Experiment Name: At_42deg_Heat_P Parameter: Timepoint (hr) Value: 1
  misc_feature: MA Experiment 20000171 PARAMETER Experiment Name: At_42deg_Heat_P Parameter: Tissue Value: Aerial
  misc_feature: MA Experiment ID: 20000495 Result: Up-regulated in Transcription
  misc_feature: MA Experiment 20000495 PARAMETER Experiment Name: At_Guard_Cells_P Parameter: Harvest Date Value: 8/2/2002
  misc_feature: MA Experiment 20000495 PARAMETER Experiment Name: At_Guard_Cells_P Parameter: Organism Value: A. thaliana
  misc_feature: MA Experiment 20000495 PARAMETER Experiment Name: At_Guard_Cells_P Parameter: Tissue Value: Guard Cells vs. Leaves
  misc_feature: MA Experiment ID: 20001248 Result: Up-regulated in Transcription
  misc_feature: MA Experiment 20001248 PARAMETER Experiment Name: At_Far-red-induction_P Parameter: Age (day) Value: 7
  misc_feature: MA Experiment 20001248 PARAMETER Experiment Name: At_Far-red-induction_P Parameter: Light Value: Far-red vs. White
  misc_feature: MA Experiment 20001248 PARAMETER Experiment Name: At_Far-red-induction_P Parameter: Organism Value: A. thaliana
  misc_feature: MA Experiment 20001248 PARAMETER Experiment Name: At_Far-red-induction_P Parameter: Plant Line Value: Columbia
  misc_feature: MA Experiment 20001248 PARAMETER Experiment Name: At_Far-red-induction_P Parameter: Timepoint (hr) Value: 4
  misc_feature: MA Experiment 20001248 PARAMETER Experiment Name: At_Far-red-induction_P Parameter: Tissue Value: Whole Plant
  misc_feature: MA Experiment ID: 20001451 Result: Up-regulated in Transcription
  misc_feature: MA Experiment 20001451 PARAMETER Experiment Name: At_Far-red-induction_P Parameter: Age (day) Value: 7
  misc_feature: MA Experiment 20001451 PARAMETER Experiment Name: At_Far-red-induction_P Parameter: Light Value: Far-red vs. White
  misc_feature: MA Experiment 20001451 PARAMETER Experiment Name: At_Far-red-induction_P Parameter: Organism Value: A. thaliana
  misc_feature: MA Experiment 20001451 PARAMETER Experiment Name: At_Far-red-induction_P Parameter: Plant Line Value: Columbia
  misc_feature: MA Experiment 20001451 PARAMETER Experiment Name: At_Far-red-induction_P Parameter: Timepoint (hr) Value: 24
  misc_feature: MA Experiment 20001451 PARAMETER Experiment Name: At_Far-red-induction_P Parameter: Tissue Value: Whole Plant
  misc_feature: MA Experiment ID: 20001905 Result: Down-regulated in Transcription
  misc_feature: MA Experiment 20001905 PARAMETER Experiment Name: At_Drought_Reproduction_P Parameter: Age (day) Value: 40
  misc_feature: MA Experiment 20001905 PARAMETER Experiment Name: At_Drought_Reproduction_P Parameter: Organism Value: A. thaliana
  misc_feature: MA Experiment 20001905 PARAMETER Experiment Name: At_Drought_Reproduction_P Parameter: Plant Line Value: WS
  misc_feature: MA Experiment 20001905 PARAMETER Experiment Name: At_Drought_Reproduction_P Parameter: Timepoint (day) Value: 10
  misc_feature: MA Experiment 20001905 PARAMETER Experiment Name: At_Drought_Reproduction_P Parameter: Tissue Value: Rosettes
  misc_feature: MA Experiment 20001905 PARAMETER Experiment Name: At_Drought_Reproduction_P Parameter: Treatment Value: Drought vs. No Drought
  misc_feature: MA Experiment ID: 20001911 Result: Down-regulated in Transcription
  misc_feature: MA Experiment 20001911 PARAMETER Experiment Name: At_Drought_Reproduction_P Parameter: Age (day) Value: 40
  misc_feature: MA Experiment 20001911 PARAMETER Experiment Name: At_Drought_Reproduction_P Parameter: Organism Value: A. thaliana
  misc_feature: MA Experiment 20001911 PARAMETER Experiment Name: At_Drought_Reproduction_P Parameter: Plant Line Value: WS
  misc_feature: MA Experiment 20001911 PARAMETER Experiment Name: At_Drought_Reproduction_P Parameter: Timepoint (day) Value: 10
  misc_feature: MA Experiment 20001911 PARAMETER Experiment Name: At_Drought_Reproduction_P Parameter: Tissue Value: Flowers
  misc_feature: MA Experiment 20001911 PARAMETER Experiment Name: At_Drought_Reproduction_P Parameter: Treatment Value: Drought vs. No Drought
atggagttgatttcagtgattttcttcttcttttgctctgttttgagttcctctgctttaaactctgatgggttggttttgatgaagtttaaatcctctgttcttgttgatcctctgtctttattacagacatggaattacaaacacgaaagtccatgttcttggagaggaatctcttgtaataacgattctaaagtcttaactttgtctcttcccaattctcagcttcttggttcgattccttctgatttgggttctctcttaacacttcaaagtctcgatctttccaataattccttcaatgggccattaccggtttctttcttcaacgctagagagcttcgtttccttgatctctctagtaacatgatctccggcgaaatcccttccgcaattggtgatcttcacaatcttctaaccctaaatctctctgataatgccttggcgggaaagttacctacaaatttggcgtcgttgagaaacttaacggtggtttctttggagaataattacttttccggcgagattcccggcggttggagagttgttgagttcttagacctgtcgtcgaatctgatcaatggctcgcttcctccggattttggcggatatagtctccagtacttaaatgtctcgtttaaccaaatctccggcgaaattccaccggagatcggagtcaatttcccaagaaacgtcaccgttgatctctccttcaacaatttaaccggtccaatccctgattctccggttttcttaaaccaggaatcaaatttcttttcaggaaacccgggtctatgcggtgaaccgacccgaaacccgtgtcttatcccttcctcgccgtctatcgtctccgaagccgacgtaccgacgtctacaccagcaatcgccgcaataccgaacacaatcggttcaaacccggttaccgatccaaattcacaacaaaccgacccaaatccccgaaccgggttacgacccggagttataatagggatcgtagtcggagatatcgctggaatcggaatcctcgccgtgattttcctctacatctacagatgcaagaagaacaagatagtggataacaacaacaacgacaagcaaagaacagaaacagacacaattacgttatcaacattttcatcttcttcttcttcaccagaagagtcaagaagattcaggaaatggtcgtgtctacgaaaagatcctgaaacgacaccgtctgaagaagaagatgaagatgatgaagacgaagaaagcggttacaatgcaaatcaacggtcaggagataacaagttagtgaccgttgatggagagaaggagatggagattgagactctgcttaaggcttcagcttatattttaggagccacaggttcgagtataatgtataaagccgttcttgaagacggtagggttttcgcggttcgtcgactcggtgaaaacggtttatctcagcgccggtttaaggattttgagccgcacattcgagccattgggaaattggttcacccgaatttggttagactttgtgggttctattggggtaccgacgagaaactagtcatttacgattttgtccctaacggcagcctcgtcaacccccgttaccgaaaaggaggagggtcttcttcaccgtatcacctaccgtgggaaactcggctcaagatagcaaagggcattgcacgtgggctggcttatctccacgagaagaagcatgtgcatggaaacttgaagcctagcaacatacttttgggccatgacatggaacccaaaataggcgatttcggactcgaaaggcttcttacaggcgaaacaagctacattcgagctggtggatcttctaggattttcagtagtaagcgttacacaacttcctcgcgagaattctcgtctatcgggcctacaccaagcccgagtccgagctcggtgggggcgatgtcaccctactgcgcaccagagtctttccgaagcctaaaaccgagtccgaaatgggacgtttacggctttggagtgatccttctcgagcttctcacgggaaagattgtgtctgttgaagagattgtgctaggaaacggacttacggttgaggacgggcaccgcgcagtgagaatggctgatgtggcgatccgcggcgagttagatggcaaacaagagtttttactcgattgtttcaagttaggctatagctgtgcgtctcctgttcctcaaaagaggccaacgatgaaagaatctttggctgttcttgaaagattccatcctaactcctctgttattaagtcttcatcgttccattacggacattaa

SEQ ID NO: 79346 - protein, 766 aa, Arabidopsis thaliana
  peptide (1)..(766): Ceres Seq. ID no. 12650945
  misc_feature (8)..(766): Homolog of NCBI NO: 15227808 NR Description: leucine-rich repeat transmembrane protein kinase, protein id: At2g23300.1 [Arabidopsis thaliana]
  misc_feature (3)..(643): Homolog of NCBI NO: 15240265 NR Description: leucine-rich repeat transmembrane protein kinase, protein id: At5g67280.1, supported by cDNA: 110712., supported by
  misc_feature (3)..(643): Homolog of NCBI NO: 15809976 NR Description: AT5g67280/K3G17_4 [Arabidopsis thaliana]
  misc_feature (19)..(601): Homolog of NCBI NO: 15226084 NR Description: leucine-rich repeat transmembrane protein kinase, protein id: At2g15300.1 [Arabidopsis thaliana]
  misc_feature (651)..(749): Homolog of NCBI NO: 15226084 NR Description: leucine-rich repeat transmembrane protein kinase, protein id: At2g15300.1 [Arabidopsis thaliana]
  misc_feature (3)..(749): Homolog of NCBI NO: 18418404 NR Description: leucine-rich repeat transmembrane protein kinase, protein id: At4g34220.1, supported by cDNA: gi_14334871, by cDNA: gi_21281266 [Arabidopsis thaliana]
  misc_feature (93)..(755): Homolog of NCBI NO: 15240265 NR Description: leucine-rich repeat transmembrane protein kinase, protein id: At5g67280.1, supported by cDNA: 110712., supported by
  misc_feature (3)..(742): Homolog of NCBI NO: 7488258 NR Description: protein kinase homolog F28A23.20 - Arabidopsis
  misc_feature (93)..(755): Homolog of NCBI NO: 15809976 NR Description: AT5g67280/K3G17_4 [Arabidopsis thaliana]
  misc_feature (3)..(388): Homolog of NCBI NO: 15226197 NR Description: leucine-rich repeat transmembrane protein kinase, protein id: At2g01210.1 [Arabidopsis thaliana]
MELISVIFFFFCSVLSSSALNSDGLVLMKFKSSVLVDPLSLLQTWNYKHESPCSWRGISCNNDSKVLTLSLPNSQLLGSIPSDLGSLLTLQSLDLSNNSFNGPLPVSFFNARELRFLDLSSNMISGEIPSAIGDLHNLLTLNLSDNALAGKLPTNLASLRNLTVVSLENNYFSGEIPGGWRVVEFLDLSSNLINGSLPPDFGGYSLQYLNVSFNQISGEIPPEIGVNFPRNVTVDLSFNNLTGPIPDSPVFLNQESNFFSGNPGLCGEPTRNPCLIPSSPSIVSEADVPTSTPAIAAIPNTIGSNPVTDPNSQQTDPNPRTGLRPGVIIGIVVGDIAGIGILAVIFLYIYRCKKNKIVDNNNNDKQRTETDTITLSTFSSSSSSPEESRRFRKWSCLRKDPETTPSEEEDEDDEDEESGYNANQRSGDNKLVTVDGEKEMEIETLLKASAYILGATGSSIMYKAVLEDGRVFAVRRLGENGLSQRRFKDFEPHIRAIGKLVHPNLVRLCGFYWGTDEKLVIYDFVPNGSLVNPRYRKGGGSSSPYHLPWETRLKIAKGIARGLAYLHEKKHVHGNLKPSNILLGHDMEPKIGDFGLERLLTGETSYIRAGGSSRIFSSKRYTTSSREFSSIGPTPSPSPSSVGAMSPYCAPESFRSLKPSPKWDVYGFGVILLELLTGKIVSVEEIVLGNGLTVEDGHRAVRMADVAIRGELDGKQEFLLDCFKLGYSCASPVPQKRPTMKESLAVLERFHPNSSVIKSSSFHYGH

SEQ ID NO: 79347 - protein, 739 aa, Arabidopsis thaliana
  peptide (1)..(739): Ceres Seq. ID no. 12650946
  misc_feature (1)..(739): Homolog of NCBI NO: 15227808 NR Description: leucine-rich repeat transmembrane protein kinase, protein id: At2g23300.1 [Arabidopsis thaliana]
  misc_feature (1)..(616): Homolog of NCBI NO: 15240265 NR Description: leucine-rich repeat transmembrane protein kinase, protein id: At5g67280.1, supported by cDNA: 110712., supported by
  misc_feature (1)..(616): Homolog of NCBI NO: 15809976 NR Description: AT5g67280/K3G17_4 [Arabidopsis thaliana]
  misc_feature (1)..(574): Homolog of NCBI NO: 15226084 NR Description: leucine-rich repeat transmembrane protein kinase, protein id: At2g15300.1 [Arabidopsis thaliana]
  misc_feature (624)..(722): Homolog of NCBI NO: 15226084 NR Description: leucine-rich repeat transmembrane protein kinase, protein id: At2g15300.1 [Arabidopsis thaliana]
  misc_feature (1)..(722): Homolog of NCBI NO: 18418404 NR Description: leucine-rich repeat transmembrane protein kinase, protein id: At4g34220.1, supported by cDNA: gi_14334871, by cDNA: gi_21281266 [Arabidopsis thaliana]
  misc_feature (66)..(728): Homolog of NCBI NO: 15240265 NR Description: leucine-rich repeat transmembrane protein kinase, protein id: At5g67280.1, supported by cDNA: 110712., supported by
  misc_feature (1)..(715): Homolog of NCBI NO: 7488258 NR Description: protein kinase homolog F28A23.20 - Arabidopsis
  misc_feature (66)..(728): Homolog of NCBI NO: 15809976 NR Description: AT5g67280/K3G17_4 [Arabidopsis thaliana]
  misc_feature (1)..(361): Homolog of NCBI NO: 15226197 NR Description: leucine-rich repeat transmembrane protein kinase, protein id: At2g01210.1 [Arabidopsis thaliana]
MKFKSSVLVDPLSLLQTWNYKHESPCSWRGISCNNDSKVLTLSLPNSQLLGSIPSDLGSLLTLQSLDLSNNSFNGPLPVSFFNARELRFLDLSSNMISGEIPSAIGDLHNLLTLNLSDNALAGKLPTNLASLRNLTVVSLENNYFSGEIPGGWRVVEFLDLSSNLINGSLPPDFGGYSLQYLNVSFNQISGEIPPEIGVNFPRNVTVDLSFNNLTGPIPDSPVFLNQESNFFSGNPGLCGEPTRNPCLIPSSPSIVSEADVPTSTPAIAAIPNTIGSNPVTDPNSQQTDPNPRTGLRPGVIIGIVVGDIAGIGILAVIFLYIYRCKKNKIVDNNNNDKQRTETDTITLSTFSSSSSSPEESRRFRKWSCLRKDPETTPSEEEDEDDEDEESGYNANQRSGDNKLVTVDGEKEMEIETLLKASAYILGATGSSIMYKAVLEDGRVFAVRRLGENGLSQRRFKDFEPHIRAIGKLVHPNLVRLCGFYWGTDEKLVIYDFVPNGSLVNPRYRKGGGSSSPYHLPWETRLKIAKGIARGLAYLHEKKHVHGNLKPSNILLGHDMEPKIGDFGLERLLTGETSYIRAGGSSRIFSSKRYTTSSREFSSIGPTPSPSPSSVGAMSPYCAPESFRSLKPSPKWDVYGFGVILLELLTGKIVSVEEIVLGNGLTVEDGHRAVRMADVAIRGELDGKQEFLLDCFKLGYSCASPVPQKRPTMKESLAVLERFHPNSSVIKSSSFHYGH

SEQ ID NO: 79348 - protein, 644 aa, Arabidopsis thaliana
  peptide (1)..(644): Ceres Seq. ID no. 12650947
  misc_feature (1)..(644): Homolog of NCBI NO: 15227808 NR Description: leucine-rich repeat transmembrane protein kinase, protein id: At2g23300.1 [Arabidopsis thaliana]
  misc_feature (1)..(521): Homolog of NCBI NO: 15240265 NR Description: leucine-rich repeat transmembrane protein kinase, protein id: At5g67280.1, supported by cDNA: 110712., supported by
  misc_feature (1)..(521): Homolog of NCBI NO: 15809976 NR Description: AT5g67280/K3G17_4 [Arabidopsis thaliana]
  misc_feature (1)..(479): Homolog of NCBI NO: 15226084 NR Description: leucine-rich repeat transmembrane protein kinase, protein id: At2g15300.1 [Arabidopsis thaliana]
  misc_feature (529)..(627): Homolog of NCBI NO: 15226084 NR Description: leucine-rich repeat transmembrane protein kinase, protein id: At2g15300.1 [Arabidopsis thaliana]
  misc_feature (1)..(627): Homolog of NCBI NO: 18418404 NR Description: leucine-rich repeat transmembrane protein kinase, protein id: At4g34220.1, supported by cDNA: gi_14334871, by cDNA: gi_21281266 [Arabidopsis thaliana]
  misc_feature (1)..(633): Homolog of NCBI NO: 15240265 NR Description: leucine-rich repeat transmembrane protein kinase, protein id: At5g67280.1, supported by cDNA: 110712., supported by
  misc_feature (1)..(620): Homolog of NCBI NO: 7488258 NR Description: protein kinase homolog F28A23.20 - Arabidopsis
  misc_feature (1)..(633): Homolog of NCBI NO: 15809976 NR Description: AT5g67280/K3G17_4 [Arabidopsis thaliana]
  misc_feature (1)..(266): Homolog of NCBI NO: 15226197 NR Description: leucine-rich repeat transmembrane protein kinase, protein id: At2g01210.1 [Arabidopsis thaliana]
MISGEIPSAIGDLHNLLTLNLSDNALAGKLPTNLASLRNLTVVSLENNYFSGEIPGGWRVVEFLDLSSNLINGSLPPDFGGYSLQYLNVSFNQISGEIPPEIGVNFPRNVTVDLSFNNLTGPIPDSPVFLNQESNFFSGNPGLCGEPTRNPCLIPSSPSIVSEADVPTSTPAIAAIPNTIGSNPVTDPNSQQTDPNPRTGLRPGVIIGIVVGDIAGIGILAVIFLYIYRCKKNKIVDNNNNDKQRTETDTITLSTFSSSSSSPEESRRFRKWSCLRKDPETTPSEEEDEDDEDEESGYNANQRSGDNKLVTVDGEKEMEIETLLKASAYILGATGSSIMYKAVLEDGRVFAVRRLGENGLSQRRFKDFEPHIRAIGKLVHPNLVRLCGFYWGTDEKLVIYDFVPNGSLVNPRYRKGGGSSSPYHLPWETRLKIAKGIARGLAYLHEKKHVHGNLKPSNILLGHDMEPKIGDFGLERLLTGETSYIRAGGSSRIFSSKRYTTSSREFSSIGPTPSPSPSSVGAMSPYCAPESFRSLKPSPKWDVYGFGVILLELLTGKIVSVEEIVLGNGLTVEDGHRAVRMADVAIRGELDGKQEFLLDCFKLGYSCASPVPQKRPTMKESLAVLERFHPNSSVIKSSSFHYGH

SEQ ID NO: 79349 - DNA, 1503 bp, Arabidopsis thaliana
  misc_feature (1)..(1503): Ceres Seq. ID no. 12650952
  misc_feature: MA Experiment ID: 20000185 Result: Up-regulated in Transcription
  misc_feature: MA Experiment 20000185 PARAMETER Experiment Name: At_Roots__P Parameter: Age (day) Value: 7 vs. 21
  misc_feature: MA Experiment 20000185 PARAMETER Experiment Name: At_Roots__P Parameter: Organism Value: A. thaliana
  misc_feature: MA Experiment 20000185 PARAMETER Experiment Name: At_Roots__P Parameter: Tissue Value: Roots vs. Whole Plant
  misc_feature: MA Experiment ID: 20000439 Result: Up-regulated in Transcription
  misc_feature: MA Experiment 20000439 PARAMETER Experiment Name: At_Roots__P Parameter: Age (day) Value: 14 vs. 21
  misc_feature: MA Experiment 20000439 PARAMETER Experiment Name: At_Roots__P Parameter: Organism Value: A. thaliana
  misc_feature: MA Experiment 20000439 PARAMETER Experiment Name: At_Roots__P Parameter: Tissue Value: Roots vs. Whole Plant
atggaaggtcaaaccctaattttcacattccttttcatatctctttctctcacgtttatcatcggaagaatcaagcgaagacctaaccttcctccgagtccgtcgtgggcgttaccggtgatcggtcacctccgccttctcaagccgccactccaccgagtttttctatccgtctctgagtccctaggcgatgctccgataatctccctccgtctcggcaaccgactcgttttcgttgtctcttcacactcactcgccgaggaatgcttcacaaagaacgacgtcgtactcgcgaaccgcttcaactcccttgcttcaaaacacatctcatatggctgcacaacggttgttacagcttcgtacggcgaccattggagaaatctccgccgtattggcgctgttgagatattctcggctcaccgtctcaatagcttttcatctatccgccgagacgagatccaccggcttatagcttgtctctcacggaactcttcactcgaatttacaaaggttgagatgaaatcaatgttttctaacttaacattcaacaacattataagaatgttggctggaaaatgttactacggagatggtgcagaggatgacccggaggctaaacgcgtgcgggagcttatagcagagggaatgggttgttttggtgctggaaacactgctgattatttaccgatcctgacttggatcacaggttccgagaaacggataaagaagatcgctagtaggcttgatgagttcttgcagggattggtcgatgaaagacgagaagggaaggagaaaaggcagaacacaatggttgatcacttgctttgtctgcaagaaacccaacccgagtactacacggacaacattatcaaaggaatcatgctctctcttatactagcggggactgatacatccgcagtaacattggaatggacattgtcagctttgttgaaccatccacagatactaagcaaggcgagagatgaaatcgataataaggttggcctcaacaggcttgtagaggaatcagacctctcacatcttccttatcttcaaaacattgtgtccgagtcgttgcgcttataccctgcgagtcccttgttggttcctcacgtagcatcagaagactgtaaagtagggggttaccatatgccacgtggaacgatgctattgactaatgcatgggcaatacatagggatcctaagatatgggatgatccaacgagcttcaaaccagagaggttcgagaaagaaggggaggctcagaagctattggggtttgggctaggaagaagggcgtgtcctgggtccggtctggctcaacggctagcgagcttgactatcgggtctttgattcaatgttttgagtgggagaggataggagaagaagaggtggatatgactgaaggtggaggaggagtcataatgcccaaagctataccgttggtagccatgtgcaaagcacgccccgttgttggtaagatcctcaacgagtccgcttga

SEQ ID NO: 79350 - protein, 500 aa, Arabidopsis thaliana
  peptide (1)..(500): Ceres Seq. ID no. 12650953
  misc_feature (1)..(500): Homolog of NCBI NO: 15235534 NR Description: cytochrome P450 monooxygenase, putative; protein
  misc_feature (1)..(500): Homolog of NCBI NO: 15235535 NR Description: cytochrome p450 family; protein id: At4g37360.1
  misc_feature (1)..(499): Homolog of NCBI NO: 15235536 NR Description: cytochrome p450 family; protein id: At4g37370.1, by cDNA: 253698., supported by cDNA: gi_17473897 [Arabidopsis
  misc_feature (1)..(497): Homolog of NCBI NO: 21554381 NR Description: cytochrome P450-like protein [Arabidopsis
  misc_feature (97)..(499): Homolog of NCBI NO: 25282574 NR Description: probable cytochrome P450 F28G11.4 [imported] - thaliana >gi|12322266|gb|AAG51161.1|AC074025_11 cytochrome P450,
  misc_feature (2)..(104): Homolog of NCBI NO: 25282574 NR Description: probable cytochrome P450 F28G11.4 [imported] - thaliana >gi|12322266|gb|AAG51161.1|AC074025_11 cytochrome P450,
  misc_feature (4)..(496): Homolog of NCBI NO: 15235517 NR Description: cytochrome p450 family; protein id: At4g37320.1
  misc_feature (5)..(499): Homolog of NCBI NO: 15228472 NR Description: cytochrome p450 family; protein id: At3g28740.1, by cDNA: gi_15292830, supported by cDNA: gi_21280798 [Arabidopsis >gi|11994781|dbj|BAB03171.1| cytochrome P450 [Arabidopsis
  misc_feature (4)..(496): Homolog of NCBI NO: 15235533 NR Description: cytochrome p450 family; protein id: At4g37330.1
  misc_feature (7)..(497): Homolog of NCBI NO: 30692923 NR Description: cytochrome P450 91A1 [Arabidopsis thaliana] Cytochrome P450 81D1 >gi|9759034|dbj|BAB09361.1| cytochrome P450 thaliana] >gi|20147351|gb|AAM10388.1| AT5g36220/T30G6_3
MEGQTLIFTFLFISLSLTFIIGRIKRRPNLPPSPSWALPVIGHLRLLKPPLHRVFLSVSESLGDAPIISLRLGNRLVFVVSSHSLAEECFTKNDVVLANRFNSLASKHISYGCTTVVTASYGDHWRNLRRIGAVEIFSAHRLNSFSSIRRDEIHRLIACLSRNSSLEFTKVEMKSMFSNLTFNNIIRMLAGKCYYGDGAEDDPEAKRVRELIAEGMGCFGAGNTADYLPILTWITGSEKRIKKIASRLDEFLQGLVDERREGKEKRQNTMVDHLLCLQETQPEYYTDNIIKGIMLSLILAGTDTSAVTLEWTLSALLNHPQILSKARDEIDNKVGLNRLVEESDLSHLPYLQNIVSESLRLYPASPLLVPHVASEDCKVGGYHMPRGTMLLTNAWAIHRDPKIWDDPTSFKPERFEKEGEAQKLLGFGLGRRACPGSGLAQRLASLTIGSLIQCFEWERIGEEEVDMTEGGGGVIMPKAIPLVAMCKARPVVGKILNESA

SEQ ID NO: 79351 - protein, 328 aa, Arabidopsis thaliana
  peptide (1)..(328): Ceres Seq. ID no. 12650954
  misc_feature (1)..(328): Homolog of NCBI NO: 15235534 NR Description: cytochrome P450 monooxygenase, putative; protein
  misc_feature (1)..(328): Homolog of NCBI NO: 15235535 NR Description: cytochrome p450 family; protein id: At4g37360.1
  misc_feature (1)..(327): Homolog of NCBI NO: 15235536 NR Description: cytochrome p450 family; protein id: At4g37370.1, by cDNA: 253698., supported by cDNA: gi_17473897 [Arabidopsis
  misc_feature (1)..(325): Homolog of NCBI NO: 21554381 NR Description: cytochrome P450-like protein [Arabidopsis
  misc_feature (1)..(327): Homolog of NCBI NO: 25282574 NR Description: probable cytochrome P450 F28G11.4 [imported] - thaliana >gi|12322266|gb|AAG51161.1|AC074025_11 cytochrome P450,
  misc_feature (1)..(324): Homolog of NCBI NO: 15235517 NR Description: cytochrome p450 family; protein id: At4g37320.1
  misc_feature (1)..(327): Homolog of NCBI NO: 15228472 NR Description: cytochrome p450 family; protein id: At3g28740.1, by cDNA: gi_15292830, supported by cDNA: gi_21280798 [Arabidopsis >gi|11994781|dbj|BAB03171.1| cytochrome P450 [Arabidopsis
  misc_feature (1)..(324): Homolog of NCBI NO: 15235533 NR Description: cytochrome p450 family; protein id: At4g37330.1
  misc_feature (1)..(325): Homolog of NCBI NO: 30692923 NR Description: cytochrome P450 91A1 [Arabidopsis thaliana] Cytochrome P450 81D1 >gi|9759034|dbj|BAB09361.1| cytochrome P450 thaliana] >gi|20147351|gb|AAM10388.1| AT5g36220/T30G6_3
  misc_feature (1)..(325): Homolog of NCBI NO: 25282604 NR Description: cytochrome P450 monooxygenase [imported] - thaliana (fragment) >gi|3164142|dbj|BAA28538.1| cytochrome P450
MKSMFSNLTFNNIIRMLAGKCYYGDGAEDDPEAKRVRELIAEGMGCFGAGNTADYLPILTWITGSEKRIKKIASRLDEFLQGLVDERREGKEKRQNTMVDHLLCLQETQPEYYTDNIIKGIMLSLILAGTDTSAVTLEWTLSALLNHPQILSKARDEIDNKVGLNRLVEESDLSHLPYLQNIVSESLRLYPASPLLVPHVASEDCKVGGYHMPRGTMLLTNAWAIHRDPKIWDDPTSFKPERFEKEGEAQKLLGFGLGRRACPGSGLAQRLASLTIGSLIQCFEWERIGEEEVDMTEGGGGVIMPKAIPLVAMCKARPVVGKILNESA

SEQ ID NO: 79352 - protein, 325 aa, Arabidopsis thaliana
  peptide (1)..(325): Ceres Seq. ID no. 12650955
  misc_feature (1)..(325): Homolog of NCBI NO: 15235534 NR Description: cytochrome P450 monooxygenase, putative; protein
  misc_feature (1)..(325): Homolog of NCBI NO: 15235535 NR Description: cytochrome p450 family; protein id: At4g37360.1
  misc_feature (1)..(324): Homolog of NCBI NO: 15235536 NR Description: cytochrome p450 family; protein id: At4g37370.1, by cDNA: 253698., supported by cDNA: gi_17473897 [Arabidopsis
  misc_feature (1)..(322): Homolog of NCBI NO: 21554381 NR Description: cytochrome P450-like protein [Arabidopsis
  misc_feature (1)..(324): Homolog of NCBI NO: 25282574 NR Description: probable cytochrome P450 F28G11.4 [imported] - thaliana >gi|12322266|gb|AAG51161.1|AC074025_11 cytochrome P450,
  misc_feature (1)..(321): Homolog of NCBI NO: 15235517 NR Description: cytochrome p450 family; protein id: At4g37320.1
  misc_feature (1)..(324): Homolog of NCBI NO: 15228472 NR Description: cytochrome p450 family; protein id: At3g28740.1, by cDNA: gi_15292830, supported by cDNA: gi_21280798 [Arabidopsis >gi|11994781|dbj|BAB03171.1| cytochrome P450 [Arabidopsis
  misc_feature (1)..(321): Homolog of NCBI NO: 15235533 NR Description: cytochrome p450 family; protein id: At4g37330.1
  misc_feature (1)..(322): Homolog of NCBI NO: 30692923 NR Description: cytochrome P450 91A1 [Arabidopsis thaliana] Cytochrome P450 81D1 >gi|9759034|dbj|BAB09361.1| cytochrome P450 thaliana] >gi|20147351|gb|AAM10388.1| AT5g36220/T30G6_3
  misc_feature (1)..(322): Homolog of NCBI NO: 25282604 NR Description: cytochrome P450 monooxygenase [imported] - thaliana (fragment) >gi|3164142|dbj|BAA28538.1| cytochrome P450
MFSNLTFNNIIRMLAGKCYYGDGAEDDPEAKRVRELIAEGMGCFGAGNTADYLPILTWITGSEKRIKKIASRLDEFLQGLVDERREGKEKRQNTMVDHLLCLQETQPEYYTDNIIKGIMLSLILAGTDTSAVTLEWTLSALLNHPQILSKARDEIDNKVGLNRLVEESDLSHLPYLQNIVSESLRLYPASPLLVPHVASEDCKVGGYHMPRGTMLLTNAWAIHRDPKIWDDPTSFKPERFEKEGEAQKLLGFGLGRRACPGSGLAQRLASLTIGSLIQCFEWERIGEEEVDMTEGGGGVIMPKAIPLVAMCKARPVVGKILNESA
